United States Patent Application Publication US 2020/0392482 A1 - sequence listing, part 2

SEQ ID NO: 459 - DNA, 4000 bp, Escherichia coli
  misc_feature (1)..(7): n is a, c, g, or t
  misc_feature (9)..(12): n is a, c, g, or t
  misc_feature (14)..(23): n is a, c, g, or t
  misc_feature (25)..(43): n is a, c, g, or t
  misc_feature (45)..(45): n is a, c, g, or t
  misc_feature (47)..(59): n is a, c, g, or t
  misc_feature (61)..(63): n is a, c, g, or t
  misc_feature (65)..(68): n is a, c, g, or t
  misc_feature (70)..(82): n is a, c, g, or t
  misc_feature (84)..(87): n is a, c, g, or t
  misc_feature (90)..(97): n is a, c, g, or t
  misc_feature (99)..(100): n is a, c, g, or t
  misc_feature (102)..(107): n is a, c, g, or t
  misc_feature (109)..(109): n is a, c, g, or t
  misc_feature (111)..(127): n is a, c, g, or t
  misc_feature (129)..(130): n is a, c, g, or t
  misc_feature (132)..(152): n is a, c, g, or t
  misc_feature (154)..(160): n is a, c, g, or t
  misc_feature (162)..(164): n is a, c, g, or t
  misc_feature (166)..(173): n is a, c, g, or t
  misc_feature (175)..(182): n is a, c, g, or t
  misc_feature (184)..(191): n is a, c, g, or t
  misc_feature (193)..(199): n is a, c, g, or t
  misc_feature (201)..(201): n is a, c, g, or t
  misc_feature (203)..(206): n is a, c, g, or t
  misc_feature (208)..(208): n is a, c, g, or t
  misc_feature (210)..(212): n is a, c, g, or t
  misc_feature (215)..(219): n is a, c, g, or t
  misc_feature (221)..(230): n is a, c, g, or t
  misc_feature (233)..(244): n is a, c, g, or t
  misc_feature (246)..(248): n is a, c, g, or t
  misc_feature (250)..(255): n is a, c, g, or t
  misc_feature (258)..(284): n is a, c, g, or t
  misc_feature (286)..(288): n is a, c, g, or t
  misc_feature (290)..(300): n is a, c, g, or t
  misc_feature (303)..(307): n is a, c, g, or t
  misc_feature (309)..(310): n is a, c, g, or t
  misc_feature (312)..(319): n is a, c, g, or t
  misc_feature (321)..(325): n is a, c, g, or t
  misc_feature (327)..(361): n is a, c, g, or t
  misc_feature (363)..(375): n is a, c, g, or t
  misc_feature (377)..(379): n is a, c, g, or t
  misc_feature (381)..(384): n is a, c, g, or t
  misc_feature (388)..(389): n is a, c, g, or t
  misc_feature (391)..(391): n is a, c, g, or t
  misc_feature (393)..(400): n is a, c, g, or t
  misc_feature (402)..(425): n is a, c, g, or t
  misc_feature (427)..(446): n is a, c, g, or t
  misc_feature (448)..(453): n is a, c, g, or t
  misc_feature (455)..(458): n is a, c, g, or t
  misc_feature (460)..(460): n is a, c, g, or t
  misc_feature (462)..(474): n is a, c, g, or t
  misc_feature (476)..(477): n is a, c, g, or t
  misc_feature (479)..(483): n is a, c, g, or t
  misc_feature (485)..(499): n is a, c, g, or t
  misc_feature (501)..(523): n is a, c, g, or t
  misc_feature (525)..(527): n is a, c, g, or t
  misc_feature (529)..(536): n is a, c, g, or t
  misc_feature (538)..(543): n is a, c, g, or t
  misc_feature (546)..(550): n is a, c, g, or t
  misc_feature (552)..(578): n is a, c, g, or t
  misc_feature (580)..(595): n is a, c, g, or t
  misc_feature (597)..(602): n is a, c, g, or t
  misc_feature (604)..(612): n is a, c, g, or t
  misc_feature (614)..(615): n is a, c, g, or t
  misc_feature (617)..(620): n is a, c, g, or t
  misc_feature (622)..(625): n is a, c, g, or t
  misc_feature (627)..(630): n is a, c, g, or t
  misc_feature (632)..(640): n is a, c, g, or t
  misc_feature (642)..(653): n is a, c, g, or t
  misc_feature (655)..(661): n is a, c, g, or t
  misc_feature (663)..(668): n is a, c, g, or t
  misc_feature (670)..(674): n is a, c, g, or t
  misc_feature (676)..(683): n is a, c, g, or t
  misc_feature (686)..(688): n is a, c, g, or t
  misc_feature (690)..(695): n is a, c, g, or t
  misc_feature (697)..(706): n is a, c, g, or t
  misc_feature (708)..(743): n is a, c, g, or t
  misc_feature (745)..(751): n is a, c, g, or t
  misc_feature (753)..(764): n is a, c, g, or t
  misc_feature (766)..(771): n is a, c, g, or t
  misc_feature (773)..(775): n is a, c, g, or t
  misc_feature (779)..(781): n is a, c, g, or t
  misc_feature (783)..(783): n is a, c, g, or t
  misc_feature (785)..(787): n is a, c, g, or t
  misc_feature (789)..(793): n is a, c, g, or t
  misc_feature (795)..(797): n is a, c, g, or t
  misc_feature (799)..(799): n is a, c, g, or t
  misc_feature (801)..(804): n is a, c, g, or t
  misc_feature (806)..(808): n is a, c, g, or t
  misc_feature (811)..(817): n is a, c, g, or t
  misc_feature (820)..(827): n is a, c, g, or t
  misc_feature (829)..(833): n is a, c, g, or t
  misc_feature (835)..(835): n is a, c, g, or t
  misc_feature (837)..(844): n is a, c, g, or t
  misc_feature (846)..(847): n is a, c, g, or t
  misc_feature (849)..(852): n is a, c, g, or t
  misc_feature (854)..(857): n is a, c, g, or t
  misc_feature (859)..(863): n is a, c, g, or t
  misc_feature (866)..(870): n is a, c, g, or t
  misc_feature (872)..(872): n is a, c, g, or t
  misc_feature (876)..(877): n is a, c, g, or t
  misc_feature (879)..(879): n is a, c, g, or t
  misc_feature (882)..(885): n is a, c, g, or t
  misc_feature (887)..(889): n is a, c, g, or t
  misc_feature (891)..(893): n is a, c, g, or t
  misc_feature (895)..(895): n is a, c, g, or t
  misc_feature (898)..(906): n is a, c, g, or t
  misc_feature (908)..(908): n is a, c, g, or t
  misc_feature (910)..(914): n is a, c, g, or t
  misc_feature (916)..(918): n is a, c, g, or t
  misc_feature (920)..(923): n is a, c, g, or t
  misc_feature (926)..(930): n is a, c, g, or t
  misc_feature (932)..(941): n is a, c, g, or t
  misc_feature (943)..(945): n is a, c, g, or t
  misc_feature (948)..(973): n is a, c, g, or t
  misc_feature (975)..(976): n is a, c, g, or t
  misc_feature (978)..(981): n is a, c, g, or t
  misc_feature (983)..(986): n is a, c, g, or t
  misc_feature (988)..(993): n is a, c, g, or t
  misc_feature (995)..(1003): n is a, c, g, or t
  misc_feature (1005)..(1012): n is a, c, g, or t
  misc_feature (1014)..(1016): n is a, c, g, or t
  misc_feature (1018)..(1032): n is a, c, g, or t
  misc_feature (1035)..(1037): n is a, c, g, or t
  misc_feature (1039)..(1051): n is a, c, g, or t
  misc_feature (1053)..(1054): n is a, c, g, or t
  misc_feature (1057)..(1057): n is a, c, g, or t
  misc_feature (1059)..(1059): n is a, c, g, or t
  misc_feature (1063)..(1064): n is a, c, g, or t
  misc_feature (1066)..(1068): n is a, c, g, or t
  misc_feature (1070)..(1082): n is a, c, g, or t
  misc_feature (1085)..(1089): n is a, c, g, or t
  misc_feature (1091)..(1109): n is a, c, g, or t
  misc_feature (1111)..(1123): n is a, c, g, or t
  misc_feature (1125)..(1131): n is a, c, g, or t
  misc_feature (1133)..(1134): n is a, c, g, or t
  misc_feature (1136)..(1136): n is a, c, g, or t
  misc_feature (1138)..(1139): n is a, c, g, or t
  misc_feature (1141)..(1144): n is a, c, g, or t
  misc_feature (1146)..(1157): n is a, c, g, or t
  misc_feature (1160)..(1162): n is a, c, g, or t
  misc_feature (1165)..(1169): n is a, c, g, or t
  misc_feature (1171)..(1175): n is a, c, g, or t
  misc_feature (1178)..(1190): n is a, c, g, or t
  misc_feature (1192)..(1194): n is a, c, g, or t
  misc_feature (1196)..(1198): n is a, c, g, or t
  misc_feature (1200)..(1204): n is a, c, g, or t
  misc_feature (1206)..(1208): n is a, c, g, or t
  misc_feature (1210)..(1210): n is a, c, g, or t
  misc_feature (1212)..(1215): n is a, c, g, or t
  misc_feature (1217)..(1217): n is a, c, g, or t
  misc_feature (1221)..(1232): n is a, c, g, or t
  misc_feature (1235)..(1237): n is a, c, g, or t
  misc_feature (1240)..(1242): n is a, c, g, or t
  misc_feature (1244)..(1255): n is a, c, g, or t
  misc_feature (1257)..(1260): n is a, c, g, or t
  misc_feature (1262)..(1262): n is a, c, g, or t
  misc_feature (1264)..(1265): n is a, c, g, or t
  misc_feature (1270)..(1271): n is a, c, g, or t
  misc_feature (1273)..(1275): n is a, c, g, or t
  misc_feature (1277)..(1285): n is a, c, g, or t
  misc_feature (1287)..(1290): n is a, c, g, or t
  misc_feature (1292)..(1293): n is a, c, g, or t
  misc_feature (1296)..(1296): n is a, c, g, or t
  misc_feature (1298)..(1300): n is a, c, g, or t
  misc_feature (1302)..(1304): n is a, c, g, or t
  misc_feature (1306)..(1310): n is a, c, g, or t
  misc_feature (1312)..(1314): n is a, c, g, or t
  misc_feature (1316)..(1317): n is a, c, g, or t
  misc_feature (1319)..(1324): n is a, c, g, or t
  misc_feature (1326)..(1328): n is a, c, g, or t
  misc_feature (1331)..(1332): n is a, c, g, or t
  misc_feature (1334)..(1336): n is a, c, g, or t
  misc_feature (1338)..(1341): n is a, c, g, or t
  misc_feature (1343)..(1346): n is a, c, g, or t
  misc_feature (1349)..(1351): n is a, c, g, or t
  misc_feature (1353)..(1358): n is a, c, g, or t
  misc_feature (1361)..(1366): n is a, c, g, or t
  misc_feature (1368)..(1368): n is a, c, g, or t
  misc_feature (1370)..(1372): n is a, c, g, or t
  misc_feature (1374)..(1374): n is a, c, g, or t
  misc_feature (1377)..(1377): n is a, c, g, or t
  misc_feature (1379)..(1382): n is a, c, g, or t
  misc_feature (1384)..(1384): n is a, c, g, or t
  misc_feature (1387)..(1396): n is a, c, g, or t
  misc_feature (1398)..(1408): n is a, c, g, or t
  misc_feature (1411)..(1414): n is a, c, g, or t
  misc_feature (1416)..(1421): n is a, c, g, or t
  misc_feature (1423)..(1423): n is a, c, g, or t
  misc_feature (1428)..(1430): n is a, c, g, or t
  misc_feature (1432)..(1434): n is a, c, g, or t
  misc_feature (1436)..(1439): n is a, c, g, or t
  misc_feature (1442)..(1446): n is a, c, g, or t
  misc_feature (1448)..(1454): n is a, c, g, or t
  misc_feature (1458)..(1459): n is a, c, g, or t
  misc_feature (1461)..(1462): n is a, c, g, or t
  misc_feature (1468)..(1468): n is a, c, g, or t
  misc_feature (1470)..(1472): n is a, c, g, or t
  misc_feature (1475)..(1478): n is a, c, g, or t
  misc_feature (1480)..(1487): n is a, c, g, or t
  misc_feature (1489)..(1491): n is a, c, g, or t
  misc_feature (1493)..(1493): n is a, c, g, or t
  misc_feature (1495)..(1495): n is a, c, g, or t
  misc_feature (1497)..(1499): n is a, c, g, or t
  misc_feature (1501)..(1505): n is a, c, g, or t
  misc_feature (1508)..(1516): n is a, c, g, or t
  misc_feature (1519)..(1519): n is a, c, g, or t
  misc_feature (1521)..(1522): n is a, c, g, or t
  misc_feature (1525)..(1526): n is a, c, g, or t
  misc_feature (1528)..(1529): n is a, c, g, or t
  misc_feature (1531)..(1533): n is a, c, g, or t
  misc_feature (1535)..(1537): n is a, c, g, or t
  misc_feature (1539)..(1539): n is a, c, g, or t
  misc_feature (1542)..(1544): n is a, c, g, or t
  misc_feature (1546)..(1553): n is a, c, g, or t
  misc_feature (1964)..(1964): n is a, c, g, or t
  misc_feature (1985)..(1986): n is a, c, g, or t
  misc_feature (1988)..(1988): n is a, c, g, or t
  misc_feature (1995)..(1995): n is a, c, g, or t
  misc_feature (2176)..(2176): n is a, c, g, or t
  misc_feature (2178)..(2178): n is a, c, g, or t
  misc_feature (2181)..(2181): n is a, c, g, or t
  misc_feature (2183)..(2184): n is a, c, g, or t
  misc_feature (2186)..(2191): n is a, c, g, or t
  misc_feature (2193)..(2203): n is a, c, g, or t
  misc_feature (2205)..(2205): n is a, c, g, or t
  misc_feature (2207)..(2225): n is a, c, g, or t
  misc_feature (2227)..(2233): n is a, c, g, or t
  misc_feature (2235)..(2248): n is a, c, g, or t
  misc_feature (2250)..(2281): n is a, c, g, or t
  misc_feature (2283)..(2291): n is a, c, g, or t
  misc_feature (2294)..(2307): n is a, c, g, or t
  misc_feature (2309)..(2311): n is a, c, g, or t
  misc_feature (2314)..(2318): n is a, c, g, or t
  misc_feature (2320)..(2336): n is a, c, g, or t
  misc_feature (2338)..(2348): n is a, c, g, or t
  misc_feature (2350)..(2369): n is a, c, g, or t
  misc_feature (2371)..(2383): n is a, c, g, or t
  misc_feature (2385)..(2408): n is a, c, g, or t
  misc_feature (2410)..(2413): n is a, c, g, or t
  misc_feature (2415)..(2417): n is a, c, g, or t
  misc_feature (2419)..(2424): n is a, c, g, or t
  misc_feature (2426)..(2446): n is a, c, g, or t
  misc_feature (2448)..(2450): n is a, c, g, or t
  misc_feature (2452)..(2453): n is a, c, g, or t
  misc_feature (2456)..(2458): n is a, c, g, or t
  misc_feature (2460)..(2465): n is a, c, g, or t
  misc_feature (2467)..(2477): n is a, c, g, or t
  misc_feature (2479)..(2479): n is a, c, g, or t
  misc_feature (2481)..(2498): n is a, c, g, or t
  misc_feature (2500)..(2527): n is a, c, g, or t
  misc_feature (2529)..(2540): n is a, c, g, or t
  misc_feature (2542)..(2546): n is a, c, g, or t
  misc_feature (2548)..(2554): n is a, c, g, or t
  misc_feature (2556)..(2616): n is a, c, g, or t
  misc_feature (2618)..(2640): n is a, c, g, or t
  misc_feature (2642)..(2674): n is a, c, g, or t
  misc_feature (2676)..(2697): n is a, c, g, or t
  misc_feature (2699)..(2708): n is a, c, g, or t
  misc_feature (2710)..(2728): n is a, c, g, or t
  misc_feature (2730)..(2731): n is a, c, g, or t
  misc_feature (2733)..(2738): n is a, c, g, or t
  misc_feature (2740)..(2746): n is a, c, g, or t
  misc_feature (2748)..(2758): n is a, c, g, or t
  misc_feature (2760)..(2761): n is a, c, g, or t
  misc_feature (2763)..(2765): n is a, c, g, or t
  misc_feature (2767)..(2779): n is a, c, g, or t
  misc_feature (2781)..(2835): n is a, c, g, or t
  misc_feature (2837)..(2850): n is a, c, g, or t
  misc_feature (2852)..(2873): n is a, c, g, or t
  misc_feature (2875)..(2892): n is a, c, g, or t
  misc_feature (2894)..(2907): n is a, c, g, or t
  misc_feature (2909)..(2909): n is a, c, g, or t
  misc_feature (2911)..(2939): n is a, c, g, or t
  misc_feature (2943)..(2994): n is a, c, g, or t
  misc_feature (2997)..(2999): n is a, c, g, or t
  misc_feature (3001)..(3030): n is a, c, g, or t
  misc_feature (3032)..(3044): n is a, c, g, or t
  misc_feature (3046)..(3092): n is a, c, g, or t
  misc_feature (3094)..(3107): n is a, c, g, or t
  misc_feature (3109)..(3119): n is a, c, g, or t
  misc_feature (3121)..(3124): n is a, c, g, or t
  misc_feature (3126)..(3127): n is a, c, g, or t
  misc_feature (3129)..(3153): n is a, c, g, or t
  misc_feature (3155)..(3226): n is a, c, g, or t
  misc_feature (3228)..(3257): n is a, c, g, or t
  misc_feature (3259)..(3285): n is a, c, g, or t
  misc_feature (3287)..(3353): n is a, c, g, or t
  misc_feature (3356)..(3407): n is a, c, g, or t
  misc_feature (3409)..(3410): n is a, c, g, or t
  misc_feature (3412)..(3523): n is a, c, g, or t
  misc_feature (3525)..(3537): n is a, c, g, or t
  misc_feature (3539)..(3544): n is a, c, g, or t
  misc_feature (3546)..(3598): n is a, c, g, or t
  misc_feature (3600)..(3623): n is a, c, g, or t
  misc_feature (3625)..(3630): n is a, c, g, or t
  misc_feature (3632)..(3666): n is a, c, g, or t
  misc_feature (3668)..(3688): n is a, c, g, or t
  misc_feature (3690)..(3759): n is a, c, g, or t
  misc_feature (3761)..(3814): n is a, c, g, or t
  misc_feature (3816)..(3826): n is a, c, g, or t
  misc_feature (3828)..(3897): n is a, c, g, or t
  misc_feature (3899)..(3907): n is a, c, g, or t
  misc_feature (3909)..(3912): n is a, c, g, or t
  misc_feature (3915)..(4000): n is a, c, g, or t
nnnnnnncnnnncnnnnnnnnnnannnnnnnnnnnnnnnnnnnangnnnnnnnnnnnnngnnnannnnannnnnnnnnnnnngnnnncgnnnnnnnntnngnnnnnngntnnnnnnnnnnnnnnnnntnnannnnnnnnnnnnnnnnnnnnngnnnnnnncnnngnnnnnnnnannnnnnnngnnnnnnnnannnnnnnangnnnngngnnntgnnnnnannnnnnnnnnagnnnnnnnnnnnngnnnannnnnngannnnnnnnnnnnnnnnnnnnnnnnnnnannnannnnnnnnnnnaannnnngnnannnnnnnngnnnnncnnnnnnnnnnnnnnnnnnnnnnnnnnnnnnnnnnncnnnnnnnnnnnnngnnngnnnnggcnnangnnnnnnnngnnnnnnnnnnnnnnnnnnnnnnnngnnnnnnnnnnnnnnnnnnnntnnnnnngnnnngngnnnnnnnnnnnnngnngnnnnngnnnnnnnnnnnnnnngnnnnnnnnnnnnnnnnnnnnnnnannngnnnnnnnnannnnnntcnnnnntnnnnnnnnnnnnnnnnnnnnnnnnnnngnnnnnnnnnnnnnnnncnnnnnnannnnnnnnncnnannnnannnncnnnnannnnnnnnngnnnnnnnnnnnnannnnnnnannnnnntnnnnngnnnnnnnntannnannnnnncnnnnnnnnnncnnnnnnnnnnnnnnnnnnnnnnnnnnnnnnnnnnnngnnnnnnngnnnnnnnnnnnnannnnnntnnnccgnnnanannngnnnnngnnnantnnnnannnaannnnnnnggnnnnnnnnannnnnangnnnnnnnntnnannnngnnnncnnnnnggnnnnngnaggnnangannnnannncnnngnaannnnnnnnntnannnnnannncnnnnaannnnngnnnnnnnnnntnnnggnnnnnnnnnnnnnnnnnnnnnnnnnngnnannnncnnnncnnnnnnannnnnnnnncnnnnnnnntnnngnnnnnnnnnnnnnnncgnnnannnnnnnnnnnnngnnaanancccnntnnncnnnnnnnnnnnnnaannnnncnnnnnnnnnnnnnnnnnnntnnnnnnnnnnnnngnnnnnnnanngngnngnnnngnnnnnnnnnnnngannnggnnnnncnnnnnttnnnnnnnnnnnnntnnnannncnnnnntnnngngnnnngngttnnnnnnnnnnnntgnnnggnnngnnnnnnnnnnnnannnngncnngggtnntnnncnnnnnnnnngnnnngnnggntnnnannngnnnnntnnnanngnnnnnnannnggnngnnnannnnannnncannngnnnnnntgnnnnnnanannnanaantnnnncnggnnnnnnnnnngnnnnnnnnnnnccnnnngnnnnnnanggaannncnnncnnnnaannnnnannnnnnnctcnngnnataacngnnngannnntnnnnnnnncnnntntngnnngnnnnnttnnnnnnnnngangnnggnncnncnnntnnngnggnnngnnnnnnnnccaagggttgggctgttcgcccattaaagtggcacgcgagctgggttcagaacgtcgtgagacagttcggtctctatctatcgtgggcgcaggaaatttgcgtggctctgacactagtacgagaggaccgtgttggactgacctctggtttaccggttgtggcgccagccgcaccgccgggtagctaagtcgggatcggataagcgctgaaagcatctaagtgcgaagccggccacaagattagatttccttatgagggtcgttgtagacgacaacgttgatagggtgcaggtgtaaagacggtgacgtcaaagccgagcactactaatcgcccgaaactttcctttcagcgcagcagaatctacttaaagctgtcgcttacttttgcaatgaactacgaaaggcgtaagncatagcgctgtgcaaagcatnngnctatgtnatgatgcgtgttcaagagatatttccggtggttatagcgacggggttccacctcttcccattccgaacagagaagttaagcccgaccgcgccgatggtactgcacacccgcgggagagtaggtcgccgccattttacaagacaagcctcgagactcgaaagagactcggggctttgttgtntntananngnnnnnngnnnnnnnnnnngngnnnnnnnnnnnnnnnnnnngnnnnnnngnnnnnnnnnnnnnngnnnnnnnnnnnnnnnnnnnnnnnnnnnnnnnnannnnnnnnnttnnnnnnnnnnnnnntnnnttnnnnngnnnnnnnnnnnnnnnnntnnnnnnnnnnngnnnnnnnnnnnnnnnnnnnntnnnnnnnnnnnnntnnnnnnnnnnnnnnnnnnnnnnnntnnnntnnntnnnnnnannnnnnnnnnnnnnnnnnnnnannntnnggnnntnnnnnntnnnnnnnnnnntntnnnnnnnnnnnnnnnnnntnnnnnnnnnnnnnnnnnnnnnnnnnnnngnnnnnnnnnnnntnnnnntnnnnnnngnnnnnnnnnnnnnnnnnnnnnnnnnnnnnnnnnnnnnnnnnnnnnnnnnnnnnnnnnnnnnannnnnnnnnnnnnnnnnnnnnnncnnnnnnnnnnnnnnnnnnnnnnnnnnnnnnnnnannnnnnnnnnnnnnnnnnnnnnannnnnnnnnncnnnnnnnnnnnnnnnnnnngnncnnnnnncnnnnnnngnnnnnnnnnnngnnannngnnnnnnnnnnnnngnnnnnnnnnnnnnnnnnnnnnnnnnnnnnnnnnnnnnnnnnnnnnnnnnnnnnnntnnnnnnnnnnnnnnannnnnnnnnnnnnnnnnnnnnncnnnnnnnnnnnnnnnnnngnnnnnnnnnnnnnncntnnnnnnnnnnnnnnnnnnnnnnnnnnnnntctnnnnnnnnnnnnnnnnnnnnnnnnnnnnnnnnnnnnnnnnnnnnnnnnnnnnttnnntnnnnnnnnnnnnnnnnnnnnnnnnnnnnnnannnnnnnnnnnnncnnnnnnnnnnnnnnnnnnnnnnnnnnnnnnnnnnnnnnnnnnnnnnntnnnnnnnnnnnnnnannnnnnnnnnnannnntnnannnnnnnnnnnnnnnnnnnnnnnnntnnnnnnnnnnnnnnnnnnnnnnnnnnnnnnnnnnnnnnnnnnnnnnnnnnnnnnnnnnnnnnnnnnnnnnnngnnnnnnnnnnnnnnnnnnnnnnnnnnnnnncnnnnnnnnnnnnnnnnnnnnnnnnnnncnnnnnnnnnnnnnnnnnnnnnnnnnnnnnnnnnnnnnnnnnnnnnnnnnnnnnnnnnnnnnnnnnnnccnnnnnnnnnnnnnnnnnnnnnnnnnnnnnnnnnnnnnnnnnnnnnnnnnnnngnnannnnnnnnnnnnnnnnnnnnnnnnnnnnnnnnnnnnnnnnnnnnnnnnnnnnnnnnnnnnnnnnnnnnnnnnnnnnnnnnnnnnnnnnnnnnnnnnnnnnnnnnnnnnnnnnannnnnnnnnnnnntnnnnnngnnnnnnnnnnnnnnnnnnnnnnnnnnnnnnnnnnnnnnnnnnnnnnnnnnnnncnnnnnnnnnnnnnnnnnnnnnnnntnnnnnncnnnnnnnnnnnnnnnnnnnnnnnnnnnnnnnnnnncnnnnnnnnnnnnnnnnnnnnngnnnnnnnnnnnnnnnnnnnnnnnnnnnnnnnnnnnnnnnnnnnnnnnnnnnnnnnnnnnnnnnnnnnnnncnnnnnnnnnnnnnnnnnnnnnnnnnnnnnnnnnnnnnnnnnnnnnnnnnnnnnntnnnnnnnnnnntnnnnnnnnnnnnnnnnnnnnnnnnnnnnnnnnnnnnnnnnnnnnnnnnnnnnnnnnnnnnnnnnnnnnnntnnnnnnnnnannnnggnnnnnnnnnnnnnnnnnnnnnnnnnnnnnnnnnnnnnnnnnnnnnnnnnnnnnnnnnnnnnnnnnnnnnnnnnnnnnnnnnnnnnn

SEQ ID NO: 460 - DNA, 4000 bp, Escherichia coli
  misc_feature (1991)..(1991): n is a, c, g, or t
  misc_feature (2316)..(2316): n is a, c, g, or t
  misc_feature (2324)..(2324): n is a, c, g, or t
  misc_feature (2367)..(2368): n is a, c, g, or t
  misc_feature (2450)..(2450): n is a, c, g, or t
gatatcaacagatccggagatattcgaattttccccaaccagactgtctttgatctgaggaggtgtgttatcaaaatttatctcctgaacagtcgagttgacatttccagcagtatcattcactgcaaccgtgagattgtaaaaaccgtctccaaatctggaagagtttatagtggcgttgagccctccagtagatcggaacgagctgtttgatagttcatatgtcgccatttctataccattatcatccgaataagtgccattaactgaaaagttacccgaaacaaccccgttgttttgtgacaatgaaacacttagattaggaggattgtagtcggttgtgaagttaacaatcgagctattgattctccctgcattatcatagaccgtgaaattaacagcataatttccttcagaaagatttgaggtatctactgtatcatttagctggccggaaagaaccttcgactcgtttataatagagtagttagctcgtttaattcctgaaacactgtcattgaatactgctgccacagaaaagtttactggagccaaactatttttctctgggctgataacctgaagaaatggtggtttagtatcgtaaaaaagttctatcgtctccgagttattgttgccggcgtaatcctcaattctataggtcagattatagacagagtttgatagattattttcatttattgtgtgattgagactacccgagtaagactgtttttggttctccaaaacaaatgaggtgttttcaacccctgtagtgatatctgaccatactgcatcgattgtcaagctccctgaagttctgatttcaccatctttcaagcctataaaatcgaagctaggcggcttgttatcaacaacgacagttgtctgtttctggttggaattgttaaggctgtcagaaacattgaatgaaatgttgtattctccatcttctagttttgaagagttgactaaagcgttcaaacttcctttctcgctataagtcgagttgtaaagttcataggatctatggtctactgaagttgtctcatcactccatgaggcgtttagataaaattctccggagatatttgctgattcaacagggttgtgtatttccagcaaaggaacagtggtatcaactatgaatgagacgtctttagatacagtataaccatctatgttttcagcatagaaagtcacagtcttatttccctcaacatccacagagttgttgtaataaaacgtcgaattcttcttttcaagagtgtaatttttaccattgagagagtaattaacgcttttgaccgcctcattaacacttacattaaaatccggcaactctccataagccgtgtttttggggctgatagagtttatctcaggaaccggtgcagagttacttgacatcaacaatgtatagctttgagagggttcgggtagattggtagcattcacaacaacctcgtatttcctagtcgaggtgtttgagacagaaacctgttcaaccggatttgtatgatctttctgtgtctgtatagcaggctttgtcctattttcccaactaagtgtccatggatactttctttccccatcgctgtcttttaccacaagatcgagatcgttgatcaaggttttgcttgaagaataacttccaggataatcgctccaaaccagagttaaattaacgctttcatcttctggcactgtaaccgtgaaacttttctgatctcctgtatcattcaatacccctcgttttattgagtggcgttcctccgagttgttgacatattgaatggctctttccgcatttgccaacccccatcctgttgtatagtcagggccagtcctgttcagatcttcagcagtatggataagtgttgcttttacagttgacggagcaggtaactcagagtatgttctgttaaactgttcatttatcagtacaactacacctgagactgccggtgctgccatcgaagttccctganaaccagcataaggatagtcataatcactagagttggaaggtatagttgattcaatatatcccgtagtatcttctcccccatctgcgacaagcgtaggttttatccgtccatcatctgtcggcccccaagaagaatagtatgcctgttctcgattatcgttaatagcacctactgtaatagtgttttttgcagtacctcctgggcctgtggtagtgttgtaccttaaactaaagtctgagtttccgtggtttccagccgaaaatacaacaggaatagttccctgtacctcagaagtcttatttgcaattataaggtcatacagcanagatcgcnatcgataatctccaaagagatattcattgtcgctatctactgnnaaaccccacgagttctgagaaaccacggcctcatacttgtttatagactcattggtctctgaaaacaattctgtatcgctgnagactggccagacataagtaacgagatctgtatccggtgctacacctctgttctcatactgaatgttgccagcaccaagaagagtacctgcaacatgggtaggatgatctctcacataacaataatcgccacaattctttcctttatcgcctttaaccaacttaccggactcgtttagatcctcatgtagacctgcccatccaccgtcccagatcgctgctgtaaaaccatctccggttatattgtcagatgcttgatggagggaatcaacgtctagaagctgcctcgatctgtcattgtgaggttcaaaacccttcggagccggataaatagcattcacctctggactgtgtgctaacctctcagcttctgaatagctgatgttaaccctccaaatacgttctccggtcttcgttaacttgatctctggaaaccggttgttcaatttttcatcttcagaaataacttcaaccaagttatgagctccagaatcttgaatcgaactatgtattttatactctggtttgtaaggacccagaaaacgaacctttttttctgagaccaattcatttctactcgactttaatctgaccagccatgcgttttcgggaatataagatataaattcaacgtcttcagacagactgattctatattcttcagttgttggcttatggaactgtagtatcttgtaactgttatctgtactagcttgggactgcagcgtgaatcctgaaggagtttcatctggaacaaaggttcctttctggaggtgtaattccggttggccaaaaactggtaaagcaaccagtatagctgccagaaaaaatactggaaacttttttatcgttcttccacctctctgtagttttcaacttcaaggctgatttggccataattttgttttagatggccttggaaaacatattctttaccagtagttggagtacagttaagctcacaacttgtaccagaacatccaagttcatggcctcgaacaactaaactggagttatatccctcaagttctaaaggacctgaacacgtattacaacactgatcttccggcccacacattctttgagtacatgtaactggcccttgaactatcttacctcgaatgcttatattttggctgtttataacaccagatttatttaatacttcatcaactgtgtaaacctcctgttcaggagctaaaaacattgaaacagaaataagagctgtgataacaatcgctgatgctacgtatttcatctccataagtaaatcaggcttatttgaacttaaaacataatacaaaatcagatattgtcctctatcctatgaactaaatcctttgttcctgcgaaaaacggagttctctgatgtattcgatccacttcaatttcaagaattgattttttgccattagttgagcctccagtagccgtttctgctatatatgccataggatttccttcaaaaagtattctgtacttgccgttttccgaatcagttgttttaggatatccaaatacaccaccgtgatgtatcatctggttgaaatc

SEQ ID NO: 461 - DNA, 4000 bp, Escherichia coli
  misc_feature (1985)..(2014): n is a, c, g, or t
  misc_feature (2052)..(2063): n is a, c, g, or t
  misc_feature (2065)..(2070): n is a, c, g, or t
  misc_feature (2072)..(2080): n is a, c, g, or t
  misc_feature (2118)..(2146): n is a, c, g, or t
  misc_feature (2183)..(2188): n is a, c, g, or t
  misc_feature (2190)..(2205): n is a, c, g, or t
  misc_feature (2208)..(2208): n is a, c, g, or t
  misc_feature (2210)..(2212): n is a, c, g, or t
  misc_feature (2249)..(2254): n is a, c, g, or t
  misc_feature (2256)..(2260): n is a, c, g, or t
  misc_feature (2262)..(2262): n is a, c, g, or t
  misc_feature (2264)..(2270): n is a, c, g, or t
  misc_feature (2272)..(2277): n is a, c, g, or t
  misc_feature (2315)..(2317): n is a, c, g, or t
  misc_feature (2319)..(2321): n is a, c, g, or t
  misc_feature (2324)..(2330): n is a, c, g, or t
  misc_feature (2332)..(2343): n is a, c, g, or t
  misc_feature (2381)..(2386): n is a, c, g, or t
  misc_feature (2388)..(2390): n is a, c, g, or t
  misc_feature (2392)..(2397): n is a, c, g, or t
  misc_feature (2399)..(2410): n is a, c, g, or t
  misc_feature (2447)..(2448): n is a, c, g, or t
  misc_feature (2450)..(2452): n is a, c, g, or t
  misc_feature (2454)..(2476): n is a, c, g, or t
  misc_feature (2513)..(2516): n is a, c, g, or t
  misc_feature (2518)..(2519): n is a, c, g, or t
  misc_feature (2521)..(2523): n is a, c, g, or t
  misc_feature (2525)..(2535): n is a, c, g, or t
  misc_feature (2538)..(2542): n is a, c, g, or t
  misc_feature (2579)..(2583): n is a, c, g, or t
  misc_feature (2585)..(2600): n is a, c, g, or t
  misc_feature (2602)..(2605): n is a, c, g, or t
  misc_feature (2608)..(2608): n is a, c, g, or t
  misc_feature (2630)..(2630): n is a, c, g, or t
  misc_feature (2646)..(2651): n is a, c, g, or t
  misc_feature (2653)..(2653): n is a, c, g, or t
  misc_feature (2655)..(2660): n is a, c, g, or t
  misc_feature (2662)..(2674): n is a, c, g, or t
  misc_feature (2711)..(2713): n is a, c, g, or t
  misc_feature (2715)..(2723): n is a, c, g, or t
  misc_feature (2726)..(2737): n is a, c, g, or t
  misc_feature (2739)..(2741): n is a, c, g, or t
  misc_feature (2746)..(2754): n is a, c, g, or t
  misc_feature (2757)..(2757): n is a, c, g, or t
  misc_feature (2761)..(2762): n is a, c, g, or t
  misc_feature (2765)..(2765): n is a, c, g, or t
  misc_feature (2777)..(2807): n is a, c, g, or t
  misc_feature (2812)..(2820): n is a, c, g, or t
  misc_feature (2823)..(2823): n is a, c, g, or t
  misc_feature (2827)..(2828): n is a, c, g, or t
  misc_feature (2831)..(2831): n is a, c, g, or t
  misc_feature (2833)..(2833): n is a, c, g, or t
  misc_feature (2837)..(2837): n is a, c, g, or t
  misc_feature (2842)..(2851): n is a, c, g, or t
  misc_feature (2853)..(2857): n is a, c, g, or t
  misc_feature (2859)..(2869): n is a, c, g, or t
  misc_feature (2871)..(2873): n is a, c, g, or t
  misc_feature (2877)..(2886): n is a, c, g, or t
  misc_feature (2889)..(2889): n is a, c, g, or t
  misc_feature (2893)..(2894): n is a, c, g, or t
  misc_feature (2896)..(2897): n is a, c, g, or t
  misc_feature (2899)..(2899): n is a, c, g, or t
  misc_feature (2903)..(2903): n is a, c, g, or t
  misc_feature (2909)..(2926): n is a, c, g, or t
  misc_feature (2928)..(2939): n is a, c, g, or t
  misc_feature (2943)..(2952): n is a, c, g, or t
  misc_feature (2955)..(2955): n is a, c, g, or t
  misc_feature (2959)..(2960): n is a, c, g, or t
  misc_feature (2963)..(2963): n is a, c, g, or t
  misc_feature (2967)..(2967): n is a, c, g, or t
  misc_feature (2969)..(2969): n is a, c, g, or t
  misc_feature (2973)..(2977): n is a, c, g, or t
  misc_feature (2979)..(2984): n is a, c, g, or t
  misc_feature (2986)..(2996): n is a, c, g, or t
  misc_feature (2998)..(3005): n is a, c, g, or t
  misc_feature (3009)..(3018): n is a, c, g, or t
  misc_feature (3020)..(3021): n is a, c, g, or t
  misc_feature (3024)..(3026): n is a, c, g, or t
  misc_feature (3028)..(3029): n is a, c, g, or t
  misc_feature (3031)..(3031): n is a, c, g, or t
  misc_feature (3033)..(3033): n is a, c, g, or t
  misc_feature (3035)..(3035): n is a, c, g, or t
  misc_feature (3039)..(3065): n is a, c, g, or t
  misc_feature (3067)..(3071): n is a, c, g, or t
  misc_feature (3075)..(3076): n is a, c, g, or t
  misc_feature (3079)..(3081): n is a, c, g, or t
  misc_feature (3086)..(3087): n is a, c, g, or t
  misc_feature (3090)..(3092): n is a, c, g, or t
  misc_feature (3094)..(3095): n is a, c, g, or t
  misc_feature (3097)..(3097): n is a, c, g, or t
  misc_feature (3099)..(3099): n is a, c, g, or t
  misc_feature (3101)..(3101): n is a, c, g, or t
  misc_feature (3105)..(3115): n is a, c, g, or t
  misc_feature (3117)..(3129): n is a, c, g, or t
  misc_feature (3131)..(3132): n is a, c, g, or t
  misc_feature (3135)..(3137): n is a, c, g, or t
  misc_feature (3141)..(3150): n is a, c, g, or t
  misc_feature (3152)..(3153): n is a, c, g, or t
  misc_feature (3156)..(3158): n is a, c, g, or t
  misc_feature (3160)..(3161): n is a, c, g, or t
  misc_feature (3163)..(3163): n is a, c, g, or t
  misc_feature (3165)..(3167): n is a, c, g, or t
  misc_feature (3171)..(3190): n is a, c, g, or t
  misc_feature (3192)..(3195): n is a, c, g, or t
  misc_feature (3197)..(3205): n is a, c, g, or t
  misc_feature (3207)..(3215): n is a, c, g, or t
  misc_feature (3217)..(3219): n is a, c, g, or t
  misc_feature (3221)..(3230): n is a, c, g, or t
  misc_feature (3232)..(3234): n is a, c, g, or t
  misc_feature (3238)..(3240): n is a, c, g, or t
  misc_feature (3244)..(3244): n is a, c, g, or t
  misc_feature (3246)..(3254): n is a, c, g, or t
  misc_feature (3256)..(3258): n is a, c, g, or t
  misc_feature (3260)..(3264): n is a, c, g, or t
  misc_feature (3266)..(3271): n is a, c, g, or t
  misc_feature (3273)..(3286): n is a, c, g, or t
  misc_feature (3288)..(3298): n is a, c, g, or t
  misc_feature (3300)..(3300): n is a, c, g, or t
  misc_feature (3302)..(3309): n is a, c, g, or t
  misc_feature (3311)..(3316): n is a, c, g, or t
  misc_feature (3319)..(3325): n is a, c, g, or t
  misc_feature (3327)..(3340): n is a, c, g, or t
  misc_feature (3342)..(3362): n is a, c, g, or t
  misc_feature (3364)..(3366): n is a, c, g, or t
  misc_feature (3369)..(3386): n is a, c, g, or t
  misc_feature (3388)..(3402): n is a, c, g, or t
  misc_feature (3404)..(3432): n is a, c, g, or t
  misc_feature (3434)..(3441): n is a, c, g, or t
  misc_feature (3443)..(3443): n is a, c, g, or t
  misc_feature (3445)..(3470): n is a, c, g, or t
  misc_feature (3472)..(3506): n is a, c, g, or t
  misc_feature (3508)..(3512): n is a, c, g, or t
  misc_feature (3514)..(3535): n is a, c, g, or t
  misc_feature (3537)..(3543): n is a, c, g, or t
  misc_feature (3545)..(3564): n is a, c, g, or t
  misc_feature (3567)..(3632): n is a, c, g, or t
  misc_feature (3634)..(3656): n is a, c, g, or t
  misc_feature (3658)..(3662): n is a, c, g, or t
  misc_feature (3664)..(3666): n is a, c, g, or t
  misc_feature (3668)..(3674): n is a, c, g, or t
  misc_feature (3676)..(3679): n is a, c, g, or t
  misc_feature (3681)..(3695): n is a, c, g, or t
  misc_feature (3697)..(3697): n is a, c, g, or t
  misc_feature (3699)..(3716): n is a, c, g, or t
  misc_feature (3718)..(3737): n is a, c, g, or t
  misc_feature (3739)..(3745): n is a, c, g, or t
  misc_feature (3747)..(3749): n is a, c, g, or t
  misc_feature (3751)..(3757): n is a, c, g, or t
  misc_feature (3759)..(3762): n is a, c, g, or t
  misc_feature (3764)..(3770): n is a, c, g, or t
  misc_feature (3772)..(3792): n is a, c, g, or t
  misc_feature (3794)..(3799): n is a, c, g, or t
  misc_feature (3801)..(3828): n is a, c, g, or t
  misc_feature (3830)..(3848): n is a, c, g, or t
  misc_feature (3850)..(3880): n is a, c, g, or t
  misc_feature (3883)..(3890): n is a, c, g, or t
  misc_feature (3892)..(3894): n is a, c, g, or t
  misc_feature (3896)..(3898): n is a, c, g, or t
  misc_feature (3900)..(3900): n is a, c, g, or t
  misc_feature (3902)..(3931): n is a, c, g, or t
  misc_feature (3933)..(3970): n is a, c, g, or t
  misc_feature (3972)..(4000): n is a, c, g, or t
gggatggagaaccgttgttgtcaatacgcactctaagctctcctacaagaacaatcacttgatttttaaagatgcctctcggacagagttgattcacctgtccgaggtggacatcctacttttagagacgacggatatcgttctctccactatgctgattaaacgtttggtggatgaaaatattctagtcatcttttgtgatgacaaacgcttgccaacggcatacctaatgccctactacggtcgtcacgattccagtttgcaactctctcggcaaattgcttggaatgaagatgtaaaggcggaaatctggacaaccatcattgcacaaaagattctcaatcaggctttttatctggggagttgtggttttctggaaaagagccagtcagtcatcgatctctatcatgggttggatttatttgatcctagcaatcgtgagggtcatgctgctcggatttattttaacaccttgtttggaaacgattttagccgtgaacaagataatgatgtcaatgctgccttggactatggttacaccttaattttgagtatgtttgcgcgtgaaattgtgttgtctggttgtatgactcagtttggattgaaacatgctaatcagtttaatcaattcaacctcgctagcgatattatggagcctttccgtccgattattgacagaatcgtctatgaaaatcgaaacagttcttttgtcaaaatcaaacgagagctttttactattttctcagacaccttccactacaatggcaaagatatgtacctgtccaatatcgtcagcgactatactaagaaagttatccaagctctcaatcaaccagagaaaggagttcctgagtttaggatatgagttatcgatatatgcgtatgattttaatgtttgatatgcccgttgataccgtagaggaacgcaaggcctatcggaaatttcgcaagttcctcatagatgagggatttattatgcaccaattctccatctatagcaagctcttgctcaacaactctgctaataacgccatgattgagcgactcaagactcataatcctaaaaaaggaaacattactctcttaaccgttacagaaaagcagttttctcgtatgatttacttaaatggcgagcgaaataccagcgtagcaaactccgacgcacgtttggtttttctaggagaggagcctagagatgaagattaattttccgctattagacgaaccattagctattgaaaatgcaacctttttagtgttggaagaccagtttaccttttcaactatcgtcaagcagttctaccagtacactgatgatggagaattaaagttgtttgatagaaatctaaaagctctgaaagaatctgaattactagtgataacggatgtcttaggatacaatctaaactcacctgccatgctcaagctgatacatgctgatttagaaaatcagctcaatgacaaacccgaagtcaagtccatgattgaaaagttggttgctacgattacagaattgctagcatttgaatgtttggaaaacgagttagacctagagtatgatgaaattaccattctagagttaatcgatgcacttggtgtcaaagtcgaaaccctaagtgatacacctttcgaaaagatgctagagattgtccaagtttttaaatatctttctaaaaagaaactccttatttttatcaatgcatccgcctatctatcaaaggatgagttagtaaatctgatagagtatatccaactaaatcaactaagggttttatttgtcgaacctcgaaaagtctatgattttccgcagtatgtgctggatcaagactatttcttgaaccccgaaaatatggtataataagagtaacaattggaacctaacgagctggagtctggctgggacgaatggcgcgattacgaaatttcgtgagaaaaatttttctacgaggttttagagctgtgttgtttcgaatggttccaaaacnnnnnnnnnnnnnnnnnnnnnnnnnnnnnngttttagagctgtgttgtttcgaatggttccaaaactnnnnnnnnnnnntnnnnnnannnnnnnnngttttagagctgtgttgtttcgaatggttccaaaactnnnnnnnnnnnnnnnnnnnnnnnnnnnnngttttagagctgtgttgtttcgaatggttccaaaacnnnnnntnnnnnnnnnnnnnnnnatnannngttttagagctgtgttgtttcgaatggttccaaaacnnnnnntnnnnnanannnnnnnannnnnnagttttagagctgtgttgtttcgaatggttccaaaacnnnannnatnnnnnnnannnnnnnnnnnntgttttagagctgtgttgtttcgaatggttccaaaacnnnnnnannnannnnnngnnnnnnnnnnnngttttagagctgtgttgtttcgaatggttccaaaacnngnnnannnnnnnnnnnnnnnnnnnnnnngttttagagctgtgttgtttcgaatggttccaaaacnnnnannannntnnnnnnnnnnnacnnnnngttttagagctgtgttgtttcgaatggttccaaaacnnnnnannnnnnnnnnnnnnnnannnnatngttttagagctgtgttgtttcnaatggttccaaaactnnnnnncntnnnnnnannnnnnnnnnnnngttttagagctgtgttgtttcgaatggttccaaaacnnnannnnnnnnntannnnnnnnnnnntnnnttttnnnnnnnnnttntttnnaanggttccaaaacnnnnnnnnnnnnnnnnnnnnnnnnnnnnnnnttttnnnnnnnnnttntttnnaangnttcnaaaannnnnnnnnnannnnnannnnnnnnnnncnnntttnnnnnnnnnnttntttnnanngnttcnaaaacnnnnnnnnnnnnnnnnnntnnnnnnnnnnnntttnnnnnnnnnnttntttnnaanggtncnaaannnnntnnnnnnannnnnnnnnnntnnnnnnnntttnnnnnnnnnntnnttnnnanngntncnaaannnnnnnnnnnnnnnnnnnnnnnnnnnannnnntttnnagnnntgttnnttnnnanngntncnaaannnnnnnnnnntnnnnnnnnnnnnnannacnnntttnnnnnnnnnntnnttnnnanngntnnnaaannnnnnnnnnnnnnnnnnnntnnnnannnnnnnnntnnnnnnnnntnnntnnnnnnnnnntnnnaaannnaaanannnnnnnnnannnannnnncnnnnnntnnnnnnnnnnnnnntnnnnnnnnnnncnannnnnnnnannnnnntgnnnnnnngnnnnnnnnnnnnnnannnnnnnnnnnnnnnnnnnnntnnnaannnnnnnnnnnnnnnnnnannnnnnnnnnnnnnntnnnnnnnnnnnnnnnnnnnnnnnnnnnnnannnnnnnnantnnnnnnnnnnnnnnnnnnnnnnnnnntnnnnnnnnnnnnnnnnnnnnnnnnnnnnnnnnnnnannnnngnnnnnnnnnnnnnnnnnnnnnntnnnnnnntnnnnnnnnnnnnnnnnnnnnaannnnnnnnnnnnnnnnnnnnnnnnnnnnnnnnnnnnnnnnnnnnnnnnnnnnnnnnnnnnnnnnnncnnnnnnnnnnnnnnnnnnnnnnnannnnnannntnnnnnnntnnnntnnnnnnnnnnnnnnnanannnnnnnnnnnnnnnnnnannnnnnnnnnnnnnnnnnnnannnnnnntnnntnnnnnnntnnnnannnnnnnannnnnnnnnnnnnnnnnnnnntnnnnnntnnnnnnnnnnnnnnnnnnnnnnnnnnnnannnnnnnnnnnnnnnnnnnannnnnnnnnnnnnnnnnnnnnnnnnnnnnnnttnnnnnnnntnnnannncntnnnnnnnnnnnnnnnnnnnnnnnnnnnnnntnnnnnnnnnnnnnnnnnnnnnnnnnnnnnnnnnnnnnntnnnnnnnnnnnnnnnnnnnnnnnnnnnnn

SEQ ID NO: 462 - DNA, 4000 bp, Escherichia coli
  misc_feature (201)..(201): n is a, c, g, or t
  misc_feature (1069)..(1069): n is a, c, g, or t
  misc_feature (1176)..(1176): n is a, c, g, or t
  misc_feature (2021)..(2021): n is a, c, g, or t
  misc_feature (2814)..(2814): n is a, c, g, or t
tctttaataaacgaaatcaaatgagctatttcatcgagagtagccgtaccctcctttactttgattgcaatttcttgcgcttcctcgtttttcgtcgtattcagcacatacaaagcgggtaatgtcagtttaccttcaagcatatcattacccgtaggtttaccaatctccttattatcaaagtaatcgaaaatatcatcntttatctggaaacagataccaatatattcgcccagcaaacgggcaagttcagcttccccctcacccacacctaccgagaaagcggcagcctttgtgcaggcagcaaaaagagcagcagttttcttgcggattacatcaaaatagacttcctcggaaaaactgtgattacttacatttgaaagctgaagcaactcaccgtcagcaagatcctgtccaagagtggacaccagctgaataatacgatgactgtttgtcagttcggcgtgtacgaggctggttgccaataaatagtcacccgtcagcaccgctactttattattaaagatagcatttaccgagagctgtccacgacgttcggaactttcatccactacgtcatcatgtaccaggctggccgtatgaaggagttccagtgaaacagccgcatgaagagtggaaggacatatagctccataaagacgtgccacgagtaaaacaagaataggccgcatcatcttaccattcctctgccgtatgtgagatacgacgctatcgagcaatgcatttgaactggagagagaactatcaaaaagttctttgaagtcgcccagttccgcttcaatcggagttctgataagtgagatactgtccatttattacacaatttgagcacaaaagtaataataaaacgcttaataccgtatttttttgtacttttaccatgaaaaattaattaaatctatggattcaggtaataaattatttcttttagacgcttatgcattgatatatcgggcgtattacgcctttattaagaacccaagaatcaattccaaaggattcaacacttcagccatactgggttttgtgaacaccctcgaagaagtantgaaaaaagagaatcccactcatataggagtagccttcgaccccgcaggtcccaccttccgccacgaggcttttgaacaatataaagcacaacgcgaagaaactccngaagcaattcgtctttccgtacctattataaaggatattatacgcgcctaccgcatccccattctggaagtggcaggctacgaagccgatgatgtgataggtacgctcgctaccgaagccggtcgccagggtatcactacctatatgatgactcccgacaaagattacgggcagctggtaagtgacaaagtatttatgtatcgccccaaacacacaggaggtttcgaagtgatgggagtggaggaagtgaaagccaagtttgacattcagtctccgacacaggtgatcgatatgctcggactgatgggcgactcttcagataacattcccggatgtccgggagtaggagaaaagactgctcaaaaactggtctccgaattcggaagcatcgagaacctattggaacataccgaccaactgaaaggagcattgaaaacaaaagtggaaaccaatcgggaaatgattacgttctcgaaatttctcgccaccattaaaatcgatgtccctatccaacttgagatggatgctcttgtccgcgaagaagcagacgagaattcactccgcagcattttcgaggaattggaatttagaacactcatcgaccgggtgctcaaaaaagatatttccggaaacggaataacctctgccaccggaagcaaagttgctactggaaaaagtgccccctctcctcttccactttttcccgaagaaggaggcggaatgcaaggcgatttatttgcgaatttcacgcccgatgaaccgggtgaagcaaaaaaatcgaacctagagacgttagaatcgctcacttatagctatcaacttattgatacagaggagaaaaggcnggaaattattcaaaagttacttacatcgaaaattctctcgttagatacggaaaccaccggaaccgaaccaatggatgccgaattagtcggaatgagcttttcgattgcagagaatgaagctttttatgttcccgtaccatcggaccaagacgaagcgttaaaaatcgtaaatgagttccgtccggtcttcgaaaatgagaattcgttaaaagtcggacaaaatatcaagtacgacatgattgttcttcaaaattatggcgcaacagtaaaaggtccacttttcgatacgatgatcgctcattatgttcttcaaccggaacttcgtcatggcatggattatcttgcggaaatttacctgcactatcagactatccacattgacgaactgataggtcccaaaggaaagaatcagaagaacatgcgcgatctcgacccgaaagatgtatatctatatgcctgcgaagatgcagacgtaactctgaaactgaaaaatgtattggagaaagaactgaaagaaaatgacgcagaacgtttgttctatgatatagaaatgccgctagttcccgtattggttaatatagaacggaacggggtattgctggatacggaagcattgaagcagtcgtccgcccatttcaccgcccagatggagcaaatcgaaaaagagatttacgaattggccggtgagactttcaatatcgcttcgcccaaacaagtcggtgaggtactgtttgacaaactgaaaatcgtagagaaggcaaaaaagactaagaccggccagtacgtcacctcngaagaagtgctcgaaagcctccggcacaaacatccggtagtagaaaagattctggaacatcgcggactgaaaaagctattgggcacgtatatcgacgcactccctcagcttatcaatccacgtacaggaagggtgcacacctctttcaaccagactgtaaccgctacgggacgccttagttcaagcaatccgaacttacaaaatatccctatccgcgacgagaatggaaaagaaatccgcaaggctttcatccccgatgaaggctgcctcttcttctctgccgactattcgcaaattgaattgcgcatcatggcacaccttagcgaggataagaatatgattgatgctttccttagcaatcacgatattcatgcggccactgctgccaaagtttataagatcgacctgaaagacgtaggttccgacatgcgccgtaaagccaagactgccaatttcggtatcatctatggcatatccgtatttggtcttgccgaacgaatgaatgtagatcgtaaagaagccaaagagttaatcgacggttactttgaaacttatccgggagtgaaagcatatatggataaaagcattcaggtggcccaggaaaaaggctatgtggaaacaatcttccatcggaagcgcttcttaccggacatcaattcgcggaatgccgttgtacgcggatatgcggaacgaaatgccatcaacgcccctatccagggaagtgcggcagatattataaaagtagcaatggcacgtatctatcaacggttccagaccgaaggaatacaagccaaaatgatcctgcaagtacatgacgaattaaatttcagcgttcctgtcaatgaaaaagagcgtgtagaagaaatcgtcatcgaagaaatggagaaagcataccgcatgcacgtccccttgaaagcagattgcggatggggcaaaaactggcttgaggcacattaaaccatcaagtgaataaaggccacctcaataaggaattgctatcttttagacactaattacacaaggagactccaccttatcagggacctccgcttacaaaatggaggcaagtctgggtaataacattatttaactctgtatccagaaagctagaaaaaagattcctttttcgacgaagtgattcattctatatccggcagattgactgccggatatttttttgtcacca

SEQ ID NO: 463 - DNA, 4000 bp, Escherichia coli
  misc_feature (544)..(544): n is a, c, g, or t
  misc_feature (905)..(905): n is a, c, g, or t
  misc_feature (1985)..(1985): n is a, c, g, or t
  misc_feature (1988)..(1988): n is a, c, g, or t
  misc_feature (1992)..(1992): n is a, c, g, or t
  misc_feature (1995)..(1995): n is a, c, g, or t
  misc_feature (2410)..(2410): n is a, c, g, or t
  misc_feature (2648)..(2648): n is a, c, g, or t
  misc_feature (2963)..(2963): n is a, c, g, or t
  misc_feature (3140)..(3140): n is a, c, g, or t
  misc_feature (3548)..(3548): n is a, c, g, or t
  misc_feature (3612)..(3612): n is a, c, g, or t
  misc_feature (3870)..(3870): n is a, c, g, or t
gattgattaaaaagttttgctgggttagcccaaggtgcaaaactaatggtaattcaaaaaagccctgatcgtttaaattgcttgtgtatcctaagccaagcgagcaacaactgctgcgtgtgccttataaaacggctcaagctcgtggacgtacataatgtccagcaactctccaagtttcttcacttctcctttatacactgctttcggttttgcagtgacgtctatgcttcgtgctttgatcataatgcaagcgtacccgcccgtcctcaagaacatctcagcgttggtaatagcgatttcagcttgtttcggctgtgcaatatcttggtacaagaaatcgaccagctcgacaatgtgtccgtagtcaggccggcgcgcatctgctactagcggcacgacgtttttcacgcgttctgacaagcgaacgaggtcccgagcgacacgtggcgcaaactctacggcatagacgagtgaaacaatgttggctaggtgtgaaacagtcgtaccagacgcagcccccagatatagtacaatctgatcnggtctcagcggcacgtcctccccttttttcaataatgccgctagcttactcctttgcggattccacagccgatattccccaaacaccttctcgccatagagcgcctcaccttttgtggcaagatgcgagtctaacaaaaaaactccgggtactttgtgggtctttatcttcatgtcaagtcttgtcgcgtattgcgggattattgatttctcttattcgtttttccatttgagctaaaagttctggatgcactttttttgaataaaaatctatacgagcggcaatagctagttttgcagccattgtcctagcaatctttcctctcttacctaagggactgccgcggatcaatggatgttgntatataattccgtgcttaggcggttttgcgccatactggagatgtttgaatagcgccttagtcgcacccataacttgaatcttgctcgctggcattctcgcgagtgattctaggctgccggcttgagcaatcagtcgtgcgccgagcagttcaccagcgagagaacagagattaggtgcgacgtcgcgcatctcaagttcaattgtgcctgcaattttcttcctcacttcgcttaatcgctcaatggattcgacaaactcgtgcttaagcgtagggtatattgttgactgagaggcgtcagtttctgttacgtcccctgagctagatatgttaaattcgaggacatcccattccaaaaggcgttccgagagcaagtttatcgactcgtcgatatcatcgattccaccgattagctgcacaattcgtgcgtctgggcgagaaaacgcggcgattatctgctctttcgcacgctgtatcgcaacggcgcggagcagtgaaatgtagtcgtgctccgatgtcaccaagccgagttgaatcgccatctccctgagacggctcctacaccgcttgtccaaatcggtaaattcttctctttgaagttgcaaagctatcgcgacggcgtccgtctgtaaaacgttcgaacgaacgatctggccattgtgcagctcgatctctccgaaccaagttttgatgattgtcatgctttattttgctattgacgtcgctattccttgcgaagaacagtgatgcctctttagcttgtttatagatatcctatatatcttggggcagaataatagtttgtcggctggcagtgatagaattgaatatcgaaataggcaaaataacgctcaataatccaactatgctcgcagctgggattatgggatccgctgcatcttctctaaggcgtatcatgtcgtgcggggcaggcgccgttgttactaagtctattggacttctgtcacgcgagggtcatctggggcctgttctcgctgaggttccgggggggtacttgaacgcactgggactacccaatatgggccttgcgtttttggacgaacttgagacgctgagcancgncgangancgaaagccgataatcgtaagcttattcggcaactgtcctgatgactttgttgagttggccgaaacgttctgccagtacgccgacgcacttgaactcaatttgagctgtcctcatgctcagggtttcggagtcgaagtcggatcagatcctgcggcagttaaagcgattacgaattcggtgagcaaacacgttgacattccggtttgggtcaagctcacgcctaacgtgaccgacattacggtacttggccaagcagcagaaaaaggcggagccgatgccgtagtggcaataaatacggttaaggctatggcgatcgatgtggagggtgcaaggccagttttaggcaacgtgtttggggggctgtcaggaagtgcgataaagccaatcgcggttaaatgcgtttatgacttatatngtgccctcactatccccgtaatcggtgtcggcgggataagtaattacgaggacgcgttagaattcattatggcaggagctagggccgttcagatcgggtcggcggtcgcccgcaatctgtcggtatttgaggacgtcgctgtcggaatcgaccgctatctgtccacgaaacgtttatcgtttgaagacgttgtcggaattgcacacaagagttactgacatggatctgaagcaggtgntcaatactgcaagcgttttgctcgtcgataatacgtacgctggtttgaaagacaccacattttcgaagtatcttcttacagagatgattgactccccactcgacgcaactgcagcgtttatctgcgacgggagaattcgtggagtcgcctttaaacaggacttttggacgctagtaactgatatcgtgaggtttgatccggaattcgaaagctatgccgcggcgctacttcagaagaccaaatgcaataaaagacattcctatacggtcgaggcagctgactttcatcaagctattgttacgcttctgtgtgatntactggttagcggtgagtcgtgcgaatgttacgacggcagacgttcgcatatattagcgtactcatccgagcgtcaggaacgattacaattgctatttaagacgaaaattgcacctctttttgatctaggtgccgcggagatgctcgaaatatgttgtgggaatggtatggctacancggcgctctctaatcttggatacaacatttatgctttagacaatgacaaatgcgctatttgtgaggggctatttcacggcgccctgcggaaagaaaatacggcagtgttggacgtccgttatctctcagaatatgaattcacgcagtaccacaagtttagattagtcgtcggctttatgttgggggctatctacgagttcaacaaagctgattggcaaaaaatactgtcggaagctgcggcgatcgtcaatgaagggctttttctgctcacggttcacaagaaagaagaaattgacttcattgacaaaacaatgaatagctttggcatcaaaggtcagataatagacaaccgagatgatacaagcatttacgaccaatgggtgtacatcggcgtcaaggaatcaacanctccaagtagctcagttaagtcgtgatgatacgcagccacttgtagccgggcatttattcgacngttcttgcgagcattgttcgccgcttaccctatattattctgtacttgtcttgcggaaatgtcagtttgtgagaaccgaaagcagagaccaatcactgagattgttctgatagcgcatctggaatgcaatctatgacgtcggttgccaataggctatatcccctgcgggagaatgctaagtcccctgcacagccgttgaggtaagcagcagttgacgctgcttgcattttatccagacgcgttgaaaaagcgccgacnagccccgctaagacgtcacctgtgccgccgacagtcattccggcattgccagtcttgtttagccgatatttcgtcccatccgaaataatgtcaactcgcccttttagcagtgttatgacgttccattctc

SEQ ID NO: 464 - DNA, 4000 bp, Escherichia coli
  misc_feature (1)..(1): n is a, c, g, or t
  misc_feature (4)..(6): n is a, c, g, or t
  misc_feature (8)..(8): n is a, c, g, or t
  misc_feature (10)..(12): n is a, c, g, or t
  misc_feature (14)..(14): n is a, c, g, or t
  misc_feature (17)..(18): n is a, c, g, or t
  misc_feature (20)..(20): n is a, c, g, or t
  misc_feature (23)..(23): n is a, c, g, or t
  misc_feature (26)..(28): n is a, c, g, or t
  misc_feature (30)..(31): n is a, c, g, or t
  misc_feature (35)..(35): n is a, c, g, or t
  misc_feature (37)..(37): n is a, c, g, or t
  misc_feature (39)..(40): n is a, c, g, or t
  misc_feature (42)..(43): n is a, c, g, or t
  misc_feature (45)..(45): n is a, c, g, or t
  misc_feature (48)..(49): n is a, c, g, or t
  misc_feature (51)..(53): n is a, c, g, or t
  misc_feature (55)..(55): n is a, c, g, or t
  misc_feature (58)..(67): n is a, c, g, or t
  misc_feature (69)..(72): n is a, c, g, or t
  misc_feature (74)..(77): n is a, c, g, or t
  misc_feature (80)..(80): n is a, c, g, or t
  misc_feature (82)..(82): n is a, c, g, or t
  misc_feature (84)..(85): n is a, c, g, or t
  misc_feature (87)..(89): n is a, c, g, or t
  misc_feature (91)..(92): n is a, c, g, or t
  misc_feature (94)..(98): n is a, c, g, or t
  misc_feature (101)..(101): n is a, c, g, or t
  misc_feature (103)..(103): n is a, c, g, or t
  misc_feature (105)..(108): n is a, c, g, or t
  misc_feature (110)..(121): n is a, c, g, or t
  misc_feature (123)..(123): n is a, c, g, or t
  misc_feature (125)..(126): n is a, c, g, or t
  misc_feature (128)..(130): n is a, c, g, or t
  misc_feature (132)..(134): n is a, c, g, or t
  misc_feature (136)..(137): n is a, c, g, or t
  misc_feature (140)..(140): n is a, c, g, or t
  misc_feature (142)..(142): n is a, c, g, or t
  misc_feature (144)..(144): n is a, c, g, or t
  misc_feature (146)..(147): n is a, c, g, or t
  misc_feature (153)..(153): n is a, c, g, or t
  misc_feature (155)..(156): n is a, c, g, or t
  misc_feature (158)..(161): n is a, c, g, or t
  misc_feature (163)..(165): n is a, c, g, or t
  misc_feature (167)..(167): n is a, c, g, or t
  misc_feature (169)..(170): n is a, c, g, or t
  misc_feature (172)..(176): n is a, c, g, or t
  misc_feature (178)..(181): n is a, c, g, or t
  misc_feature (183)..(186): n is a, c, g, or t
  misc_feature (189)..(189): n is a, c, g, or t
  misc_feature (191)..(193): n is a, c, g, or t
  misc_feature (195)..(198): n is a, c, g, or t
  misc_feature (200)..(201): n is a, c, g, or t
  misc_feature (203)..(203): n is a, c, g, or t
  misc_feature (205)..(206): n is a, c, g, or t
  misc_feature (209)..(209): n is a, c, g, or t
  misc_feature (211)..(218): n is a, c, g, or t
  misc_feature (220)..(223): n is a, c, g, or t
  misc_feature (225)..(226): n is a, c, g, or t
  misc_feature (228)..(229): n is a, c, g, or t
  misc_feature (232)..(258): n is a, c, g, or t
  misc_feature (261)..(263): n is a, c, g, or t
  misc_feature (266)..(266): n is a, c, g, or t
  misc_feature (268)..(269): n is a, c, g, or t
  misc_feature (271)..(272): n is a, c, g, or t
  misc_feature (274)..(281): n is a, c, g, or t
  misc_feature (283)..(283): n is a, c, g, or t
  misc_feature (285)..(285): n is a, c, g, or t
  misc_feature (289)..(291): n is a, c, g, or t
  misc_feature (293)..(298): n is a, c, g, or t
  misc_feature (300)..(305): n is a, c, g, or t
  misc_feature (312)..(313): n is a, c, g, or t
  misc_feature (315)..(322): n is a, c, g, or t
  misc_feature (324)..(329): n is a, c, g, or t
  misc_feature (331)..(332): n is a, c, g, or t
  misc_feature (334)..(343): n is a, c, g, or t
  misc_feature (345)..(345): n is a, c, g, or t
  misc_feature (347)..(347): n is a, c, g, or t
  misc_feature (349)..(351): n is a, c, g, or t
  misc_feature (353)..(353): n is a, c, g, or t
  misc_feature (355)..(360): n is a, c, g, or t
  misc_feature (362)..(364): n is a, c, g, or t
  misc_feature (366)..(366): n is a, c, g, or t
  misc_feature (368)..(368): n is a, c, g, or t
  misc_feature (370)..(373): n is a, c, g, or t
  misc_feature (375)..(375): n is a, c, g, or t
  misc_feature (377)..(377): n is a, c, g, or t
  misc_feature (380)..(391): n is a, c, g, or t
  misc_feature (393)..(393): n is a, c, g, or t
  misc_feature (395)..(395): n is a, c, g, or t
  misc_feature (397)..(399): n is a, c, g, or t
  misc_feature (401)..(406): n is a, c, g, or t
  misc_feature (408)..(412): n is a, c, g, or t
  misc_feature (414)..(422): n is a, c, g, or t
  misc_feature (424)..(424): n is a, c, g, or t
  misc_feature (427)..(430): n is a, c, g, or t
  misc_feature (432)..(436): n is a, c, g, or t
  misc_feature (438)..(441): n is a, c, g, or t
  misc_feature (443)..(444): n is a, c, g, or t
  misc_feature (446)..(448): n is a, c, g, or t
  misc_feature (451)..(451): n is a, c, g, or t
  misc_feature (453)..(453): n is a, c, g, or t
  misc_feature (455)..(456): n is a, c, g, or t
  misc_feature (458)..(461): n is a, c, g, or t
  misc_feature (464)..(466): n is a, c, g, or t
  misc_feature (470)..(471): n is a, c, g, or t
  misc_feature (473)..(474): n is a, c, g, or t
  misc_feature (476)..(485): n is a, c, g, or t
  misc_feature (488)..(499): n is a, c, g, or t
  misc_feature (501)..(507): n is a, c, g, or t
  misc_feature (509)..(511): n is a, c, g, or t
  misc_feature (513)..(515): n is a, c, g, or t
  misc_feature (517)..(523): n is a, c, g, or t
  misc_feature (525)..(532): n is a, c, g, or t
  misc_feature (534)..(535): n is a, c, g, or t
  misc_feature (537)..(543): n is a, c, g, or t
  misc_feature (545)..(547): n is a, c, g, or t
  misc_feature (550)..(551): n is a, c, g, or t
  misc_feature (553)..(553): n is a, c, g, or t
  misc_feature (555)..(556): n is a, c, g, or t
  misc_feature (558)..(561): n is a, c, g, or t
  misc_feature (563)..(567): n is a, c, g, or t
  misc_feature (569)..(571): n is a, c, g, or t
  misc_feature (574)..(578): n is a, c, g, or t
  misc_feature (580)..(580): n is a, c, g, or t
  misc_feature (583)..(586): n is a, c, g, or t
  misc_feature (588)..(593): n is a, c, g, or t
  misc_feature (595)..(597): n is a, c, g, or t
  misc_feature (600)..(600): n is a, c, g, or t
  misc_feature (602)..(603): n is a, c, g, or t
  misc_feature (606)..(615): n is a, c, g, or t
  misc_feature (617)..(619): n is a, c, g, or t
  misc_feature (621)..(623): n is a, c, g, or t
  misc_feature (626)..(628): n is a, c, g, or t
  misc_feature (630)..(630): n is a, c, g, or t
  misc_feature (634)..(634): n is a, c, g, or t
  misc_feature (636)..(637): n is a, c, g, or t
  misc_feature (640)..(641): n is a, c, g, or t
  misc_feature (644)..(645): n is a, c, g, or t
  misc_feature (648)..(651): n is a, c, g, or t
  misc_feature (654)..(654): n is a, c, g, or t
  misc_feature (656)..(657): n is a, c, g, or t
  misc_feature (659)..(663): n is a, c, g, or t
  misc_feature (665)..(680): n is a, c, g, or t
  misc_feature (682)..(688): n is a, c, g, or t
  misc_feature (690)..(693): n is a, c, g, or t
  misc_feature (695)..(712): n is a, c, g, or t
  misc_feature (714)..(717): n is a, c, g, or t
  misc_feature (719)..(729): n is a, c, g, or t
  misc_feature (731)..(731): n is a, c, g, or t
  misc_feature (733)..(736): n is a, c, g, or t
  misc_feature (738)..(740): n is a, c, g, or t
  misc_feature (742)..(748): n is a, c, g, or t
  misc_feature (750)..(753): n is a, c, g, or t
  misc_feature (755)..(759): n is a, c, g, or t
  misc_feature (761)..(772): n is a, c, g, or t
  misc_feature (774)..(778): n is a, c, g, or t
  misc_feature (780)..(782): n is a, c, g, or t
  misc_feature (785)..(788): n is a, c, g, or t
  misc_feature (790)..(790): n is a, c, g, or t
  misc_feature (793)..(793): n is a, c, g, or t
  misc_feature (797)..(799): n is a, c, g, or t
  misc_feature (803)..(810): n is a, c, g, or t
  misc_feature (812)..(829): n is a, c, g, or t
  misc_feature (831)..(833): n is a, c, g, or t
  misc_feature (835)..(839): n is a, c, g, or t
  misc_feature (841)..(842): n is a, c, g, or t
  misc_feature (845)..(847): n is a, c, g, or t
  misc_feature (851)..(854): n is a, c, g, or t
  misc_feature (856)..(859): n is a, c, g, or t
  misc_feature (861)..(861): n is a, c, g, or t
  misc_feature (863)..(863): n is a, c, g, or t
  misc_feature (866)..(880): n is a, c, g, or t
  misc_feature (882)..(884): n is a, c, g, or t
  misc_feature (886)..(890): n is a, c, g, or t
  misc_feature (893)..(905): n is a, c, g, or t
  misc_feature (907)..(909): n is a, c, g, or t
  misc_feature (911)..(914): n is a, c, g, or t
  misc_feature (916)..(920): n is a, c, g, or t
  misc_feature (922)..(925): n is a, c, g, or t
  misc_feature (927)..(927): n is a, c, g, or t
  misc_feature (929)..(929): n is a, c, g, or t
  misc_feature (931)..(932): n is a, c, g, or t
  misc_feature (934)..(936): n is a, c, g, or t
  misc_feature (938)..(940): n is a, c, g, or t
  misc_feature (942)..(945): n is a, c, g, or t
  misc_feature (947)..(947): n is a, c, g, or t
  misc_feature (949)..(963): n is a, c, g, or t
  misc_feature (965)..(966): n is a, c, g, or t
  misc_feature (968)..(971): n is a, c, g, or t
  misc_feature (974)..(975): n is a, c, g, or t
  misc_feature (978)..(978): n is a, c, g, or t
  misc_feature (980)..(980): n is a, c, g, or t
  misc_feature (982)..(982): n is a, c, g, or t
  misc_feature (984)..(986): n is a, c, g, or t
  misc_feature (988)..(991): n is a, c, g, or t
  misc_feature (993)..(993): n is a, c, g, or t
  misc_feature (995)..(995): n is a, c, g, or t
  misc_feature (997)..(998): n is a, c, g, or t
  misc_feature (1001)..(1001): n is a, c, g, or t
  misc_feature (1003)..(1006): n is a, c, g, or t
  misc_feature (1008)..(1032): n is a, c, g, or t
  misc_feature (1035)..(1037): n is a, c, g, or t
  misc_feature (1039)..(1039): n is a, c, g, or t
  misc_feature (1041)..(1043): n is a, c, g, or t
  misc_feature (1045)..(1045): n is a, c, g, or t
  misc_feature (1048)..(1052): n is a, c, g, or t
  misc_feature (1054)..(1055): n is a, c, g, or t
  misc_feature (1057)..(1057): n is a, c, g, or t
  misc_feature (1060)..(1060): n is a, c, g, or t
  misc_feature (1062)..(1068): n is a, c, g, or t
  misc_feature (1070)..(1071): n is a, c, g, or t
  misc_feature (1073)..(1080): n is a, c, g, or t
  misc_feature (1085)..(1099): n is a, c, g, or t
  misc_feature (1101)..(1101): n is a, c, g, or t
  misc_feature (1103)..(1103): n is a, c, g, or t
  misc_feature (1105)..(1106): n is a, c, g, or t
  misc_feature (1108)..(1108): n is a, c, g, or t
  misc_feature (1110)..(1111): n is a, c, g, or t
  misc_feature (1114)..(1115): n is a, c, g, or t
  misc_feature (1117)..(1118): n is a, c, g, or t
  misc_feature (1120)..(1123): n is a, c, g, or t
  misc_feature (1126)..(1126): n is a, c, g, or t
  misc_feature (1128)..(1128): n is a, c, g, or t
  misc_feature (1130)..(1139): n is a, c, g, or t
  misc_feature (1141)..(1145): n is a, c, g, or t
  misc_feature (1147)..(1147): n is a, c, g, or t
  misc_feature (1149)..(1151): n is a, c, g, or t
  misc_feature (1153)..(1158): n is a, c, g, or t
  misc_feature (1160)..(1163): n is a, c, g, or t
  misc_feature (1165)..(1166): n is a, c, g, or t
  misc_feature (1168)..(1170): n is a, c, g, or t
  misc_feature (1173)..(1173): n is a, c, g, or t
  misc_feature (1176)..(1176): n is a, c, g, or t
  misc_feature (1181)..(1187): n is a, c, g, or t
  misc_feature (1195)..(1195): n is a, c, g, or t
  misc_feature (1199)..(1200): n is a, c, g, or t
  misc_feature (1202)..(1229): n is a, c, g, or t
  misc_feature (1231)..(1232): n is a, c, g, or t
  misc_feature (1234)..(1236): n is a, c, g, or t
  misc_feature (1239)..(1239): n is a, c, g, or t
  misc_feature (1242)..(1242): n is a, c, g, or t
  misc_feature (1247)..(1253): n is a, c, g, or t
  misc_feature (1260)..(1260): n is a, c, g, or t
  misc_feature (1264)..(1284): n is a, c, g, or t
  misc_feature (1286)..(1289): n is a, c, g, or t
  misc_feature (1291)..(1296): n is a, c, g, or t
  misc_feature (1298)..(1298): n is a, c, g, or t
  misc_feature (1300)..(1300): n is a, c, g, or t
  misc_feature (1302)..(1302): n is a, c, g, or t
  misc_feature (1305)..(1305): n is a, c, g, or t
  misc_feature (1307)..(1308): n is a, c, g, or t
  misc_feature (1310)..(1312): n is a, c, g, or t
  misc_feature (1314)..(1314): n is a, c, g, or t
  misc_feature (1317)..(1319): n is a, c, g, or t
  misc_feature (1323)..(1324): n is a, c, g, or t
  misc_feature (1328)..(1330): n is a, c, g, or t
  misc_feature (1332)..(1333): n is a, c, g, or t
  misc_feature (1335)..(1337): n is a, c, g, or t
  misc_feature (1340)..(1344): n is a, c, g, or t
  misc_feature (1347)..(1348): n is a, c, g, or t
  misc_feature (1350)..(1352): n is a, c, g, or t
  misc_feature (1354)..(1356): n is a, c, g, or t
  misc_feature (1358)..(1361): n is a, c, g, or t
  misc_feature (1364)..(1364): n is a, c, g, or t
  misc_feature (1366)..(1366): n is a, c, g, or t
  misc_feature (1368)..(1368): n is a, c, g, or t
  misc_feature (1371)..(1371): n is a, c, g, or t
  misc_feature (1373)..(1374): n is a, c, g, or t
  misc_feature (1376)..(1378): n is a, c, g, or t
  misc_feature (1380)..(1380): n is a, c, g, or t
  misc_feature (1383)..(1385): n is a, c, g, or t
  misc_feature (1389)..(1390): n is a, c, g, or t
  misc_feature (1393)..(1394): n is a, c, g, or t
  misc_feature (1397)..(1405): n is a, c, g, or t
  misc_feature (1407)..(1407): n is a, c, g, or t
  misc_feature (1409)..(1414): n is a, c, g, or t
  misc_feature (1416)..(1426): n is a, c, g, or t
  misc_feature (1429)..(1432): n is a, c, g, or t
  misc_feature (1434)..(1434): n is a, c, g, or t
  misc_feature (1436)..(1437): n is a, c, g, or t
  misc_feature (1439)..(1443): n is a, c, g, or t
  misc_feature (1445)..(1449): n is a, c, g, or t
  misc_feature (1451)..(1453): n is a, c, g, or t
  misc_feature (1457)..(1458): n is a, c, g, or t
  misc_feature (1461)..(1464): n is a, c, g, or t
  misc_feature (1466)..(1466): n is a, c, g, or t
  misc_feature (1468)..(1470): n is a, c, g, or t
  misc_feature (1472)..(1472): n is a, c, g, or t
  misc_feature (1474)..(1479): n is a, c, g, or t
  misc_feature (1481)..(1485): n is a, c, g, or t
  misc_feature (1487)..(1492): n is a, c, g, or t
  misc_feature (1495)..(1495): n is a, c, g, or t
  misc_feature (1497)..(1497): n is a, c, g, or t
  misc_feature (1499)..(1499): n is a, c, g, or t
  misc_feature (1502)..(1502): n is a, c, g, or t
  misc_feature (1504)..(1505): n is a, c, g, or t
  misc_feature (1507)..(1508): n is a, c, g, or t
  misc_feature (1511)..(1512): n is a, c, g, or t
  misc_feature (1514)..(1514): n is a, c, g, or t
  misc_feature (1516)..(1517): n is a, c, g, or t
  misc_feature (1519)..(1519): n is a, c, g, or t
  misc_feature (1526)..(1539): n is a, c, g, or t
  misc_feature (1541)..(1541): n is a, c, g, or t
  misc_feature (1543)..(1557): n is a, c, g, or t
  misc_feature (1559)..(1564): n is a, c, g, or t
  misc_feature (1566)..(1567): n is a, c, g, or t
  misc_feature (1569)..(1570): n is a, c, g, or t
  misc_feature (1573)..(1573): n is a, c, g, or t
  misc_feature (1575)..(1582): n is a, c, g, or t
  misc_feature (1585)..(1585): n is a, c, g, or t
  misc_feature (1587)..(1589): n is a, c, g, or t
  misc_feature (1591)..(1599): n is a, c, g, or t
  misc_feature (1602)..(1606): n is a, c, g, or t
  misc_feature (1608)..(1621): n is a, c, g, or t
  misc_feature (1625)..(1625): n is a, c, g, or t
  misc_feature (1627)..(1627): n is a, c, g, or t
  misc_feature (1629)..(1629): n is a, c, g, or t
  misc_feature (1632)..(1632): n is a, c, g, or t
  misc_feature (1635)..(1635): n is a, c, g, or t
  misc_feature (1641)..(1641): n is a, c, g, or t
  misc_feature (1643)..(1644): n is a, c, g, or t
  misc_feature (1646)..(1647): n is a, c, g, or t
  misc_feature (1653)..(1653): n is a, c, g, or t
  misc_feature (1659)..(1672): n is a, c, g, or t
  misc_feature (1675)..(1675): n is a, c, g, or t
  misc_feature (1677)..(1677): n is a, c, g, or t
  misc_feature (1679)..(1684): n is a, c, g, or t
  misc_feature (1686)..(1687): n is a, c, g, or t
  misc_feature (1724)..(1735): n is a, c, g, or t
  misc_feature (1737)..(1743): n is a, c, g, or t
  misc_feature (1745)..(1754): n is a, c, g, or t
  misc_feature (1757)..(1761): n is a, c, g, or t
  misc_feature (1764)..(1764): n is a, c, g, or t
  misc_feature (1767)..(1767): n is a, c, g, or t
  misc_feature (1773)..(1779): n is a, c, g, or t
  misc_feature (1785)..(1786): n is a, c, g, or t
  misc_feature (1789)..(1812): n is a, c, g, or t
  misc_feature (1814)..(1814): n is a, c, g, or t
  misc_feature (1816)..(1817): n is a, c, g, or t
  misc_feature (1855)..(1873): n is a, c, g, or t
  misc_feature (1875)..(1878): n is a, c, g, or t
  misc_feature (1880)..(1884): n is a, c, g, or t
  misc_feature (1921)..(1927): n is a, c, g, or t
  misc_feature (1929)..(1931): n is a, c, g, or t
  misc_feature (1933)..(1943): n is a, c, g, or t
  misc_feature (1945)..(1950): n is a, c, g, or t
  misc_feature (1987)..(1991): n is a, c, g, or t
  misc_feature (1993)..(2000): n is a, c, g, or t
  misc_feature (2002)..(2016): n is a, c, g, or t
  misc_feature (2705)..(2705): n is a, c, g, or t
  misc_feature (2718)..(2718): n is a, c, g, or t
  misc_feature (3520)..(3520): n is a, c, g, or t
nacnnnanannncnacnngngcnacnnncnngccncntnncnngntgnngnnncntannnnnnnnnnannnnannnnacnantnngnnntnnannnnnttncncnnnntnnnnnnnnnnnntntnnannntnnncnncanancncnncaactncnngnnnngnnntngnnannnnntnnnngnnnnttntnnnannnntnnancnnacnannnnnnnngnnnnanntnnttnnnnnnnnnnnnnnnnnnnnnnnnnnnaannntanannanncnnnnnnnntntncggnnncnnnnnncnnnnnncatcgtnntnnnnnnnngnnnnnnannannnnnnnnnnanangnnnantnnnnnnannncnancnnnntntngtnnnnnnnnnnnntncnannncnnnnnncnnnnnannnnnnnnncnacnnnnannnnngnnnntnntnnnttntngnnannnnacnnnaaannannannnnnnnnnnagnnnnnnnnnnnncnnnnnnntnnntnnnannnnnnntnnnnnnnnanncnnnnnnncnnnttnnantnntnnnntnnnnngnnnttnnnnntnatnnnnannnnnnannnaancnnaannnnnnnnnnannncnnncannncngctntnnttnnatnntannnnaantnnannnnnannnnnnnnnnnnnnnnannnnnnntnnnncnnnnnnnnnnnnnnnnnnannnnannnnnnnnnnnancnnnnannnannnnnnncnnnntnnnnnannnnnnnnnnnnannnnntnnnaannnnanatnaaannncaannnnnnnncnnnnnnnnnnnnnnnnnngnnngnnnnntnntannnaaannnnannnnanancannnnnnnnnnnnnnntnnntnnnnnagnnnnnnnnnnnnntnnnannnnannnnnannnnanancnnannncnnncnnnngntnnnnnnnnnnnnnnngnntnnnntcnnatngnantnnnannnnanancnnaanannnntnnnnnnnnnnnnnnnnnnnnnnnnnttnnntntnnntnaannnnnanntnaancnnnnnnncnntnnnnnnnnattcnnnnnnnnnnnnnnntntntnntntnnaanntnnannnnaancnannnnnnnnnntnnnnntncnnntnnnnnncnnnntnntnnnttnttnaaatnnnnnnncaaaccanaacnncnnnnnnnnnnnnnnnnnnnnnnnnnnnntnntnnnttnttnaaatnnnnnnncaaaccncaannnnnnnnnnnnnnnnnnnnngnnnnannnnnntntntnttntnnannntntannncaanncacnnncnntnnncgnnnnncanngnnntnnnannnnttntntnttntnnannntntannncaanncannacnnnnnnnnntngnnnnnncnnnnnnnnnnngtnnnntntnntnnnnntnnnnnannnaacnncannnngncnnngntnnnnnntnnnnnannnnnnttntntnttntnnannttnnanannanaccacannnnnnnnnnnnnnanannnnnnnnnnnnnnntnnnnnntnntnnaantnnnnnnnnaancnnnannnnnnnnntannnnnannnnnnnnnnnnnngttntntnttnttnaaattntnnannaaaccncaacannnnnnnnnnnnnnatntntnnnnnngnngttgtatcttattgaaattctacatcaaaccacaacnnnnnnnnnnnnannnnnnngnnnnnnnnnnttnnnnnttnttnaaattnnnnnnnaaaccnnaannnnnnnnnnnnnnnnnnnnnnnntnannggttgtatcttattgaaattctacatcaaaccacaacnnnnnnnnnnnnnnnnnnnannnntnnnnngttgtatcttattgaaattctacatcaaaccacaacnnnnnnngnnntnnnnnnnnnnntnnnnnngttgtatcttattgaaattctacatcaaaccacaacnnnnngnnnnnnnngnnnnnnnnnnnnnnngttgtatcttattgaaattctacatcaaaccacaacgtcgggcctcatattgattgataaagtgttacttacgggctgtctgccactataaaaatacgatcgggtgttccgacgaagccagtttgatgcattttccgtatttcaaagaacgaaaataacgatttatcagaaaaattccaattgttgcggaatttccggttttgctcgttcgcttttaccccaaaaatttaatatgtctccatactgtttgtccgttacagcaagaatacttgtaaatcctgtcggaggcatcgatcgtcgaacccgcttaatgtgaacctgcatattctccttcgatgcacaatggcgcacatagactgaatactgcatcattgtgaaaccatctttttccaacgccttgcgaaattgcaccgcatgacgtcgttccgtttttgtattggttggcaaatcaaaaaagacaaacaaccacatgattcgataagcattcaagcgtacttctgacattcgactactccaataaaggatatgcaatctttttttgggttccagcaaagcatttagccagggaagaggctgaaaacataagtcctacttcgagaggtcgcacaaccttgtcgaaacgagtatcgacaaacaggagccgcaacagttcgcctttcacctttttggtcagttgtgtattcccgttnctgtaaagttggnagaccaattcgtcgacatacggtcgatagggttccattacgtcatcggccagcggaaaggagttgtaacgattccgatggaagatcccgaatgctgggaacagtccggagcccatgatcgcacgggccacggcggctcgcaggatcgtatagccgtaattgagcaggttgttgggcggcgaaccttcgcgggaacggtaaaattcggcaccgaacagttctgaccagtagattctcgctgctatgccctcccggttgtcggcgtcggcgctcttgacattcatgtagcagggtttcagtttgtctccgtcatatcccagcttccgcagcaaggcagcctggttgcggattttggtctcgacgatctgtttccaaaggcccttcttcagcggttcggatgcagcgatctgcatccgataatgttcaccttgcgttctgtttgaatccaaattcatcaacaaggcgttcggcattcggttctctccgcacaggataactgccacgttgttgtccgacagcgcattcaagagcggcagcgtgatggaggtctgctggtcctccagcaccacgaagccgatatcctcgatcgggatgcttttccgttggtcgggggcctcgcgcgtgtggatgatcatctggccgttgcgcaggctcaaacagtagggtgtcgaaaaaaacaaggttcgtttcagcatggccggtcatctttgaattttatctcgcccgttacggtcagttcgaaatcataaccttccaccaacatgttaaaattggaaacgctgaggcgcaatttcggtgatggnttggattggcagaattgagaggtcccagctccatataaggaggtaagtgttttctgatctcgggcctcctgatgaaagaggaactgtacccgtccttctgcagccattgctgttaccttgtagagtcgttttaccaactccttgcgggtacattcataaagttctgccggggtattttcataaaacaggaccatggtccccgtttttaagatgtatttcaaggggaaaccgttcgtgtcggtctgcggtaccagatcggggcgggcttcccggtcagcgctggctttgaaatattgggcagcttcgaggttgctgacgagttcaaaggtgcgtttcgttttgccctttttgtcctggccctcatagatgaccgtgcaatagttcccctcatttacgacatgataatcccgcttgtactcttttgcagataggtcgcgctgtttttttagcgcgatcggatgtttgacactcggtgtgaag

SEQ ID NO: 465 - DNA, 4000 bp, Escherichia coli
  misc_feature (696)..(696): n is a, c, g, or t
  misc_feature (1604)..(1604): n is a, c, g, or t
  misc_feature (1611)..(1611): n is a, c, g, or t
  misc_feature (1708)..(1708): n is a, c, g, or t
  misc_feature (1752)..(1752): n is a, c, g, or t
  misc_feature (1987)..(1987): n is a, c, g, or t
  misc_feature (1992)..(1992): n is a, c, g, or t
  misc_feature (2003)..(2003): n is a, c, g, or t
  misc_feature (2005)..(2005): n is a, c, g, or t
  misc_feature (2008)..(2008): n is a, c, g, or t
  misc_feature (2818)..(2818): n is a, c, g, or t
gcaaataaaaatatgcataaaaccgcatagaccgctctttccctaagccttatcttatcatttataagatatagaatagcaaatatatacaccgccacaccgcagtatatattgggccaatggtcaagtccagtatgtgtctctatattgggcatatgtcttgcaagtatgtctatgatggaaaaatattcggaataagacttggggaaattaaattctccggaagcggtactcataagtgcatagatctcgggcaaaagtataaccagagatattaccgcagcaagtatggagaatacggcaaattgaataccggatatgaaaaggtccttaaatccattgaccggttttataattaaaagtgagaaaaaataaaaaaccaaaaataaacatatcattatggatatgtaatagtttgatgatatgctcatagccagggaaagagtatagagtatgaattttctttcgtataccagactttccaaaccgagcattatgagcggaaaaagaacgatacaatcaagccacattatattccagttgtaggctgccatatagcccgaaagtgcatagaatattgcgaagaaagctattccgaaactctcaaactttgaatgtttcctaagataataagcaaaactaagaccggacagacctatcttaaatactatcatataagccatgaattccagtacnaatttttgcggtaccaaaattataagccagttcaagggacttgccaaataatatgaataaagagccgcaaagttgatccccaaacctaagtgccaagaataaagcaaacttccgccatgcgataatttatatttgaattcggaaaagaaaggtgcgtattggtggtacatatccatcctgaggaaactttcatctccaaacggcactatccccctttgtataaatataaggatcatgataagtacaggcattaaaaatgctgccacatatgcatcctgagttttaaaccaacttacattcttcatatattaccccgcattactttaataaattaacagtttaaccatgaaaaccgtacacaaatttattttgtatatcctaatgtttatttcatggttaaactgttattgatcaaaaatattattttactacatccgtcttaaataccagtatcttacttagcacataattacatactataacgactacactcatcacagcttttgcaatatattcgttgatatttgcatagtctatcatgaattttattcccactatttgaagtgcaaaactgaataatctcgctccggtaaagcttataaattcttttattaaaataaatctatcaaagcttttactgttaaaaaccatagttttatttgtaataaacgaaaaacaaacagctgcttcccaggctatggtattactgaaaaaataattaagtccggtcaacctgagcaaactgtatacagcccaatccactacggtagtcaatactccaaagataagatagctgattatggtcagatccttatctttgatcttattttttataaattcaaacatttaaaatcttgattccttccatacaagtgtatttcgatcaatatatacctttttaactcggntatcccntgccatacactttgaatcaatcggtatatcttgatcattatatactttttactcctcaagggcattaagtccgagcttcacacagcccattataccntgatcgtcattcaatgatgcaggtactatatatttatccggatngttgagttcctttgacttaagataaccgttattaagattataaacttcttttcttataagatcgaaaagtatctcctgcttcataactccgccgcccagtatgataagcttcggtgaaaggataagcatatagctgtatattgcctgagccagataataagcctcaagctcccataccttacgctccttggaaagttctataccttttttaccccatcttgcctctatggcgggnccgcntgccatacccncnaancaattgccgtgtgtggggcaattaccctcatacatatcatccttatgttttattatcaacatatgacctgcttcgggatgcatcattccgtgtaaaagcttaccgtttgccataactcccacacctatgccggttcctacggtaatatatatagcagtatcaagacctttagccataccgtaagtatgctctcccaacagcgaagcattgacatcggtatcaaagcctactttaacattaagttccctagcaaaacttcctactatatcaaagtctctccatccctttttaggcgttgaagtaatataaccgtatgtttttgaatctctgttaagatctataggtccaaaacaacctattcccaatgcttcgatatttttagacttaaaatattctatcattttaggcatacttacatccggagtgtctgtgggtattgatatcttatccaatattttaccgttctcatctcctaccgcacataccatttttgtgccaccagcttcaagtgcccctatcaacatattacaccttccttttatttacgtcagtacataaataccttattataatattcatctaatatatcataaaaagcatgattttactatttaaaattaaagcgatattctatattgtagcgacatttaagcttataagctatcgattttaaaaaatgtacactattcttacattttaataaaaagcaatattatttacctcaaaatcaaaacacaggctgtttaacttataaacttctgccttttgaaaagtttgataagtctcacaacctgtgctttttacttaacngtctatgtatatattaaaatttattttataacgcccttttgcaacattacattcgcataaagtgcagcttccgttgtggctataataagatatgatgtcttcgctgcatcgtaaaactcgaatctttccatatgacttacggcatttttacctctttcatcatactttgagactatcttttcgaattcatcccatataggagtttccaccgtatctcccgccactttttccattaatgttaccggactgtcgacataggtatcaagagggaatatctgcaatattgcatccaatatctcaggtacattatgaccgtccatcctgataagcttactgttttttgcaaatgaagcagccgggaaattcccgtccgctattacaagtctgtccgagtgtcccatttcggataaatattttaataagtccggtgatattattttaggtattccttttaacatttttttcttcctttccagatcattactttttaagcgaaaaggggcgatcattacgacagccccttctcgctcaaatcggaatattatgaaattatgtcttatattttatattacttgtataaacatggagctatttcaggtgcatccatattatcagcattgtaccataaagctcctgtatcaacatcttttactgtctcgcccttagctgccgctacagcaagttttactgcctgatatcctatctgtacaggatcttgagttacagcacctgcaaatgtcttagcctcgattgcatctaaaagctttgcacctgcgtcaaaacctactgctaccaccttaccttcacctaacttatcaagtccttcgttagctgttattattgcgttagctgcgaattcatttgaaccgtagatagcgataagatcgtctttttcaagtatagctgaagctacagcaaccgcatccgcatctttaacttctgcaggtatacctacttcgataactaccttcgctcctgccttctctgcctttaagctgtcatgcccttcaactgacacatcatccttacctacaagctcaaccattttgtctacaaatcccttagttcttgaaactatagactgagagtttgactcctgagctacgacacctattcttactgtaccgcttgctgatttgatcttgtcttcaataagcttatacatctctgttgctgcaagtt

SEQ ID NO: 466 - DNA, 4000 bp, Escherichia coli
  misc_feature (2784)..(2784): n is a, c, g, or t
  misc_feature (2892)..(2892): n is a, c, g, or t
agacaagttatatgacattgatggaacagttaatcggttagaagctgttttagatgatatagtttaagcgcctaaaccttttttcattaatgtttttcttagtggtgttaggccatgaagtgtttgaagtgccttcagccttaaagttctcaggttttggctttcagccattgcagctctgtttaaagcatctacacctcgaattctaagatctatatcgctttttcgctctgcatgataggcttctaaatgggatttgctaccaatctcatgtaaatttgttaagcctaacaaggcctctaaatcttttaaactcatattcaaaccctgcgcaccaataggtggaattacatgggcggcttcagcaattagcgcaaatctctggccataaatttctgaagatttttggcttattataggccaaaggtttctttgggatgctaactttatttcccctaatatattgcatgatcttgcatttaattctctgttgaattgctcctcatccattttatgtagtgtatttgctcggtcacttttttccatccaaattatagaagacatgtgtttaccattatggtcgggtaatgggacagtagtaaatgggccacctgatctatgaatttcagtgctaatatttttgtgcggtgatgaatgatatacggccattgccattgccttttgcccatatctccatgttttaactggaattttcatttcttgacgtgtcgaagagtttcgaccatccgcaccaattaataattggcaactatattgttcattgccaaccataactaaattttcagtagttctagaggttatacgaccagtattttgtccaaatagtagtgtcacatttgaaagggactgaatatgatttactaactctctgcgtagtagccaattaggtaaattccatgcgaatggttcttctgaaatttcggaagcgttgaagtcagctacagtacgaatttcattattaatgccgcctgcatctgctaatcgcattacttccaatggtgtggcgaatttttcaaagttttcccagagacctgcattttttaaagtattttttgctggttgaaggaaagcagtagagcgaagatctgaattaatgttctcagaattagttattggaggtagtggatcaacgcaaacaacatcaaaacctgcttttgcaaatgcacatgccgaagttaatccagcaataccaccacctgatataagaacttctgttgttttgcgtatcatatgcgcctagccattgagttcattcgcaaaaaatgtatttaaatcaggtgcattaaagtggatatattcagtttgcaaaaagtcgcctattaaagctgttttcatgcccatcttaaatggctctactaaattcctcgggtcatcttcaaacatgatcgcttgttttgggtttattttagagagttcaaagatggtatcgaatgcttttttttgaggctttggaattaacatggcatcttctgttccataaaattctgaaaaacattcatacaagcctagagcttttgaaacatttactgcatgcattcttgatccatttgtgaatataattttatctccaggtaatgagtttatgtgagcagcaaggtctgaattttcttcaaggttatctaaattaatattatgaacaaattctaaataatactcaggatcaacatgctgttctgccatcaaacctgctagtgttgttccatactcttcccaataatatttacgtaaataaactgctttctcttgagttacatttaatgttttttttagataagtgttcatcaatacttctatttgatcaaacaacttaattttgggtgagtaaagagtgtgatctaaatcaaaaacccaatgttttatatgagataatttgctttgcatggtttcaatttacagccagaaagaagataggtaaacctttgagcaacatgcgtgacaatatatctaatgcaagttaatattcttaaattgttagtgtgaaggtgaatggctgtgagtaggcagaaaaatgaaattaaagatccatacgagctaattattgatgctatagatgatggggcatacaaaccaggtgatagattggttgaggcagaattagcggatagatttggagtatctagaacaccaattcgcgaggcattgcaacgcttagaaacacaatctttcttgcacagggatggtcgttctttaatggttgcaacgcttaatcataatcaagttggtgaattatatacagttagagcggagttagaagggttagcaacttttttggcagcgcaacacgcgggtcctgaagaaatacgtgttttatataatatgattgaaagtgatagagaatatatcgatgacccacagaaattatcgcgagcgaaccgtaggtttcacaatcagttacacctagcaagtcataataactttttgattgagcaacttcagcaagttcatagaactatggcgctgttagcaaatacatcactagcggctgatggtcgtggcgagagtgcattacaggagcactctgatattgttaacgctattgaggctaaagacggggaaagggcgcgtaaggcgcttaaacaacatctgtcattcgcatttgaaactagacttaagcaagacgttgaagaatacgtaattacttaagaaatagcggctgcaaatctttcaaataaataaaagctgtcttggggtcctggagatgcttctggatggtgctgaactgagaaaacaggcctatctgataattctatgccacagtttganccatcaaatagtgacacgtgtgtttcattaacattttttggtaaagattgtgtatcgacagcaaatccatggttcatggatgtaatttctacttttcctgttgaaagntctttaacggggtgattggccccgtggtgtccgtggttcatttttatagtttttgctccgagagctagtgcaagcatttggtgccctaaacatataccaaaaattggaatttctttatgttctaatatgccttgtatcataggtactgcatatttcccagttgcggcaggatcacctggaccgttggaaagaaaaacaccctgcggattatgagataaaacgtcttcagctgttgctgtagcgggtaatacaactacgtcacacccagctgaagttaaacagcgtaagatattacgtttagcgccaaaatcaattgcaacaacctttttggtattatcattgttgtttgtatagcctttaggccacgcccatcgttcttcgtcccaatcataactatgttcaattgttacatcttttgctaaatcaagcccctctaagccaacaaaatttctggcagcttctagtaattttggaatatcaaaattaccatcaggattatgttctatagctacatgaggagcgccttgttgacgtacagctctagttaaccttcgagtatcaataccacttactccaatacgtccagttttttctagccagtcaggaagtgtagtttcggagcgatagtttgatggcgttgttggaaagcttttgacaatcatagccctagcaacgggatcagctgtttcagagtcttcaaaagttattccagtgtttccaatatggggaaaagtaaatgtaacggcctgtccagcatatgatggatctgtcattatttcctgataacctgtcatcgaggtgttgaagcaaagctctgcctcaatttggcctgttgcaccaaacccttgaccgtaaaaagttgtgccgtctgcaagtactatacaggctgtaacttttttggaattttctgaaggggtgtcaactgtgttcataagactcatcctgattcaaaatttttagacaattacgatggtcagtgtctaaggtcaaggaataaggaatttcatttatacataaatttcaatctcttgcatgtttgtgatttccttgaataaacctccaatcttctatattttaataatcttggatactaaaaccacaggagttt

SEQ ID NO: 467 - DNA, 4000 bp, Escherichia coli
  misc_feature (1992)..(1992): n is a, c, g, or t
  misc_feature (1998)..(1998): n is a, c, g, or t
  misc_feature (2721)..(2721): n is a, c, g, or t
  misc_feature (3217)..(3217): n is a, c, g, or t
  misc_feature (3271)..(3271): n is a, c, g, or t
  misc_feature (3424)..(3424): n is a, c, g, or t
  misc_feature (3631)..(3631): n is a, c, g, or t
  misc_feature (3934)..(3934): n is a, c, g, or t
  misc_feature (3943)..(3944): n is a, c, g, or t
  misc_feature (3952)..(3952): n is a, c, g, or t
  misc_feature (3958)..(3958): n is a, c, g, or t
  misc_feature (3964)..(3965): n is a, c, g, or t
  misc_feature (3967)..(3968): n is a, c, g, or t
  misc_feature (3970)..(3971): n is a, c, g, or t
  misc_feature (3973)..(3976): n is a, c, g, or t
  misc_feature (3988)..(3988): n is a, c, g, or t
  misc_feature (3991)..(3991): n is a, c, g, or t
  misc_feature (3994)..(3994): n is a, c, g, or t
  misc_feature (4000)..(4000): n is a, c, g, or t
atttatatgatggctgattcgggcgctcgaggatctgcagctcaagtaagacagcttgcaggtatgcgaggtttgatggcaaggcctgatggctcaattattgagacaccaattactgctaatttccgagatggcttaaatgttcttcaatattttatttcgacgcacggtgcacgaaaaggtcttgcagatacagcattgaaaacagctaactcaggttatttaactagacgtttagttgatgtaactcaagatcttgttgtaacacaacacgattgcggtacagaagacggtttagttacgaaagcgcttatcaaaggtggtgaagttgttgagccattaagtgatcgtattttgggtcgtgtaaatgccctcgatatttaccatccagaaacgcaagaagtgatttattcaaaaggtacgctccttgaagaagaccatgttgagaaaattgatgcacttggtattgatgaagtgaaagtgagaactgcacttacatgcgaaacaagacatggcatttgttctcaatgttatggtcgtgatttaggtcgtggtaaattgattagtcaaggtgagtctatcggtgtgattgcagcgcaatctatcggtgaacctggcacacaattaacaatgagaaccttccatattggtggcgcagtttctagagcagcatcagtaagccaagttgaaagtaaatcaaatggcgtaattcaatttacatccacaatgcgttacgttaccaatgctcgaaatgagcaggttgttatttcacgtaatggtgagttgattattcaagatgaaagtggtcgcgaaagagaacgtcataaagttccttatggtgcaaacctagttgtacaagatggcaaacctattaaagcaggtggcgttcttgcaacatgggatcctcatacacgtccaattatttctgagtatgctggacaggttaaatttgaaaacgttgaagaaggtattacagttgcaaaacaaattgatgatgtcacaggcttatcatcattagttgtgattgatcctaagcaacgtgcaggtcagtcaaaaggcttaagacctcaaatcaaaatcttagacacatctggcaatgaagttaaattagcgggtagcgatatatctgttaacgtaactttccagctcggttacatcattactgtaaaagattctcaagaagtaaaagtgggcgatgtgattgctcgtattccacaagaatcttctaagacgcgagatatcaccggtggtcttccaagagttgctgaattatttgaagcaagatctccaaaagacgcaggtatgttagctgaaagtacaggtacagtttcatttggtaaagacaccaaaggtaaacaaagacttgtgattacagatcttgaaggtgtttcaaaagagtttttaattcctaaagacaagcatgtgacagcgcatgatggtcaagttgtgactaaaggtgaaactattgtggacggaccagcggatccgcaagatattcttcgccttcaaggtagggaagctttagcaagatatattatcgatgaagttcaagatgtttatagattgcaaggtgtaaaaattaatgacaaacacattgaagttattgttagacaaatgttaagacgtgttcgtgtcactgatgcaggagacacttcatttattcaaggtgaacaagtcgaaagagctgaattgttaactgaaaatgaatcgataatgtcacaagacaaaaaacctgctgagtatgaatatgtgcttttaggtattactaaagcatcgttatctacagactcatttatttcagcggcttcgttccaagaaacaactcgcgttctcactgaagcagcaattttaggcaagcgtgatgaattaagaggacttaaagagaatgtaatcgttggtcgtttaatccctgcaggtacaggtttggcttatcatgaatcaagaaaagctgcagctgctggggaaagtatggaccctgttgaggtacctctngatcanatcgatactccaatggaagtggcacaggaaactagccctgaaattgaagcgccgactgaatgataggttgacattatgcaggaaccaaaatacaatttgcggctttttgggatcttcgcgtttagcggggactctaataaagtcatcatcaatagtaatttagaaatttaaggatttaggcgatgccaacaattaatcagttaattcgtaaaccacgaaaaaaagttgaaagtaagagcaaggttccagctcttgaagcttcacctcaaaaaagaggtgtgtgtacgcgtgtttacacaacaactccaaaaaaaccaaactctgctttgcgtaaagtggctaaagttcgtttgacgaatggttacgaagtgattagttatatcggcggagaaggccataatttacaagaacactctgttgttttattaagaggcggccgtgtaaaagacttaccaggcgttcgttaccatatggttcgaggaagtctggatacagccggtgttaaagatcgtaaacagtctcgatctaaatacggcgctaagcgacctaaagaataagttttttagaatactaaattaaggtaaacatattatgccaagacgtagagaagttcccaaaagaatcatccttcaagatccaaaattcggaagccaagaggtttctaaatttgtgaatgtattaatgacgagcggaaaaaaatccgttgccgaaagattaatttanggcgcattcgatcaaattaaaacgaaaagcggaaaagaccctattgaagtattctctctcgcattaacaaatttaagaccagttgttgaagtaaaaagtcgacgtgtaggtggtgctaactatcaagtacctgtcgaagtaagaccttcaagacgtgtggctttagctatgagatggctaagagatgcagcacgtaaaagaggtgaaaaatcaatggatttacgtttagcagcagaaattgtagaagcttctgaaaataaaggcgccgcaatgaaaaaacgtgaagaagttcacagaatggcagaagctaataaagcgttctcacatttccgtttctaaacttaattaattaaaaggtaattctaaagtggctcgcataacccccattaatcgatacagaaatataggaattagtgctcatattgatgcaggtaaaactacaacaactgagcgtattcttttttacactggggtgaaccataagattggtgaagtncacgatggtgccgcaaccatggactggatggagcaagagcaagagcgaggcatnacgattacttcagcagcaacaacttgcttctggaagggtatggcaggtcaatttgaccagcatcgaattaatattattgataccccaggacacgtagacttcactattgaagtggagcgatcaatgcgagttcttgatggtgcttgtatggtntattgtgcagtaggtggtgttcagcctcaatcagaaactgtatggcgtcaagcaaacaaatataaagttccacgtttagcttttgtaaataaaatggacagagccggcgcaaacttttttaaagtttacgatcaaatgcgcttacgtttaaaagcaaatccaattgcacttcaggtccctattggcgctgaagaaaaatttgaaggngtgattgatcttattaaaatgaaagctgtttattgggatgaatcatctcaaggtatgaaatttgattatcgcgatattcctgcagatttagttgatacatgtaaagaatggcgcgaaaaaatgctcgaagccgccgcagaagccaatgaagaattaatgaataaatatttggaaactggtgatttaagcgaagaagatattaaaaaaggattgcgcattagaacgattaattttgaaatcgtgcctatgttatgtggatcagcctttaaaaataagggtgtgcaagctatgttggacgcagtnattgagtanntgcctgcncctacngatgtnncnncnntnnnntgtgaagatgcnaanggncaaccn

SEQ ID NO: 468 - DNA, 4000 bp, Escherichia coli
  misc_feature (1832)..(1832): n is a, c, g, or t
  misc_feature (1848)..(1848): n is a, c, g, or t
ccccttaggagataaattgtgccaatctgtatttgtctgaaaaatattagcaatattcaataactttgcttcactaaaataattacctataagttgcatgccaacgggaagattattcattagcccagctggcattgataggcctggtaagcctgccagatttgttgaaattgtataaacatcttgcatatacattttaagtgggtcttcttttttatccccaattggaaaagctactgaaggagctgaagggcctaaaattacatcacatttttcaaacgcttttttaaaatcctcagaaattaatcttctaattttttgagcttttagataatatgcgtcgtagtaacccgcacttaggacgtaagtgcctatcattattcttcttttaacttcatttccaaacccttcctctcttgtcttacagtacatatccatcaaatcatcatattcttttgtgcgataaccatatcgaacaccgtcatatctagataaattactggatgcctcagcaggtgcaattacataatagaccggtattgataaatgattatttggtaaagatatctctacaatctcagctcccaattttttatattcatcgataccctgttctataattttctcaatttcaggttccaacccctcactaaaaaattcttttggaatgccaatttttaagccttttataggatcatgaatcccttttaagtaattttctttctctctttgaacgcttgtcgaatcttttgggtcatgaccagtcatcacatttagcattgccgcacaatcttctgccgtatgacacatgggccctgcctgatcaaggcttgatgcaaatgcaatcattccataccgagaaactaaaccataagttggctttaatccagttaaaccacataaagaagcaggctgtcttatagagccgcctgtatctgttgccgttgcagccggggctaacattccagcaactgcagccgcactcccgcccgagcttcctcccgggacagcttttatatcccatggattttttacattgccataaaaagaagtttcattagatgagcccatagcaaattcgtccatattggttttacctaggttcacagcacctacttcattaaatttacttataacagtggcgtcatatggtgcaataaaattgtctaacattcttgagccacaacttgttttccacccttctgcacaaaaaatatctttttgagcaattggaatgcccgttaaataattctgccttccctcctgaatcattgcatcagcgtttctggccatagctaaacttttatctttatcaaaactaataaaagcatttatagatgaattataaagatctaatcgatctaaaaagaactgggtaagctccacacttgaaaattttttttcttttaaactgtctgaaagctctttgagagataaatttatcattttattcaatcactctcggtacaataaataaggattgattggtttctttagataattctaaggatttttctctaatatccccctcggtcactttatcctcccttaaaggctgggtgatatcaagtgcatgtgccataggttcaatattatcggtatttacctttgtcatttgatcgattaaccccaaaatgccttctagtttttcactgacttggccaatctcaagttcatttatgtttattcttgctaaatgcgcaattttttttatctcatcattattgaatttcatttttaataaaacaccattttttgtttaatttatgttgattaatcagttattatacaaggatacgaagacactttaaaattcatctcacaaactatgnttaaaaatatgtttanaaattttgttgataacgacttggctattgatctgggaacagcaaatactctgatttatactaataaaggagggattgttcttgatgagccatcggtagtagcaatacaacatgttcaggggcctggtggtcctcaatctaggaaagcggttatagctgttggagctgaagcaaaggcaatgcttggtagatcccctaaaaacatcgaagctattcgtcccatgagggatggtgtcattgctgatttcaatgtcacagaagaaatgataaagcattttattaaaaaaactgtgtctacaaatttgttttccccaagcccaaggatagttatttgtgttccatttggagcaacacaagttgaaaaaagggctattcgtgaatctgcagaaagagccggagcaaaacaagtatttttaatagaagaacccatggcagccgctattggtgctgagctacctattcaggatgcaacaggctcaatggtgattgatgtaggcggaggcaccactgaagtaggcgttatttctttaggtggaatcgtttatgcaagctctgctcgagtagggggagataaaattgatcaagctattgttgattatatgagaagaaactatgggacattgatttcagaaccgactgcagaaaaaataaagcatcaaattggaagtgcatttccaatagatgaagtcctttcaatggatgtcacaggaagaaatttatcagaaggcttaccaagaaagttaagtctttctagtaacgaaatattagaagctatttcagatccacttcatacaattgttggtgctgtaaaaactgcacttgaacaaaccccgcccgaacttggggctgatattgccgataacggaatggtgcttacaggcggcggcgcacttttaaaaaatcttgatcgactcctacaagaagaaacaggcatcccagtcattgttgctgaagagcctcttacgtgtgttgtcagaggttgcggcaaaacactagatcaattagattattttaaaaatacatttgtttatgaataaacataatggcactcaaggcttctaaaaaaagattaaatttatttacatctaacttttctttaacttattttatttcttttatgttgttaactatcctaatcatgtttatggatagtcgttatgattacctgaaacaaattagaaaagatttctcagtaattacttcccccattattatttttactaatgacacgattaatttttttgaaaactttcaaagcttatcgaaatcaaagatctcattagaagaagaaatagatcagcttaatattaaaattaatcatctagctattgaaaaccaaattagaaatttccttgtagttgaaaataaaaatttgagagaagcaaatcttttctcaaaaaatcaagaactaaaaaaaatattcccagctgaaattattaaaccaatgataagaggtaaaaacaaaataattacaatcaacaaaggtagtaaggatgggattcgacaaggtatgcccgcgcttaatagggaaggcttagttggtcaaatatattcagttcacaatctaacaagcgagattattcccttgctatcaaaaaaattcgctgtaaatgcacttcaagataaaggcgaaaatcatgtcatcatttatggggataataattctttggtcatcccctattttccagcttccattaatatttctcacggcgataaatttgttacctcggggctcgaccgtgtataccccagcggaataaagataggagaagtcgttgatatattggtagtagataagcaatttaataaaattattttaaagcctgcaactcattcaaatcaattttctttaattaccataattgattattaactatggtaaataaatcttataatgtgatggcaagacaagggaagttatttgttggattatttttattttctactctttttagttttattgatttatcaaacctaataggaatttactttaatccagattactttttagcgttaatgattttaactatttcatcaaatttgatcccccttaatatccctaaaatctttttgattggtatcttggtagatattttaattggatcaattttaggacaatatactttgacattcttaacgttattcggcttaca

SEQ ID NO: 469 - DNA, 4000 bp, Escherichia coli
  misc_feature (8)..(8): n is a, c, g, or t
  misc_feature (125)..(125): n is a, c, g, or t
  misc_feature (542)..(542): n is a, c, g, or t
  misc_feature (1364)..(1364): n is a, c, g, or t
  misc_feature (1613)..(1613): n is a, c, g, or t
  misc_feature (2045)..(2045): n is a, c, g, or t
  misc_feature (2288)..(2288): n is a, c, g, or t
  misc_feature (2317)..(2317): n is a, c, g, or t
  misc_feature (2319)..(2319): n is a, c, g, or t
  misc_feature (2322)..(2323): n is a, c, g, or t
  misc_feature (2325)..(2325): n is a, c, g, or t
  misc_feature (2328)..(2329): n is a, c, g, or t
  misc_feature (2331)..(2334): n is a, c, g, or t
  misc_feature (2338)..(2338): n is a, c, g, or t
  misc_feature (2340)..(2343): n is a, c, g, or t
  misc_feature (2346)..(2352): n is a, c, g, or t
  misc_feature (2360)..(2360): n is a, c, g, or t
  misc_feature (2362)..(2363): n is a, c, g, or t
  misc_feature (2366)..(2368): n is a, c, g, or t
  misc_feature (2373)..(2374): n is a, c, g, or t
  misc_feature (2376)..(2376): n is a, c, g, or t
  misc_feature (2378)..(2380): n is a, c, g, or t
  misc_feature (2382)..(2382): n is a, c, g, or t
  misc_feature (2388)..(2389): n is a, c, g, or t
  misc_feature (2391)..(2391): n is a, c, g, or t
  misc_feature (2395)..(2396): n is a, c, g, or t
  misc_feature (2398)..(2398): n is a, c, g, or t
  misc_feature (2403)..(2403): n is a, c, g, or t
  misc_feature (2405)..(2406): n is a, c, g, or t
  misc_feature (2413)..(2414): n is a, c, g, or t
  misc_feature (2416)..(2418): n is a, c, g, or t
  misc_feature (2421)..(2423): n is a, c, g, or t
  misc_feature (2425)..(2426): n is a, c, g, or t
  misc_feature (2428)..(2433): n is a, c, g, or t
  misc_feature (2435)..(2436): n is a, c, g, or t
  misc_feature (2439)..(2457): n is a, c, g, or t
  misc_feature (2461)..(2461): n is a, c, g, or t
  misc_feature (2463)..(2464): n is a, c, g, or t
  misc_feature (2466)..(2476): n is a, c, g, or t
  misc_feature (2478)..(2479): n is a, c, g, or t
  misc_feature (2483)..(2500): n is a, c, g, or t
  misc_feature (2502)..(2502): n is a, c, g, or t
  misc_feature (2505)..(2522): n is a, c, g, or t
  misc_feature (2524)..(2525): n is a, c, g, or t
  misc_feature (2527)..(2534): n is a, c, g, or t
  misc_feature (2538)..(2538): n is a, c, g, or t
  misc_feature (2540)..(2545): n is a, c, g, or t
  misc_feature (2547)..(2547): n is a, c, g, or t
  misc_feature (2549)..(2552): n is a, c, g, or t
  misc_feature (2554)..(2557): n is a, c, g, or t
  misc_feature (2559)..(2562): n is a, c, g, or t
  misc_feature (2564)..(2568): n is a, c, g, or t
  misc_feature (2570)..(2580): n is a, c, g, or t
  misc_feature (2582)..(2596): n is a, c, g, or t
  misc_feature (2598)..(2601): n is a, c, g, or t
  misc_feature (2603)..(2611): n is a, c, g, or t
  misc_feature (2613)..(2630): n is a, c, g, or t
  misc_feature (2632)..(2633): n is a, c, g, or t
  misc_feature (2635)..(2644): n is a, c, g, or t
  misc_feature (2646)..(2646): n is a, c, g, or t
  misc_feature (2648)..(2656): n is a, c, g, or t
  misc_feature (2658)..(2668): n is a, c, g, or t
  misc_feature (2670)..(2674): n is a, c, g, or t
  misc_feature (2676)..(2677): n is a, c, g, or t
  misc_feature (2680)..(2689): n is a, c, g, or t
  misc_feature (2692)..(2693): n is a, c, g, or t
  misc_feature (2695)..(2699): n is a, c, g, or t
  misc_feature (2703)..(2707): n is a, c, g, or t
  misc_feature (2709)..(2720): n is a, c, g, or t
  misc_feature (2724)..(2724): n is a, c, g, or t
  misc_feature (2726)..(2738): n is a, c, g, or t
  misc_feature (2740)..(2743): n is a, c, g, or t
  misc_feature (2746)..(2749): n is a, c, g, or t
  misc_feature (2751)..(2763): n is a, c, g, or t
  misc_feature (2765)..(2765): n is a, c, g, or t
  misc_feature (2768)..(2782): n is a, c, g, or t
  misc_feature (2784)..(2786): n is a, c, g, or t
  misc_feature (2792)..(2793): n is a, c, g, or t
  misc_feature (2795)..(2801): n is a, c, g, or t
  misc_feature (2803)..(2804): n is a, c, g, or t
  misc_feature (2806)..(2809): n is a, c, g, or t
  misc_feature (2811)..(2812): n is a, c, g, or t
  misc_feature (2814)..(2820): n is a, c, g, or t
  misc_feature (2822)..(2832): n is a, c, g, or t
  misc_feature (2834)..(2853): n is a, c, g, or t
  misc_feature (2856)..(2874): n is a, c, g, or t
  misc_feature (2878)..(2891): n is a, c, g, or t
  misc_feature (2893)..(2896): n is a, c, g, or t
  misc_feature (2900)..(2904): n is a, c, g, or t
  misc_feature (2906)..(2909): n is a, c, g, or t
  misc_feature (2911)..(2918): n is a, c, g, or t
  misc_feature (2921)..(2922): n is a, c, g, or t
  misc_feature (2924)..(2933): n is a, c, g, or t
  misc_feature (2935)..(2953): n is a, c, g, or t
  misc_feature (2956)..(2974): n is a, c, g, or t
  misc_feature (2977)..(2977): n is a, c, g, or t
  misc_feature (2979)..(2984): n is a, c, g, or t
  misc_feature (2988)..(2996): n is a, c, g, or t
  misc_feature (2998)..(2999): n is a, c, g, or t
  misc_feature (3001)..(3015): n is a, c, g, or t
  misc_feature (3017)..(3028): n is a, c, g, or t
  misc_feature (3030)..(3037): n is a, c, g, or t
  misc_feature (3039)..(3050): n is a, c, g, or t
  misc_feature (3052)..(3072): n is a, c, g, or t
  misc_feature (3074)..(3094): n is a, c, g, or t
  misc_feature (3096)..(3225): n is a, c, g, or t
  misc_feature (3227)..(3227): n is a, c, g, or t
  misc_feature (3229)..(3270): n is a, c, g, or t
  misc_feature (3272)..(3314): n is a, c, g, or t
  misc_feature (3316)..(3324): n is a, c, g, or t
  misc_feature (3326)..(3336): n is a, c, g, or t
  misc_feature (3338)..(3380): n is a, c, g, or t
  misc_feature (3382)..(3437): n is a, c, g, or t
  misc_feature (3439)..(3577): n is a, c, g, or t
  misc_feature (3579)..(3601): n is a, c, g, or t
  misc_feature (3603)..(3686): n is a, c, g, or t
  misc_feature (3688)..(3700): n is a, c, g, or t
  misc_feature (3702)..(3752): n is a, c, g, or t
  misc_feature (3754)..(3783): n is a, c, g, or t
  misc_feature (3785)..(3819): n is a, c, g, or t
  misc_feature (3821)..(3906): n is a, c, g, or t
  misc_feature (3908)..(3928): n is a, c, g, or t
  misc_feature (3932)..(3943): n is a, c, g, or t
  misc_feature (3945)..(3988): n is a, c, g, or t
  misc_feature (3990)..(4000): n is a, c, g, or t
tggttggntcagagtggcgatatgtgtggtgtttcttaatcattgtcatgaaagtttttagcaaccaaacagctatttcgtcggctctttcgtcgtcgttaccatagcgtgggaattcaccttcngtctcgaaatcaagtgggaaaccagtttcgtcgcgtacaatcttaacctttgcatacttaatagcactaatagagtctaccacatggctgaatcctgcaataccagtagcaaatgttcggcgcacatcagtgtctataagagcaagctctgctgcctcatagaagtacttatcgtgcatataatggataagattaagcgtattaacgtatatgtcagcaagccattccatcatgtcaataaacttaggcatgaactcttcgtacgtaacaatgtcgccttcaatagggcgatatgctggtccacattgctcacgagtcttatagtctataccaccgcttatagcgtaagtaaggcattttgcgaggttggcacgtgctccgaagaattgcatttccttacctgtttgtgtggcaganacacagcagcagattgaataatcgtctccccagactggacgcatcacctcgtcgttctcgtattgtatagagcttgtctttacagaaatctttgctgcgtacttcttaaagccttctggaagagctggagagtatagtacggttaggttaggttcgggcgatggtcccatgttttcgagtgtatggaggaaacggaagtcggtttttgtaaccatagaacgtccgtccatacccaaaccagctacttctagtgttgcccaaacggggtctccagagaacaattggttatatgatggaatgcgagcgaacttaaccatacggaatttcattacgatatggtctattaattcttgtgcttcgtcttcggttaatgtaccttcttgcaagtcgcgattgatgtaaatatcgaggaaagtagatattcttcccaccgacatagcggctccgttttgtgttttaatggcagaaagatagccgaagtatagccattgtacagcttcgcgagcgttctttgcagggttagaaatatcgtatccgtatatttgtgccattgctttgagttcgttcaaagcctttatttgcattgaaatttcctcgcgcagacgaataatttcctctgtcattacgccatcaccacagttctttaggtcttttttcttctcgtttataaggaaatctacaccgtaaagagcaacgcggcgatagtcgcccacaatacgaccacgcccgtatgtgtctggcaaaccagtaagaatgtggttgtggcgcactattttcatttcgtcggtatatgcatcgaacacaccgtcgttgtgggttttncaatattttgtgaatatttcgtgtagtttttctgatggttgatagccgtaggttgtgcatgcttgttctgccatttttataccaccgtatggcataaaggcacgtttcagtggtttatcggtttgcaaacccactaccttttcgaggcttttaaggctctcgtctatatatcctggtccgtaagcagtagcacttgacactacttcggtctccatatcgagtacgcctcccttagcacgctcttctttntgaagctcttttagtttgccccaaagcttatttgttgcttctgtaggcccaacaaggaagtcctcgttgccgtcgtagccagtgtaatttgcctggataaactcgcgcatatttacctcgtcaagccactttgtgcctgaaaagcctctccattcttctctcataatagtattgtaatttagtaaattataaggctaaacgcatagtatgacgtgaagcccattatcaattctctatttatttcgggtgcaaaggtactttctttccatatttatgacaatacttacttattggtattttgcattgcacatgttttgttagatgtgcagaaattagcctttttaggggtattgatactcatttgtaggtatgtggggtattctattgttgtgtaaaatgccatctttggtttacaaaacaaggggtttgtanatgtttacatgctcatttataggtatcattacacattgttttataattcttttttattgttctaaactttaattttacatatttacgaattgttattgggctttaaatagtaagaaaagataccgttcgcattttgcgcaacaatagtttgtgttttgtaagagtggtgtttaagaaaaccaaaagtatgttttttgcaatccgtcagcagcgttatcgcagttcgtcagcagctgtaggggnccgatttatcgcgcccgcatatacgtatncnccnncnaanngnnnnacgnannnncgnnnnnnntgaaatgnanncannnatttnntnannngnatatgnntntttnntnatgtnannatacggnntnnntgnnncnnannnnnngnnttnnnnnnnnnnnnnnnnnnntttngnngnnnnnnnnnnngnntttnnnnnnnnnnnnnnnnnntnttnnnnnnnnnnnnnnnnnntnntnnnnnnnngttngnnnnnntntnnnnannnntnnnnannnnntnnnnnnnnnnntnnnnnnnnnnnnnnnannnntnnnnnnnnntnnnnnnnnnnnnnnnnnngnntnnnnnnnnnnanannnnnnnnntnnnnnnnnnnnannnnngnnttnnnnnnnnnnaanntnnnnntttnnnnntnnnnnnnnnnnntttngnnnnnnnnnnnnnannnnttnnnnannnnnnnnnnnnntnttnnnnnnnnnnnnnnnannnttttgnnannnnnnngnnannnntnngnnnnnnntnnnnnnnnnnntnnnnnnnnnnnnnnnnnnnnttnnnnnnnnnnnnnnnnnnntttnnnnnnnnnnnnnnannnntttnnnnntnnnnannnnnnnnttnngnnnnnnnnnnannnnnnnnnnnnnnnnnnnaannnnnnnnnnnnnnnnnnnaanannnnnntttnnnnnnnnnannannnnnnnnnnnnnnntnnnnnnnnnnnntnnnnnnnntnnnnnnnnnnnntnnnnnnnnnnnnnnnnnnnnntnnnnnnnnnnnnnnnnnnnnntnnnnnnnnnnnnnnnnnnnnnnnnnnnnnnnnnnnnnnnnnnnnnnnnnnnnnnnnnnnnnnnnnnnnnnnnnnnnnnnnnnnnnnnnnnnnnnnnnnnnnnnnnnnnnnnnnnnnnnnnnnnnnnnnnntntnnnnnnnnnnnnnnnnnnnnnnnnnnnnnnnnnnnnnnnnnntnnnnnnnnnnnnnnnnnnnnnnnnnnnnnnnnnnnnnnnnnnntnnnnnnnnntnnnnnnnnnnntnnnnnnnnnnnnnnnnnnnnnnnnnnnnnnnnnnnnnnnnnnntnnnnnnnnnnnnnnnnnnnnnnnnnnnnnnnnnnnnnnnnnnnnnnnnnnnnnnnnannnnnnnnnnnnnnnnnnnnnnnnnnnnnnnnnnnnnnnnnnnnnnnnnnnnnnnnnnnnnnnnnnnnnnnnnnnnnnnnnnnnnnnnnnnnnnnnnnnnnnnnnnnnnnnnnnnnnnnnnnnnnnnnnnnnnnnnnnntnnnnnnnnnnnnnnnnnnnnnnntnnnnnnnnnnnnnnnnnnnnnnnnnnnnnnnnnnnnnnnnnnnnnnnnnnnnnnnnnnnnnnnnnnnnnnnnnnnnnnnnnnnntnnnnnnnnnnnnntnnnnnnnnnnnnnnnnnnnnnnnnnnnnnnnnnnnnnnnnnnnnnnnnnnntnnnnnnnnnnnnnnnnnnnnnnnnnnnnnntnnnnnnnnnnnnnnnnnnnnnnnnnnnnnnnnnnntnnnnnnnnnnnnnnnnnnnnnnnnnnnnnnnnnnnnnnnnnnnnnnnnnnnnnnnnnnnnnnnnnnnnnnnnnnnnnnnnnnnnnntnnnnnnnnnnnnnnnnnnnnntttnnnnnnnnnnnntnnnnnnnnnnnnnnnnnnnnnnnnnnnnnnnnnnnnnnnnnnnntnnnnnnnnnnn

SEQ ID NO: 470 - DNA, 4000 bp, Escherichia coli
  misc_feature (1)..(8): n is a, c, g, or t
  misc_feature (11)..(11): n is a, c, g, or t
  misc_feature (13)..(24): n is a, c, g, or t
  misc_feature (27)..(27): n is a, c, g, or t
  misc_feature (31)..(32): n is a, c, g, or t
  misc_feature (34)..(34): n is a, c, g, or t
  misc_feature (37)..(37): n is a, c, g, or t
  misc_feature (42)..(46): n is a, c, g, or t
  misc_feature (48)..(53): n is a, c, g, or t
  misc_feature (56)..(61): n is a, c, g, or t
  misc_feature (63)..(63): n is a, c, g, or t
  misc_feature (66)..(68): n is a, c, g, or t
  misc_feature (73)..(73): n is a, c, g, or t
  misc_feature (76)..(78): n is a, c, g, or t
  misc_feature (81)..(81): n is a, c, g, or t
  misc_feature (85)..(86): n is a, c, g, or t
  misc_feature (88)..(91): n is a, c, g, or t
  misc_feature (93)..(94): n is a, c, g, or t
  misc_feature (97)..(98): n is a, c, g, or t
  misc_feature (100)..(102): n is a, c, g, or t
  misc_feature (105)..(105): n is a, c, g, or t
  misc_feature (107)..(113): n is a, c, g, or t
  misc_feature (116)..(119): n is a, c, g, or t
  misc_feature (124)..(126): n is a, c, g, or t
  misc_feature (129)..(129): n is a, c, g, or t
  misc_feature (133)..(133): n is a, c, g, or t
  misc_feature (136)..(138): n is a, c, g, or t
  misc_feature (140)..(145): n is a, c, g, or t
  misc_feature (147)..(149): n is a, c, g, or t
  misc_feature (151)..(155): n is a, c, g, or t
  misc_feature (158)..(160): n is a, c, g, or t
  misc_feature (167)..(167): n is a, c, g, or t
  misc_feature (170)..(170): n is a, c, g, or t
  misc_feature (173)..(173): n is a, c, g, or t
  misc_feature (175)..(176): n is a, c, g, or t
  misc_feature (179)..(181): n is a, c, g, or t
  misc_feature (186)..(186): n is a, c, g, or t
  misc_feature (188)..(188): n is a, c, g, or t
  misc_feature (190)..(192): n is a, c, g, or t
  misc_feature (194)..(197): n is a, c, g, or t
  misc_feature (200)..(202): n is a, c, g, or t
  misc_feature (204)..(205): n is a, c, g, or t
  misc_feature (208)..(213): n is a, c, g, or t
  misc_feature (217)..(217): n is a, c, g, or t
  misc_feature (219)..(220): n is a, c, g, or t
  misc_feature (223)..(223): n is a, c, g, or t
  misc_feature (225)..(229): n is a, c, g, or t
  misc_feature (231)..(231): n is a, c, g, or t
  misc_feature (233)..(234): n is a, c, g, or t
  misc_feature (237)..(238): n is a, c, g, or t
  misc_feature (240)..(241): n is a, c, g, or t
  misc_feature (243)..(243): n is a, c, g, or t
  misc_feature (247)..(248): n is a, c, g, or t
  misc_feature (250)..(253): n is a, c, g, or t
  misc_feature (255)..(255): n is a, c, g, or t
  misc_feature (257)..(263): n is a, c, g, or t
  misc_feature (265)..(265): n is a, c, g, or t
  misc_feature (268)..(268): n is a, c, g, or t
  misc_feature (434)..(434): n is a, c, g, or t
  misc_feature (614)..(614): n is a, c, g, or t
  misc_feature (812)..(812): n is a, c, g, or t
  misc_feature (827)..(827): n is a, c, g, or t
  misc_feature (833)..(833): n is a, c, g, or t
  misc_feature (884)..(884): n is a, c, g, or t
  misc_feature (1025)..(1025): n is a, c, g, or t
  misc_feature (1148)..(1148): n is a, c, g, or t
  misc_feature (1199)..(1199): n is a, c, g, or t
  misc_feature (1273)..(1273): n is a, c, g, or t
  misc_feature (1365)..(1365): n is a, c, g, or t
  misc_feature (1391)..(1391): n is a, c, g, or t
  misc_feature (1399)..(1399): n is a, c, g, or t
  misc_feature (1416)..(1416): n is a, c, g, or t
  misc_feature (1422)..(1422): n is a, c, g, or t
  misc_feature (1441)..(1441): n is a, c, g, or t
  misc_feature (1466)..(1466): n is a, c, g, or t
  misc_feature (1494)..(1494): n is a, c, g, or t
  misc_feature (1506)..(1506): n is a, c, g, or t
  misc_feature (1659)..(1659): n is a, c, g, or t
  misc_feature (1740)..(1740): n is a, c, g, or t
  misc_feature (2010)..(2010): n is a, c, g, or t
  misc_feature (2028)..(2028): n is a, c, g, or t
  misc_feature (2031)..(2031): n is a, c, g, or t
  misc_feature (2774)..(2774): n is a, c, g, or t
  misc_feature (2900)..(2900): n is a, c, g, or t
  misc_feature (3005)..(3005): n is a, c, g, or t
  misc_feature (3077)..(3077): n is a, c, g, or t
  misc_feature (3364)..(3364): n is a, c, g, or t
  misc_feature (3442)..(3442): n is a, c, g, or t
  misc_feature (3469)..(3469): n is a, c, g, or t
  misc_feature (3964)..(3964): n is a, c, g, or t
nnnnnnnnaancnnnnnnnnnnnnaantttnntnaanaaaannnnngnnnnnnttnnnnnntnaannnttttnccnnnaanaaanngnnnnannccnngnnnaancnnnnnnnccnnnnggaannnggnggcnggnnngnnnnnncnnncnnnnnaannnaaaaaanttnggntnnggnnnaaaangntnnngnnnnccnnnannaannnnnncccntnnggnannnnntnannaannanngngggnngnnnngncnnnnnnngnccncaccgccccgcatccggcggcaccgcgctacgaacgcttcaccacaatagcgttggcaacgtcctcatcgagcgacagggaggtctcctccccatctgcacgcacaatcacgtcgtcgtctttaccggcgataaccgacacgctggcaccgaatgagataccggcntccgccaaaagcttgagaagctcaatatcggtctgaatcgactctgggaaccgggagacagtaaaccggtcttccggccccgagtcacgggccgcaatcgacatgggcacagtccgttcgtcgttgtgctcactttccacgcccagctcttcaagaccgggaatcgcatttccgtacggngagaacttggggttattgagcatcgccaggatgcgtttttccacatggtcgctcatcacgtgctcccagcggcacgcctcatcgtgcacatactcaatgtccagcccaatcacatcggagagcaggcgctccgccaggcggtgcttacgcatcacctcgaccgctttcttacggccagcatcggtgagcgccaagtgncggtcaggctcaacnctgagnagcccgtgcttctccatacgggcaacagtctgcgaaacagtcggcccggantgctccagacgttcggcgatgcgcgcacgcatgggggtaatgccctcttcctcaagctcaaggatggtgcgcaggtacatttcggtagtgtcaataagatcggtcatgccgcctgtatcccttttccctgccgactagganaacctagccttagttatgatgctcttctgagtaactattatgtacctttttagcgtgtttcgccacggattgcgcggcgcgtcgcccgaagcgaacgtcccgccaggtacacctggcgggccngtatcgccacgcagtctagccctcagagttacgtgcggcggaggtttttgngcgtttgcgcccgcccgatccccgcccggagcccttacgtccgccgctcttctgcggggcgtcctgctgcggancggaatccccctgggatgctttctgcccgcctgctcgctgccggttcaggttcttccggttctgtgcttttcgggcgctacggcgcgccttncggctcttgccgccggtttcgggtgnctcagtancagcgtcgaattgaggntcctcntcctcgtacacatcctcanggtccgcagcgagcgcctcgtcaanatcggcggtatcaggcagctcctgaagncgctgcgcccanggaacccagtcgggggctagcagtgcgtcatcgccgggcagcagaccaacctcgcatacggtcgccactttcgaacgtggcgcccgcgctaatgtggcgaaccagaaccacccccggtaaccgggcagggtgcactcaaacaggtgggtggtnaaacgatcctcttcaccgcgcaaatggtgcagcaggccaatggtgtttttgggggcgatctgctcaataccggccaacgcnacgtctttggcctgcgccaagaccgtgtccacacggctggtgcggcggcgcttatgcggctgcccaagggtgggttcaccaacctgctcgtatgtgtggtcggcaaacgggtcaaagctggcggtttcggtcgggttctggtcaatcacctgttcagacataccactattaaagcattcttaaggttcgctgggagggcggggcggcctgccttgacctcttacgctcacggttcgcgccggtgtgccattatggcgcggttttccgccntttttctgccctgatgcngcntcttattcctcgcagagaatacggtatgcgcgctatcgggctggcaaacctccgaagggaacctgcaaaaaagatgtgaataccgtccacaacgccgcaatattagtatttccaccccgttaaaggggtctaaacctgctacggttatgccatgactagcgaacgagaaacgcctcttgaagtagccaatgagctcccctacacccgcgctatccgctggttgggagccggtggcggcatcctcgcactgctgtgcaccctttcgggggtggcgatgctagtactcaagtgggtggatgctcatcctcccgccgttatgagccaggttcccctggtgctgttccccgtcgctttcatcgcgctaatgcttgccctcctccttgcggttcttcggcgtaagtcaagttagagggccttccggccgcgcaaccacatatatacgtcagaaaagagtgaacatgtctgctgaagctaagctgctcgtcgttgatgacgagttcaacattcttgaactactcgccacctccctgcgttttgccgggtttgaagtggtgaccgccggaaacggacgcgaggccattgagaaggccgagcaggaacagcccgacctgattgtgcttgacgtgatgatgccgggcatggacgggtttgatgtgacgcgccgcctgcgtgaaggcggacgcacctaccctgtgctgttcttgaccgcgaaagacgccaccgaagataaagttgctggtctntcagcaggcggtgacgactacgtgactaagccgttctcgctggatgaggtgatcgcccgtatccgagccatcctgcgccgttcccgctcgctgcaggaggaagatactgctattttgcgggtggangatctgagcctgaataccgacacccatgaggtgttccttggcgaggaggagattgacctctcccccaccgagttcaatctgctgcactacctgatgctcaacgcnaaccgggtgctgtcgaaggcgcagatcctcgaccacgtgtgggagtacgattttaacggcgactcgtccatngtggagtcgtatatctcgtacctgcgccgcaagatcgataacaaccgtgagggccacgaacccctgatccacaccaaacgcggcgtagggtacatggttcgtggttcccgcagctaggggcggtacctattaaactgttcaaccgcgaacccgcacagcagcccccggaggccccggaggcggctcaacagaacgcctccacgcagaagcacatggggcgcagaccccttgagcgtataccgttcacgctgtcgctgcgcacgcagctggtgctggtgacctctgcnctgattgctttggcgatcgttgtgacctcccttgtggcgatttcggcgttgcgcgcgcagatggtgcatcagctggangacgagatgaaggcgaactcggcgaanctgctttcccttgtctcgaacaatagccagcatcccgtgcaggaggccacgctcggttcgtaccacgtgtacctgctggatgagcacggcaacaccctgtacgcgctcagccccgatacgagctcccgggacgagccgcaagtaaccggctggacagccgataaagtgcgcaaaaataacggggtcggcactactgttaactcggtggaagggtcgaaagactggcgtctgctgccgatgacgcttaataacgacaccagcgtgaacggggtgcacgccacctccatggtggttgccttacccctggagcaaaccaaccaggtggttgctctcgtaggtgtgctcaccttcgcgttcgggctggccacgctcgcctcggctattgcaatgacgtgggtgattgtcacccgcactttcgagccgctggcgcgcgtggagcagacggcggcgaagatcgctaaaggggatctgtcacaacgtattgaggactacaancccggcaatgagattggcagtcttgccacgtcgctg

SEQ ID NO: 471 - DNA, 4000 bp, Escherichia coli
  misc_feature (813)..(813): n is a, c, g, or t
  misc_feature (1728)..(1728): n is a, c, g, or t
  misc_feature (1836)..(1836): n is a, c, g, or t
  misc_feature (1963)..(1963): n is a, c, g, or t
  misc_feature (1967)..(1968): n is a, c, g, or t
  misc_feature (1975)..(1975): n is a, c, g, or t
  misc_feature (1978)..(1978): n is a, c, g, or t
  misc_feature (1990)..(1991): n is a, c, g, or t
  misc_feature (1993)..(1993): n is a, c, g, or t
  misc_feature (1995)..(1995): n is a, c, g, or t
  misc_feature (2004)..(2004): n is a, c, g, or t
  misc_feature (2007)..(2007): n is a, c, g, or t
  misc_feature (2013)..(2013): n is a, c, g, or t
  misc_feature (2017)..(2017): n is a, c, g, or t
attttactaaaactaattgataaaaaaactaaaattaaaataggttaatttctattaccaaatatttttgaacctaccctgacatatgttgcattatttttaattgcgtcttgataatctcctgacatgcccatacttaattctttaaaatttaattcttggtttattttattcatctcagaaaaatatttctcaacattgccatcattcggcggaatacacattgtaccaataatatctaaattcaaatttttacaaaagttaaagaaatcacttaatttttctttatttattcctgacttttgttgttcatttccaatatttacctgtataaatattctaggttttttttcttgtttcacttgttcttctgcaattttaattgctaatttttcactatctacagagtggatatagtcaaatatttgtattgcaaatttaactttgttcgtttgaagtctaccaattaaatgaagcttaatgtttttattttggttttttatgtcagtccatttatctagggcttcttgaaccttattttctccataatgaagatggccatgctctattaatggtaaaatattttcaataggaaaagtttttgataccgctataattgtaggtaatttgtcatgatttgcttttgatttaatgcactcttctatataaattaaatttttaacagtgttatgcataataaaattttaaatagatattactttattaataaatttgacaaaagtcacatagataaacaagataaaaaaactacaataatttatagaaattataatcaaaaagtagatgaaaaantaattataaaaattaaaaattattgtaaaaaaaaaggtaataaatttttattagcaaataatataaagttatctgttaaacttaatttggacggggcttatatcccttcatttaataaaagtaataaacacctctcatattctttaacaaaaaaatttattattttaggttctgctcataatatttatgagattaacactaaaaaattacaaaatgttaatgctatttttttatcttcaatttttaaaaaaaataaaaattatctgggtattaacagatttaaactattatctgttttaaataaaaaaccatttgtagctcttggtggtattaaaaaagataatttgaaaaaattaagcttaattaattgctcaggctttgcgggtatttctttttttgaacaaaaaaaaggcccctagaaaggggcccttttaataatttgtgttctaaattaaattagaatgcaaatgatgcaactaggtgccacatacttttgtcttctaaagcagcagttgagtgagctgtgttgtctgcatcacccatcatagctgaaacagtcattccaccagctgtgtatgaagctgtaatagctgatactttgatgtcttcatcagaagcagcatttggctgagctatttcatcctcaccgtaagctatagagatgttttctgatacagtgtaagatacattgtaagatgtaacatcttggtctacagtagttgtagttgactctccatcatactcagtatcactgtaacctacagaaattggtccataagcatatgataatttcatagtagttacatcaactgatgcagcatcagtagagttatcctcaccgactgcatagtttaatgataaaccatcaacacccgcgtatgaaagtccaaaagcagtacttgaatcaaagtttgnaccttttggcgtatatgaagctgttacagttaaatcatcaactaatgatggtaatgtgtaaaacatcatattgtctgaagttgctgatgctttagggtcttgagctanagttataccataaccgttatcccaaagatcacctgctgcagtagtatccattgctgattgagcagaacttccaccttcaccatggaatgttaaagttccaagagcgtcagagctgattgatactgantgannatcaaanggngttcctgagttnntngncttagctgnacnagctgnagtngagtcatcattttggtctagtacgaaagataatgaaacgtttaatccattgtctaattctccagaaccattaaactcaagttggtttcccattgaaaaggcttttcctgcgtttgcagcgccgccgtcaacgtgtcttactttcatacttgctgaaccagtaactgccatttcgccagcaactaatgatgtagcaacaagtgaaccagctaatgctgttaaacctattttttttaagttcatatttttcctttgtttgttgttatttatagtttgtttttattattaataataaacagtgaatatgtatcaatttaagtccaattcattagataaaatgagcttttattgtaaaaattctgataagtgttgtatttttacatcactttaaaaatggctattttcttatatttttagcattttttaaaatatattgtataaaatgaccaaattaacaattaaattatttatgatttcctctaaaaacttaaaaattatttttattctttttatttcttctatttttttaaattcatgtggtggcaaacttcctggggctgacgcaagaaaatatgatccagatccaaaaaagagagtggcaaaaaatttagaggaaggtcggggctttagactttcagaaacttttagtaattctggaggtggagtttttgaatttgcaagctctaatgaattgtggagatcttcgctagatacgatcgattttatgcccttggtgtcagtgaactatagtggtggattaataattacagattggtattcaacagatcaagcttcaaatgaaagcattaaaatatcaataagatttttaactaatgaaataagatctgatgcactagatattaaagtttttaataaaaaatgtttacctcaattaaattgcgtgatttcagaaaaaaaagggaatctagttactgaattaaaagagaaaattttaaaaacagcagcgctttatgagatacaaaaaaaagcaaagaattccaaagagtataaaggcaaacaaaaatattaagctttaaatttaaaataaaaattaaattttgtggatagatataatttcaaaacagtagaagataaatggcagaaatattgggatcaagaaaatacgttttcttctaaaattgaaaaaacaaaaaaaaagttttattgtctagaaatgtttccttacccgtctggtaaaatccatatgggtcatgttagaaattatacgataggtgacgtacttgccagatttaaagccctacaaggatataatgttctacaccctatgggttgggactcatttggaatgccagctgaaaatgcagcaagacaaaataatttagatccaaaaacatggactgagtcaaatattaaaaccatgaggtctcaacttaaaaaacttgggctctcgattgactggagtaaagaaatatcaacctgctcacctgaatactacaaacatcaacaggaattctttttagaactgtatgataaaggattagtctatagaaaagaaaattatgttaactgggatccagttgatcaaacagttcttgcaaatgaacaggttgtagatggcaaaggatggaggtctggcgccacagtggaaagaaagaaactaaatcaatggttttttaacatctcaaaattttctgaggaactcttagaaggtctagatgatttaaataactggcctaataaagttaaggtaatgcaaaaaaattggattggaaaatcctttggttgtgaaatagagtttaaaatagaaagcaacaaacctattgataatataaagtgttatacaacaagaccagataccttatttggtttttcttttctagctctttcagttgatcaccctttagctaaatattatgaaacagataaaaagtttcaagaatttaaaaaggaatgttctaagacaggtactacagaagaatctattgcctctgcagaaaagcttggttttaaaacagatctgatt

SEQ ID NO: 472 - DNA, 4000 bp, Escherichia coli
  misc_feature (1002)..(1002): n is a, c, g, or t
  misc_feature (1170)..(1170): n is a, c, g, or t
  misc_feature (1212)..(1212): n is a, c, g, or t
  misc_feature (1398)..(1398): n is a, c, g, or t
  misc_feature (1728)..(1728): n is a, c, g, or t
  misc_feature (1954)..(1954): n is a, c, g, or t
  misc_feature (1976)..(1976): n is a, c, g, or t
  misc_feature (1985)..(1985): n is a, c, g, or t
  misc_feature (1990)..(1991): n is a, c, g, or t
caccaacatcgccaatatacatcgatggtctcattctaacatgctccattccctcaagagcctgtatactatcagcagaatactgattcttatctatttcttcgctcattttatatgatttttaataaattttcggttaaaacaaatataactaattaacaaaataaattagttaattatcagagttgaataggggtaagttatcaacaattttaacttaaaattattatcaattaataagagtcattatggacgttagaaactgatctaccagacggatcatttagatttttaaatgtcttatcccattctaatgcaattggtgtactacatgcaactgagggaactgaaggaactgtggtagcagaagtttctgatgggtaatgttcctcaaaaatcgatctgtagtaatactcttcttttgacattggagtttggaaaggaaaagtgaattttgcatttttaaacatgtcatcagttaccttttcattcactaaatctttcaaactatctatccaatcgtatcctactccatcactaaattgctccttttgcctccaagctactgattcaggaaggtactgttcaaaactttttcttaaaacccatttttccattttttcagagttaatcatcttgtcttttggattaattctcattgcaacatcaataaattctttatctaaaaacggaactctaccttcaattccccaagctgccaaagacttattagctcttaagcaatcgtattgatataatttatctaattttcttacagtttcctcgtgaaattctttagaatcaggtgctttatgaaaatacaaataaccaccaaaaatttcatcagccccctctccagataaaaccattttaatacccatagatttaataactctagccatcaagtacattggcgtagaagctctaattgtagttacatcataggtttccagatgataaataacgtctttaatagcatctaaaccttcttgtacagtaaangttatttcatggtgaatagaatcaatatggtcagctaccttttgagcagctattaaatcgggagaacctttcaaacctacagcaaacgaatgaagttgagggtaccaagcagatttaacatcgtttgactcaactctattttttgaatattttttagcaagtgcagangtaattgaggaatctaaaccacctgacaataatacaccgtanggaacatcactcataagttgcctgtgaacagcattttctaaagcagtttgtaaatcctctaggtttgttttattgtcttttacagaatcaaaattcatccaatctctatcgtaccattttactagctgattatccgtgctagacataaaatgtccagggggaaaaatctcaattttattacaaatnccctccaaagctttaagctcagaagaaatataaaaagtcccatgtttgtcccaacccatgtataaaggaataatccccatatgatcacgagcaattaaatattcatcattctgttcatcgtacagaacaaaaccaaaaataccgttcaaatcatcaataaaattcactcctttttccttgtaaagagctaggattatttcacaatccgaattagtttgaaaagcataatcagaactaagttgagctcttaattgctgatgattataaatttcaccgttagcagctaaaattaaatttttatcatcactataaattggttgatttcctgangcaggatcaacaatagctaatctttcatgagctaataaaacattttttccacaatgaattccgttccagtcaggacctctatgtctaactttttttgacatttccaaaacttgagatcttaacaaatcggaagattgttttaaatccaaagcacatacaattccacacataataaaaattttaagcaaatatgatataaatagtttaatttattatcaaatttaangatattaactacatatttatgnataaaattntaaannagtataaatatgtaattaaatattaataaaaataaaaatcatatttaaaagtgaaacttttactaatttggttttgttaaaaattttagatgaatccaatcgtatttttgaaaaatgttagtattaaacaaaacaatactccaattctaacaaatattaatttaagtgttgaaaaaggagagtttatatattttataggtaaaactggagtaggtaaaagcagcttgttaagaattctttacggggatattataattaaggaaggagaggctaaaattttagacacaaatttaattaaaataaaagacaaggaaattcctttattgagaagaaaacttggtattgtttttcaagatttcaaactgcttcctaacataacaataaaaaaaaatcttgaatttgttctaagagcaacagaatggaaagattcaaaaaaaataaattctagaataattgaagttcttgataaagttaagcttgatcatgtaattgaaaaatatccatttgaactttcaggcggagaacaacaaagagttgcaatttcaagagcactattaaataatcctgagataattttagcggatgaaccgacaggaaatcttgatcctgctacaagttcagaaataatgaatttaattaaagaaattaataatagtggaacaactattttaatcgcaacacacgattatgatataatatcaaaatttccagaaaaaacaataagaattgaaaaagaaaggttttttgagctttctaaaaaatcataaaaataattttatggtctaaaagtgatttttctcatacgcaaactagctggagtaacttctaaatattcatctactttaatatactccatacattcctctaaagaaaaatcgactttaggagcaattttcatggcatcatcagttccagatttacgcatattagtcaattgttttcctttaattaaattgacacccatatctgtatctttactgttttctccaacaacttgaccaatataaatttcttcattaatatctataaaaaaacgtcctctgtcttgaagtctatctatggcataagctgtcgcttttccagctgcagaagaaacaatagcacctttaatatcctctgaaaattcacccttaaaaggaccatattcactaaacctatgattaataattgctgtacctgctgttgcagttaaaattctgttacgtaatcctattaatcctcttgacggaattgtaaactctaaatgttgtaaatctcctttaggttccattaccaataaatctcctttacgtaaagaaactaaattaattgctttagaagcactttcttcaggaacatcaatagatagagtttcatatggctcagatttaactccattaatttcttttatgattacctgaggcctcccaacttgtaattcataaccctctcttcgcattgtctcaataagtacagacaagtgtaaaactccacgaccaaaaacattaaacttatcttcactatcagttgtatcaacacgaagagctaagtttttttccatttccttaaacaatctatcacgtaaatgacgagaagtcacatacttaccttctttgccaaaaaacggagaattattgattgtaaacaacatactcattgtgggttgatctacttcaattctaggtaacgcttcaggattttcaacatctgcaatagtatcgccaatttcaaatccttctagtcctgttatagagcaaatatctccacttcttactttagagactttagcctttcccattccctcaaaaacatgaagttctttaattcttacttttttagtagaaccatcagctttacacaacatgtaatctttattctcttctaagtcacctctaaacacacgtccaatagcaagtcttccagtaaatgaagaaaaatctaaagatgtgatttgcatttgaggcgaaccttctctgtatggagcttctgggatagactcaattacagcatctaataaatcaataatattt

SEQ ID NO: 473 - DNA, 4000 bp, Escherichia coli
  misc_feature (194)..(194): n is a, c, g, or t
  misc_feature (200)..(200): n is a, c, g, or t
  misc_feature (341)..(341): n is a, c, g, or t
  misc_feature (585)..(585): n is a, c, g, or t
  misc_feature (1060)..(1060): n is a, c, g, or t
  misc_feature (1189)..(1189): n is a, c, g, or t
  misc_feature (3121)..(3121): n is a, c, g, or t
  misc_feature (3128)..(3128): n is a, c, g, or t
  misc_feature (3130)..(3130): n is a, c, g, or t
  misc_feature (3133)..(3133): n is a, c, g, or t
  misc_feature (3145)..(3145): n is a, c, g, or t
  misc_feature (3151)..(3152): n is a, c, g, or t
  misc_feature (3154)..(3155): n is a, c, g, or t
  misc_feature (3188)..(3190): n is a, c, g, or t
  misc_feature (3193)..(3193): n is a, c, g, or t
  misc_feature (3198)..(3199): n is a, c, g, or t
  misc_feature (3203)..(3203): n is a, c, g, or t
  misc_feature (3208)..(3208): n is a, c, g, or t
  misc_feature (3213)..(3216): n is a, c, g, or t
  misc_feature (3219)..(3220): n is a, c, g, or t
  misc_feature (3225)..(3225): n is a, c, g, or t
  misc_feature (3227)..(3228): n is a, c, g, or t
  misc_feature (3231)..(3235): n is a, c, g, or t
  misc_feature (3238)..(3240): n is a, c, g, or t
  misc_feature (3242)..(3244): n is a, c, g, or t
  misc_feature (3247)..(3247): n is a, c, g, or t
  misc_feature (3249)..(3249): n is a, c, g, or t
  misc_feature (3253)..(3254): n is a, c, g, or t
  misc_feature (3256)..(3258): n is a, c, g, or t
  misc_feature (3260)..(3260): n is a, c, g, or t
  misc_feature (3263)..(3263): n is a, c, g, or t
  misc_feature (3939)..(3939): n is a, c, g, or t
ataataaaatatatatgatcgacttacctgaggtgcaaggattcagcggtgataggtcattgcttgtagcatgagataccaataataatgattatgtctgagcatcagatcttgcgctgataaattataatatgacggtaaattttagccctgtgaatactaattacgactttgataaggatggatatattacntccaangatcaggcaatcatgcttgaagcagttaggaagaatggattttggagatatttcaaagatattttaggcgcttgactattaacctgagatgatccaagtccagcccctgaccagtttcctcgatctttttaatctgtctanatttgtctagatgaagaaggtaatattcttatcgatatgcatgtttggtttcttcactttctcctccgcggcaaagctatcattttcatatcctcaaacttcgttggtggatgattgtccttccaagattgacgtgctgcttgatactgaagggcagatgactactgctatggacttgaaaatcctttttgatccaagtgtgatgagtcgggagtactttgatatcgatggaagcgtttttaanacttctactttgccatatttttcgtccgcggattgaattcaaacctcatatatcttgctgtctacattgtctaggtggtgatttaatggtgtgggtaaagtaggaacaataacagtgatcccaaaattagtttcagacgctccgtatcttaatttgaaattttcaatggttcccaataaggatagcgatgatagtaacgtggttattgtctctggatgagagacctttgacgttctagataaaacttctgaattgtatttacctattagcgttggtgattgtccagatatcatatgaaaacaaactgtcctgtatcaacaattgggtaaagtcactcttatccagaattcttcttttgtttctcagcatccctttcaggagaaacttgatgcaattgtgtcttggttggtgcataatatatctatgattattgttgtatttcttgctcttgtattgtgttttctggctcgacgcnttgttcataaaaatcctccaatttctattccaagttgaaagaaataatacaaatcactattacatattttctctctgttttgattagtcttttctaataattctctcctcttgtcaacttaattttcgntaggtctgcttgtattttgtgagtattctgttagatatatgtggaatagtgtaagtttcttttttgataaaaaaatttaattgattatattgtgtgatgcatcagatcagaaggctccttcggtgaattatattgtctacattcatttccttgtgaatttctcatgcgtgaagcatgagtttgtctccatctacctgaagttttgggatgcgttgcatctatcctataagtttttctgtaaatgtcagtggtatcgaatctaaggccgtggatatgagagtaatttatagctgagatagtatgcaatttaccggtgattgaacgggccaaatcacatatggtacttatcttgtcagaactggtactaccacagtcgctatagatcttggatgggcgagctatattgctggttcaaaatatcggttgttcaaccggactgatcttattactcctttatccggtgtaagtgatatttcttattatactcgatatttccagaccacggcaaatgtattgacgtgatatcttgatttttattattctggcggatggaatggtgatgatagtaatatccaatccggaatcgttaacaacttcattgatgtattagatacgataaattcatgatattatgacttcgtcgctaggccttgtatccctgatactgatgcaccaatttacacatgatatagtagcggagcagatgtttcctatctttcttgaatttctttcacggtgtatgattttacaggtctacgtatttccggttataatagtacctatcattatcgatgggatggccctgtgtacgtagattataatgattatacatgagtcggtttgttggatatagataaccaatattgagtgaattcttgaacaatcattgtcggtctatcatgattatcgtttgagtctagcacattcactggcgagtctggctgatattattcgtgatgaactttggtatatacgagtttcactctgtcaagtttaaacagctcggatctcttcgattgcactccgatatcgacaactccagagatgtgaaatacattgacctggaatcgcttggatagaggatatgactgtattttaacctctacagggttggttggattctcaggagtgcaactcgattccaatcagactatacaggtaactattacaggtgtcgacaatctaaattatcggtgaattcttaatacgtgagtaatttcgttccctataactatcaatggcatagacaatacgcccccatatatcgtacttggtgactatcaatggactggtgctttaaacggatttaatacgacgtgagctggtccatcattttctagcgaacaaagatctggtcgggagtattggacaaaagatgatacagaaatccatcttacatgaagtgagattattatcatgaccaatgtcgttggattctctggcacagatttgaatgtatacataagctgaggtaatggatacagcggtatcaatcaaaccttgatttttactggtaacatgactggattcgttacgttccaagatattccgatggagggcatggatccaaattatggtcagacctacgccacaggatgaactaattatacctatgacttcaatatagatgtgtttcggatagatagaatcactacagaaataacctgaagtctggcatatacgggagaaaacggccagcttcatcgtgcaacattgactttgacgggtttcgctacgggaaacgctgatagcataatggatgatgaatttattatctacgcatacagcggcgtaggcggttcaagcaatacgcctaatgtgacctacacaggatgatatgattcatgagcttatagtctgtatcacaccaatatcgttttcaatgataaccggactggatatgtattttacagagatagggcagataatacntgagagntntangtgaatgtgacnggaatnnanntggctgcgacatataccatcatagccgtacctnnnaancgtgnngatntgagntcttnnnnatnntcaantnnatnnnnnatnnnannnttnantttnntnnncngcnataattcttctgattgattccttcaacgaagttgagatgtcgtattctcatgacttataaagactagttcgactggcatatacacgtttgattatggcttcgctagtggcacgtatgcgttgattttcgaatctcaaagtcatgtcagcaccgttcgtacgtgacttgttattaccggggcaagaatattcaatgtaactcaaacatgagatatggtgtgagatgccgccatatgagcgtctagattgatagcatgagatctgctattgtttcagattggtcaatcaactctgacaactaactctgtaaaggatggtgaagttaatgcatcagatatatgagctattttgacttgggttcagatgacgtgatgatatcaaatatattctggcggatttcatgtatggacaggtactgagttagtcactgcagatcctttgagtggcagattgccttttgtccagtatcatccatgagatgttaacgcggatggagatattaagagtactgatatagctataatcaatgcaaatcttgataatagatcagtgagaactagggcaaatactacattctttgatatattcgattagttttaacaaataaatactattacgtatgttcaccattgatgtcaaaaaaagtatattatgattgattgtgctatgcacatgantttttatgatgccaacttttgcggcaaagataatcgtacagccagttcaagagactcttta

SEQ ID NO: 474 - DNA, 4000 bp, Escherichia coli
  misc_feature (326)..(326): n is a, c, g, or t
  misc_feature (332)..(332): n is a, c, g, or t
  misc_feature (473)..(473): n is a, c, g, or t
  misc_feature (581)..(581): n is a, c, g, or t
  misc_feature (653)..(653): n is a, c, g, or t
  misc_feature (662)..(662): n is a, c, g, or t
  misc_feature (841)..(841): n is a, c, g, or t
ccagggcgatcgcagcgatggcgacggtgaggctgatggccactaccccgccgtcgaggtggatcgtataggcttctccgtcgctcgatatgaaatcgccgaagggaatgaatcccgcgacgcaggtgatcacggccaggacgacgagaggaacggtcatcgtggccggagcttcgtgcggcgtgtgatgtgcatgcagttccttgttctccttgccccagaagataccgtagtagagccggaacatatagaaggccgtcagtcctgcgatacccgtcatcacccagcccatcagaggactgaatgcgaagcaggcggtcaggatntcgtcnttggagaagaaaccgctcaacggccagataccggcgatggccagacaggcgacgaggaaggtgatgtgcgtgacgggcatgtatttgcgcatgccgcccatcgccgacatctcgttggagtgtaccgcgtggatgatgcanccggcgcagaggaacagcagcgccttgaacatggcgtgggtgaagaggtggaacatcgaagccatgtaacccagtccgcccgtgtggggatcggatgaggtgcagacncccagcgccacgagcataaaaccgatctgcgagatcgtactgaacgcgagcacgcgcttgatgtcgctctgnacgcaggcnacgaccgccgcatagagcgcggtgaaagcgccgatgtaggcaacccagtgaagcacgtccggagcatagccgatgtagagcgggaacatgcgggcgaccagatagacgcccgcgacgaccatcgtcgccgcatgaatcagggccgatacgggggtcggaccctccatggcgtccggcanccagatatggagcgggaacatggcgctcttgcccgctccgccgatgaacataagtccgagggccagcgggatcattgtcccggcggcggccagcagttgtgcgtcgggcgtgaaggagaatgtcccggcataatagccgtagaagaggatgccgatgaggaagcccagatcggcgaagcgggtgacgatgaaggctttcttcgatgccgcgatcgcttcgggcttggtgtagtagaagccgatcagcaggtaggagctcacgcccaccagctcccaaaacagatacatctggaagatgttggtggcgaccaccagtcccagcatactcatcgtgaagagcgacaggaaggcgtaataacgctggaagccccgctcccctttcatgtagccgaacgaatagatatggaccatgagcgacacggtcgagatgacgacgagcatcatcaccgagatcggatcgagcaggatgcccatatcgatatgcagcgtctggctgatcgggagccaaacggcgttgtagggcatcagcgtcgggaaaatgccctccgcgttacgcccggcgccgaaatagagaatggccgtgaggtagctcaacacggtgaccgcacccagcacgaccgtaccgatggcgcccgccgctcccggtttgagtttggtgccggccagtccgagtaccaggaaactcaacagcggcaatacgagaattagaatggtaaaatccatagtcgatgcgttttaatccgttaccatttgagtttcttcaaatctttgacctggatgtggcgcaggttgcggtagatgttgatgatgatggcgatagccacggccgtttccgcagcgctgatgccgatggcgaacagggcgaagaagaagccctccaactgacccggaaacaggaaacggttgaataccacgaaattgatatctaccgaattgaggatcagttccaccgagatcagcatcgccagcaggttgcggcgcgtgacgaacccgtagattcccacgaacatcatgatcgtcgaaacgatcaggtaatactccatgtgtatcatagcagtaatttgttttgtacactttccatcgaccgcatcgctttgccgcagccttcatgcacgacgtttcgctgtttcctcgccccctgcccggctcctccgccggaggagccgttatacggtaaaatggacgaatgcggccggtctctcttttttactctttctggtacctttttattatcgtttgcgggcgatcaggataccgccgacgatgcaggccagcagcaataaactgatgacttcgaacggcagcaggtagccctgtttttcgggactcatcaacgcgaatccgatctcccggacggccagttcaccgtgctcgaagtgttccggcaggaactggtggcgcagggtgacgaacaggcagatcgccagtcctgcgagggttgccaggatgcccacgacgaatttgtagccgcgcagtttttcggccttgtctccctcggaagaggtcagcaggatcgaaaagacgtatagaaccgtgataccgcccgcatagataagcagctggacggcacccaggaacgaatagttgagctggaaatagatgcctgccgtgccgaagaggacgaacagcaggaacgtcgccgcacgcaggatgcgtttggtggttacggccagtacggcgctcgccagcgtgaagacggccagcacggtaaagacgatcaggtcgagtgttatctccatgacgttatttgttcagggtttttactaatttgtcgcgggtatagaccgcgtgttcgaaagccgtgtcgaaacggatcgcgtcgtgcggacaggcgttcacgcacaggtggcagaacatacaggctcccaggtcgtattcgtatttgaccagacgacgccggggcttgcccgtctcttcgtccgtgacggtttcggtggtgatctttatcgtaccgttcggacaggctgcctggcagagtccgcaggcgacgcacttgtttttgccctcggcgtcgtggggcatcgtgagcgttccgcagaagcgttcgttcattttgagcgtcgcccggttttcgggatactgctccgtgattttcggggtgacgaactctttgcccgttaccttgaggcccgtgagcagggtgcggatgccgtgaaagagtccttggatataatttgccatacttaaaaatgcagtttgaatacgacgatgacgaccatcagcagcagattgaccagcccgatcggtaccaggtatttccactccagcgtcagaatctggtccacgcgcaggcgcgggaaggtccatttgatccacatcagcagccagatgacgaagagcgtcttgccgaagaaccagacgaagcccggaatgtagtccatgacggtattgaaaccctcccagccggagatgtgcaacggcatccagccgccgaggaagatcgtggaggctacacccgcgatgatgaacagattgacgaattcggccacgtagaacagaccgaaatgcatacccgaatactcggtgtggtaaccggccgtcagctccgattcggcttcgggaaggtcgaacggcccccggttcacctcggcgttgccggcgatcagataaatcacgaaagcgatcatggccgggatgtgccccttgaagatgaaccagccgtcggcctgtcgggcgacgatctcggagaactgcatcgtatcggtcagtacgatgatcgtgaggatcgagagtccgatcgaaagctcatatgaaatcatctgcgcaccgcttcgcatggcgccgatgagcgagtacttgttgttgctgctccaccctgccagcaggatgcccacgataccgatcgacgaggcggccatcatgaagaagacgcccacgttgaagtccaaaatctccatacccttattgaaaggcaggcaggagaacgccagtaccgaggcgaggatgacgatgtacggtgcgaggttgtagaggaacttgtccgagcgccggatcgtgatgatctccttggtgagcattttgaatacgtcggcgaagacctggagagtaccccagggcccgacgcgcatgggacccagacggcattggaacgcagcgcagaccttgcgttccatgaagatcatcaggatcgccaccactacgtacatcaacaggatgcag

SEQ ID NO: 475 - DNA, 4000 bp, Escherichia coli
  misc_feature (7)..(9): n is a, c, g, or t
  misc_feature (12)..(12): n is a, c, g, or t
  misc_feature (14)..(14): n is a, c, g, or t
  misc_feature (21)..(28): n is a, c, g, or t
  misc_feature (30)..(31): n is a, c, g, or t
  misc_feature (34)..(35): n is a, c, g, or t
  misc_feature (60)..(60): n is a, c, g, or t
  misc_feature (466)..(466): n is a, c, g, or t
  misc_feature (538)..(538): n is a, c, g, or t
  misc_feature (788)..(788): n is a, c, g, or t
  misc_feature (800)..(800): n is a, c, g, or t
  misc_feature (1080)..(1080): n is a, c, g, or t
  misc_feature (1491)..(1491): n is a, c, g, or t
  misc_feature (1680)..(1680): n is a, c, g, or t
  misc_feature (1754)..(1754): n is a, c, g, or t
  misc_feature (1992)..(1992): n is a, c, g, or t
  misc_feature (2039)..(2039): n is a, c, g, or t
  misc_feature (3482)..(3482): n is a, c, g, or t
  misc_feature (3484)..(3489): n is a, c, g, or t
  misc_feature (3492)..(3498): n is a, c, g, or t
  misc_feature (3500)..(3502): n is a, c, g, or t
  misc_feature (3504)..(3505): n is a, c, g, or t
  misc_feature (3510)..(3514): n is a, c, g, or t
  misc_feature (3516)..(3523): n is a, c, g, or t
  misc_feature (3529)..(3531): n is a, c, g, or t
  misc_feature (3533)..(3536): n is a, c, g, or t
  misc_feature (3539)..(3542): n is a, c, g, or t
  misc_feature (3544)..(3545): n is a, c, g, or t
  misc_feature (3549)..(3555): n is a, c, g, or t
  misc_feature (3557)..(3558): n is a, c, g, or t
  misc_feature (3560)..(3561): n is a, c, g, or t
  misc_feature (3565)..(3569): n is a, c, g, or t
  misc_feature (3575)..(3585): n is a, c, g, or t
  misc_feature (3587)..(3593): n is a, c, g, or t
  misc_feature (3595)..(3595): n is a, c, g, or t
  misc_feature (3597)..(3600): n is a, c, g, or t
  misc_feature (3604)..(3604): n is a, c, g, or t
  misc_feature (3607)..(3608): n is a, c, g, or t
  misc_feature (3615)..(3616): n is a, c, g, or t
  misc_feature (3619)..(3620): n is a, c, g, or t
  misc_feature (3622)..(3623): n is a, c, g, or t
  misc_feature (3626)..(3626): n is a, c, g, or t
  misc_feature (3628)..(3630): n is a, c, g, or t
  misc_feature (3632)..(3632): n is a, c, g, or t
  misc_feature (3634)..(3634): n is a, c, g, or t
  misc_feature (3640)..(3641): n is a, c, g, or t
  misc_feature (3644)..(3647): n is a, c, g, or t
  misc_feature (3651)..(3652): n is a, c, g, or t
  misc_feature (3656)..(3656): n is a, c, g, or t
  misc_feature (3659)..(3660): n is a, c, g, or t
  misc_feature (3663)..(3664): n is a, c, g, or t
  misc_feature (3667)..(3667): n is a, c, g, or t
  misc_feature (3670)..(3670): n is a, c, g, or t
  misc_feature (3672)..(3672): n is a, c, g, or t
  misc_feature (3675)..(3675): n is a, c, g, or t
  misc_feature (3677)..(3677): n is a, c, g, or t
  misc_feature (3682)..(3682): n is a, c, g, or t
  misc_feature (3684)..(3684): n is a, c, g, or t
  misc_feature (3686)..(3686): n is a, c, g, or t
  misc_feature (3689)..(3689): n is a, c, g, or t
  misc_feature (3691)..(3692): n is a, c, g, or t
  misc_feature (3699)..(3699): n is a, c, g, or t
  misc_feature (3707)..(3707): n is a, c, g, or t
  misc_feature (3716)..(3716): n is a, c, g, or t
  misc_feature (3718)..(3718): n is a, c, g, or t
  misc_feature (3720)..(3720): n is a, c, g, or t
  misc_feature (3723)..(3725): n is a, c, g, or t
  misc_feature (3728)..(3728): n is a, c, g, or t
  misc_feature (3730)..(3731): n is a, c, g, or t
  misc_feature (3736)..(3737): n is a, c, g, or t
  misc_feature (3739)..(3739): n is a, c, g, or t
  misc_feature (3741)..(3741): n is a, c, g, or t
  misc_feature (3747)..(3747): n is a, c, g, or t
  misc_feature (3749)..(3750): n is a, c, g, or t
  misc_feature (3753)..(3753): n is a, c, g, or t
  misc_feature (3755)..(3757): n is a, c, g, or t
  misc_feature (3761)..(3762): n is a, c, g, or t
  misc_feature (3766)..(3766): n is a, c, g, or t
  misc_feature (3768)..(3769): n is a, c, g, or t
  misc_feature (3776)..(3776): n is a, c, g, or t
  misc_feature (3779)..(3782): n is a, c, g, or t
  misc_feature (3786)..(3787): n is a, c, g, or t
  misc_feature (3791)..(3792): n is a, c, g, or t
  misc_feature (3794)..(3794): n is a, c, g, or t
  misc_feature (3797)..(3797): n is a, c, g, or t
  misc_feature (3799)..(3799): n is a, c, g, or t
  misc_feature (3801)..(3801): n is a, c, g, or t
  misc_feature (3804)..(3804): n is a, c, g, or t
  misc_feature (3806)..(3807): n is a, c, g, or t
  misc_feature (3810)..(3811): n is a, c, g, or t
  misc_feature (3815)..(3818): n is a, c, g, or t
  misc_feature (3820)..(3820): n is a, c, g, or t
  misc_feature (3827)..(3827): n is a, c, g, or t
  misc_feature (3830)..(3830): n is a, c, g, or t
  misc_feature (3832)..(3834): n is a, c, g, or t
  misc_feature (3838)..(3838): n is a, c, g, or t
  misc_feature (3842)..(3843): n is a, c, g, or t
  misc_feature (3846)..(3846): n is a, c, g, or t
  misc_feature (3848)..(3849): n is a, c, g, or t
  misc_feature (3853)..(3853): n is a, c, g, or t
  misc_feature (3863)..(3863): n is a, c, g, or t
  misc_feature (3870)..(3870): n is a, c, g, or t
  misc_feature (3873)..(3873): n is a, c, g, or t
  misc_feature (3875)..(3875): n is a, c, g, or t
  misc_feature (3877)..(3878): n is a, c, g, or t
  misc_feature (3892)..(3892): n is a, c, g, or t
  misc_feature (3987)..(3988): n is a, c, g, or t
  misc_feature (3996)..(3997): n is a, c, g, or t
caacccnnntcntnaccatgnnnnnnnnanntgnncaacaaccagaaccagaaccaacanaaccagtactagaatcagtactagaatcaatactagaaccaacagaacaggaacagttccaaaagccagacgcctttatcacacaaacacagtgtcctattgggacaacactagttgacggagaatgcattccaatacgtgtttccatcattatcctactgatcatcctgcttgtcggactggcaatgctgttaccaggattgaagatactcagaagacgtgcagagttactggagcaactagagattaccagacgaccagtagaagagatccccgaagaattacagaagccaccaaggattgaaattcctgaaccagagattgagattcctgaaccagaaatcgagatagatgacatcgaacagctggttaactcactccaagaacagactataatacaggagcngatccgcagaatggaattacagctgcttgagctaacacaagaaaaacgaaccatacaaaggaacctaaccgnacttcttgagcaagtataccaggaggtaagaccaaaggtcctaccacagctaccagaacagctcttagcactacctgctccaaagagaaagtacacaaagaaaaaacgcacgttaacagacgagcacaaggcaaagattgcagcagccaagcgtggacgcaaactaacaccgcaaaccaaagaaaagatctcaactgtaaagaaaggtaggaagatgtcagacgagcacaaggcaaagattgcagctgcnaagcgtggaagnaagatgtcagacgagcacaaggcaaagattgcagctgcacatactggaatcaaacacacatcacaaacgaaacaaaagatgtcagagtccaaaaaacagaacaaactggatcaaaagaaaaagaaagccaagctggatgatcttaagcgacgctatgacatcttaagccaaggagaaaatgacgagacaacgtagaattgttacatgatggtcacagtattttctgtttcactattgattccaagtatggattttacatactaggaaaagattagttganctaattcgtacctaaacattagtctattgtcatattttgccatataatctagcatttttactcagtgattctcgagactaatcatatttttggaccacttgatttatttttaccataaattgtaaattgagctaaattgattacattatatgaaggcaatcatcattgcaatattgatagcatgttcttttagtacaattttttatgcaaatgcagaatctgtagaagagttacacgatgcagcataccaattcatgaaatctgaaaatttttcagatgcaattgatacttatagtaaaattttagagttacaacctaaagatgaacaagctctgttaaatcgagcaattgcatatactcaagtagacagatttgatcaagccctttgggatcttgattcttttttaatgntaaatcctaataacaagaaagcattgaatggaaaggcgtttattttagaaaaacttgattgtatatcttacaaaaaatgtggcccattagagtcactaagaattttggaagaattgttagaaagtgatccaaccaacaatgaacttgagaatcaacgaaattttgtactaacaaaggttccttcttttnacgtaagagccactgatggcgattatcttgtaagatttcagcagattttgaaggattcagaaggttcgttagtnagtgttatcgatggagtcggttcagaagtcattccaacaagattacttgatgaatatttagacgagaaaaaggatacagtagatatttttgaaaaagagattgttagtattgaaggcgaacaatacgtaaaatggcgttatgagatttctggaattgaaaatgaaggatctttttatggaaagtgggaaataatcacacaaataacagttgaagatgttgaagaacaaaaaacagagntcgaattagaattggcacgtggattaactccagcaattgttacaganaaaggagatcattatttaatcattgttgagattttaaagaagatttagaggttttgaatattactaaacctacagagattgaaaagaaaaccagcaatggaacaaacctgtatggcaaaattacataaaattcagttgcaaaagctaccaatggtcctgccaataacaaccctgttatgaaaaacagcagagaatccgcttgtttgagaccattacgtgcaataaaaaatagaccaaatgtcacaggcaaaattgtagccagtaaaaagtaatcaaatctcatttgagatgaaaagtctgacaagctgtttgcaaatctgttgaaatcaaattgtacaatatcatcatagattgaatttccagcataaaacaatcctattacaataagagcagatagcaaataggaaagtaggattttggttttaaatgaacgagtatgctcagaccttaatgcataaaatacatttagagccaagaacggagttgcgaatgcctttgtaaagacagacaaaatataccagaatccagatagataccaccttttatgaatggcataaacagacaaaaggaaaaacaagacccagagattttcatagactgcaattgtatcatactcgagaaatgtgtatccttgcaacaatacaataattgcaattattcctgcaattcttttacctgaaattgaaacggcaactagcccagttactaataccaggacaatgcttgtaacaaagggaatgattttgatattttgaagatactcttgagagaatccaagcaatatcattctaacgaatctactattttgttcatcaacaatcatgtcacctgaactagtttcaggaaatgtctctagtccaatttttaaaaccacataatctggaaattgttctgattcatcgatactaagttcagagactgtgaaagagatgtaaacgattaatattatcagactagcaattattgaaaccttttttgaaatctcaaagtttcttaccttgtcaattaacgtagaaaatgtacctgattttttcttatagtatacgtatccaagtgagaacaagacggtgttactggcaatcagcaatacagcattgtttccaatcgtaaatggttcaatgcccgtgctgatacttccataatgtgatgaaatcagggcaggaaaaatcaccgatatcagactaatgctaaccatgatcactgcaaaggcaaatacaatgtgagttactataatgtcgtttcttgttatcttgatcaattgcagtactcaattcatataatttctgggacttattaaatggaaaaagtatggaaatacattcctaaaatgcagtaaagactagcaaataatacaaaatttcagtaataataaaaatgggaatcaaatgaattcgaaatcacgaaattctgagagtgttggttattcctctttctatcccattnannnnnnttnnnnnnntnnnannaaaannnnncnnnnnnnntttttnnntnnnnttnnnnannaaannnnnnnanncnntttnnnnnaaaaannnnnnnnnnntnnnnnnncnannnnccantanntaaaacnnttnnannggnannnancntttttnncannnncttnncttnggnnttnnaanccnantcnangattnantncgntnnggccaanaacttttntattttttngntnttnnnaancnntattnncntnatctanannatnannntttnnaatnannggttttntgnnnncgcnnttanncnaancnanaantnnaannatannnntntaatttncantnnntgcncccnntantnntatngcttttaatnggattgngancnanngtaaatctaccgcnccgccaaataaaccaacgagaacaatattacctcgtttcctaataacagaaagatccaacttgaaagtaggaggtgcattaacaaaatcaattannctatctgnncct

SEQ ID NO: 476 - DNA, 4000 bp, Escherichia coli
  misc_feature (1)..(111): n is a, c, g, or t
  misc_feature (113)..(120): n is a, c, g, or t
  misc_feature (122)..(152): n is a, c, g, or t
  misc_feature (154)..(155): n is a, c, g, or t
  misc_feature (157)..(173): n is a, c, g, or t
  misc_feature (175)..(179): n is a, c, g, or t
  misc_feature (181)..(187): n is a, c, g, or t
  misc_feature (189)..(239): n is a, c, g, or t
  misc_feature (242)..(243): n is a, c, g, or t
  misc_feature (246)..(254): n is a, c, g, or t
  misc_feature (256)..(279): n is a, c, g, or t
  misc_feature (281)..(281): n is a, c, g, or t
  misc_feature (283)..(310): n is a, c, g, or t
  misc_feature (313)..(314): n is a, c, g, or t
  misc_feature (316)..(316): n is a, c, g, or t
  misc_feature (318)..(318): n is a, c, g, or t
  misc_feature (320)..(325): n is a, c, g, or t
  misc_feature (327)..(331): n is a, c, g, or t
  misc_feature (333)..(337): n is a, c, g, or t
  misc_feature (339)..(345): n is a, c, g, or t
  misc_feature (348)..(351): n is a, c, g, or t
  misc_feature (353)..(361): n is a, c, g, or t
  misc_feature (363)..(372): n is a, c, g, or t
  misc_feature (374)..(377): n is a, c, g, or t
  misc_feature (379)..(382): n is a, c, g, or t
  misc_feature (385)..(385): n is a, c, g, or t
  misc_feature (387)..(393): n is a, c, g, or t
  misc_feature (396)..(399): n is a, c, g, or t
  misc_feature (401)..(407): n is a, c, g, or t
  misc_feature (409)..(411): n is a, c, g, or t
  misc_feature (414)..(415): n is a, c, g, or t
  misc_feature (417)..(422): n is a, c, g, or t
  misc_feature (424)..(426): n is a, c, g, or t
  misc_feature (428)..(428): n is a, c, g, or t
  misc_feature (430)..(432): n is a, c, g, or t
  misc_feature (434)..(455): n is a, c, g, or t
  misc_feature (457)..(460): n is a, c, g, or t
  misc_feature (462)..(467): n is a, c, g, or t
  misc_feature (469)..(476): n is a, c, g, or t
  misc_feature (478)..(479): n is a, c, g, or t
  misc_feature (481)..(488): n is a, c, g, or t
  misc_feature (490)..(498): n is a, c, g, or t
  misc_feature (500)..(501): n is a, c, g, or t
  misc_feature (503)..(517): n is a, c, g, or t
  misc_feature (519)..(520): n is a, c, g, or t
  misc_feature (522)..(522): n is a, c, g, or t
  misc_feature (524)..(529): n is a, c, g, or t
  misc_feature (533)..(535): n is a, c, g, or t
  misc_feature (537)..(545): n is a, c, g, or t
  misc_feature (547)..(554): n is a, c, g, or t
  misc_feature (556)..(569): n is a, c, g, or t
  misc_feature (572)..(572): n is a, c, g, or t
  misc_feature (574)..(608): n is a, c, g, or t
  misc_feature (610)..(610): n is a, c, g, or t
  misc_feature (612)..(613): n is a, c, g, or t
  misc_feature (615)..(621): n is a, c, g, or t
  misc_feature (623)..(627): n is a, c, g, or t
  misc_feature (629)..(629): n is a, c, g, or t
  misc_feature (631)..(632): n is a, c, g, or t
  misc_feature (634)..(636): n is a, c, g, or t
  misc_feature (638)..(642): n is a, c, g, or t
  misc_feature (644)..(647): n is a, c, g, or t
  misc_feature (649)..(649): n is a, c, g, or t
  misc_feature (652)..(652): n is a, c, g, or t
  misc_feature (654)..(659): n is a, c, g, or t
  misc_feature (661)..(661): n is a, c, g, or t
  misc_feature (663)..(665): n is a, c, g, or t
  misc_feature (667)..(671): n is a, c, g, or t
  misc_feature (673)..(674): n is a, c, g, or t
  misc_feature (676)..(683): n is a, c, g, or t
  misc_feature (686)..(687): n is a, c, g, or t
  misc_feature (689)..(690): n is a, c, g, or t
  misc_feature (692)..(696): n is a, c, g, or t
  misc_feature (698)..(700): n is a, c, g, or t
  misc_feature (702)..(709): n is a, c, g, or t
  misc_feature (711)..(712): n is a, c, g, or t
  misc_feature (715)..(715): n is a, c, g, or t
  misc_feature (717)..(719): n is a, c, g, or t
  misc_feature (721)..(724): n is a, c, g, or t
  misc_feature (726)..(732): n is a, c, g, or t
  misc_feature (734)..(736): n is a, c, g, or t
  misc_feature (738)..(740): n is a, c, g, or t
  misc_feature (742)..(750): n is a, c, g, or t
  misc_feature (752)..(762): n is a, c, g, or t
  misc_feature (764)..(767): n is a, c, g, or t
  misc_feature (769)..(784): n is a, c, g, or t
  misc_feature (786)..(787): n is a, c, g, or t
  misc_feature (789)..(793): n is a, c, g, or t
  misc_feature (795)..(795): n is a, c, g, or t
  misc_feature (797)..(799): n is a, c, g, or t
  misc_feature (801)..(802): n is a, c, g, or t
  misc_feature (804)..(804): n is a, c, g, or t
  misc_feature (806)..(811): n is a, c, g, or t
  misc_feature (813)..(814): n is a, c, g, or t
  misc_feature (816)..(816): n is a, c, g, or t
  misc_feature (818)..(820): n is a, c, g, or t
  misc_feature (822)..(825): n is a, c, g, or t
  misc_feature (828)..(828): n is a, c, g, or t
  misc_feature (830)..(833): n is a, c, g, or t
  misc_feature (835)..(835): n is a, c, g, or t
  misc_feature (838)..(838): n is a, c, g, or t
  misc_feature (840)..(840): n is a, c, g, or t
  misc_feature (842)..(844): n is a, c, g, or t
  misc_feature (846)..(848): n is a, c, g, or t
  misc_feature (850)..(861): n is a, c, g, or t
  misc_feature (863)..(864): n is a, c, g, or t
  misc_feature (867)..(868): n is a, c, g, or t
  misc_feature (870)..(873): n is a, c, g, or t
  misc_feature (875)..(876): n is a, c, g, or t
  misc_feature (878)..(878): n is a, c, g, or t
  misc_feature (881)..(883): n is a, c, g, or t
  misc_feature (885)..(891): n is a, c, g, or t
  misc_feature (893)..(894): n is a, c, g, or t
  misc_feature (896)..(896): n is a, c, g, or t
  misc_feature (898)..(898): n is a, c, g, or t
  misc_feature (900)..(900): n is a, c, g, or t
  misc_feature (902)..(906): n is a, c, g, or t
  misc_feature (908)..(908): n is a, c, g, or t
  misc_feature (910)..(910): n is a, c, g, or t
  misc_feature (912)..(915): n is a, c, g, or t
  misc_feature (917)..(917): n is a, c, g, or t
  misc_feature (921)..(926): n is a, c, g, or t
  misc_feature (928)..(930): n is a, c, g, or t
  misc_feature (933)..(933): n is a, c, g, or t
  misc_feature (936)..(943): n is a, c, g, or t
  misc_feature (945)..(947): n is a, c, g, or t
  misc_feature (950)..(950): n is a, c, g, or t
  misc_feature (952)..(952): n is a, c, g, or t
  misc_feature (954)..(954): n is a, c, g, or t
  misc_feature (956)..(957): n is a, c, g, or t
  misc_feature (959)..(959): n is a, c, g, or t
  misc_feature (962)..(966): n is a, c, g, or t
  misc_feature (968)..(971): n is a, c, g, or t
  misc_feature (973)..(973): n is a, c, g, or t
  misc_feature (975)..(979): n is a, c, g, or t
  misc_feature (981)..(993): n is a, c, g, or t
  misc_feature (996)..(1003): n is a, c, g, or t
  misc_feature (1005)..(1005): n is a, c, g, or t
  misc_feature (1007)..(1008): n is a, c, g, or t
  misc_feature (1010)..(1010): n is a, c, g, or t
  misc_feature (1012)..(1012): n is a, c, g, or t
  misc_feature (1015)..(1022): n is a, c, g, or t
  misc_feature (1024)..(1024): n is a, c, g, or t
  misc_feature (1028)..(1029): n is a, c, g, or t
  misc_feature (1032)..(1033): n is a, c, g, or t
  misc_feature (1036)..(1036): n is a, c, g, or t
  misc_feature (1038)..(1039): n is a, c, g, or t
  misc_feature (1043)..(1045): n is a, c, g, or t
  misc_feature (1048)..(1049): n is a, c, g, or t
  misc_feature (1052)..(1053): n is a, c, g, or t
  misc_feature (1055)..(1055): n is a, c, g, or t
  misc_feature (1057)..(1058): n is a, c, g, or t
  misc_feature (1060)..(1062): n is a, c, g, or t
  misc_feature (1065)..(1066): n is a, c, g, or t
  misc_feature (1071)..(1071): n is a, c, g, or t
  misc_feature (1073)..(1075): n is a, c, g, or t
  misc_feature (1077)..(1078): n is a, c, g, or t
  misc_feature (1080)..(1080): n is a, c, g, or t
  misc_feature (1083)..(1083): n is a, c, g, or t
  misc_feature (1087)..(1091): n is a, c, g, or t
  misc_feature (1097)..(1102): n is a, c, g, or t
  misc_feature (1105)..(1119): n is a, c, g, or t
  misc_feature (1121)..(1123): n is a, c, g, or t
  misc_feature (1125)..(1127): n is a, c, g, or t
  misc_feature (1131)..(1139): n is a, c, g, or t
  misc_feature (1143)..(1148): n is a, c, g, or t
  misc_feature (1150)..(1152): n is a, c, g, or t
  misc_feature (1154)..(1154): n is a, c, g, or t
  misc_feature (1156)..(1157): n is a, c, g, or t
  misc_feature (1159)..(1159): n is a, c, g, or t
  misc_feature (1161)..(1173): n is a, c, g, or t
  misc_feature (1177)..(1178): n is a, c, g, or t
  misc_feature (1181)..(1181): n is a, c, g, or t
  misc_feature (1183)..(1183): n is a, c, g, or t
  misc_feature (1185)..(1189): n is a, c, g, or t
  misc_feature (1192)..(1192): n is a, c, g, or t
  misc_feature (1195)..(1200): n is a, c, g, or t
  misc_feature (1202)..(1202): n is a, c, g, or t
  misc_feature (1204)..(1204): n is a, c, g, or t
  misc_feature (1206)..(1210): n is a, c, g, or t
  misc_feature (1212)..(1213): n is a, c, g, or t
  misc_feature (1215)..(1215): n is a, c, g, or t
  misc_feature (1217)..(1218): n is a, c, g, or t
  misc_feature (1220)..(1224): n is a, c, g, or t
  misc_feature (1226)..(1226): n is a, c, g, or t
  misc_feature (1228)..(1230): n is a, c, g, or t
  misc_feature (1234)..(1236): n is a, c, g, or t
  misc_feature (1239)..(1241): n is a, c, g, or t
  misc_feature (1244)..(1247): n is a, c, g, or t
  misc_feature (1249)..(1249): n is a, c, g, or t
  misc_feature (1260)..(1263): n is a, c, g, or t
  misc_feature (1265)..(1267): n is a, c, g, or t
  misc_feature (1273)..(1273): n is a, c, g, or t
  misc_feature (1275)..(1275): n is a, c, g, or t
  misc_feature (1277)..(1280): n is a, c, g, or t
  misc_feature (1283)..(1286): n is a, c, g, or t
  misc_feature (1288)..(1290): n is a, c, g, or t
  misc_feature (1292)..(1295): n is a, c, g, or t
  misc_feature (1297)..(1301): n is a, c, g, or t
  misc_feature (1306)..(1306): n is a, c, g, or t
  misc_feature (1309)..(1312): n is a, c, g, or t
  misc_feature (1314)..(1317): n is a, c, g, or t
  misc_feature (1319)..(1324): n is a, c, g, or t
  misc_feature (1329)..(1332): n is a, c, g, or t
  misc_feature (1334)..(1334): n is a, c, g, or t
  misc_feature (1336)..(1336): n is a, c, g, or t
  misc_feature (1338)..(1338): n is a, c, g, or t
  misc_feature (1343)..(1349): n is a, c, g, or t
  misc_feature (1351)..(1360): n is a, c, g, or t
  misc_feature (1363)..(1369): n is a, c, g, or t
  misc_feature (1371)..(1373): n is a, c, g, or t
  misc_feature (1376)..(1379): n is a, c, g, or t
  misc_feature (1381)..(1381): n is a, c, g, or t
  misc_feature (1384)..(1389): n is a, c, g, or t
  misc_feature (1391)..(1393): n is a, c, g, or t
  misc_feature (1395)..(1411): n is a, c, g, or t
  misc_feature (1413)..(1414): n is a, c, g, or t
  misc_feature (1416)..(1416): n is a, c, g, or t
  misc_feature (1419)..(1425): n is a, c, g, or t
  misc_feature (1428)..(1433): n is a, c, g, or t
  misc_feature (1435)..(1440): n is a, c, g, or t
  misc_feature (1442)..(1442): n is a, c, g, or t
  misc_feature (1444)..(1456): n is a, c, g, or t
  misc_feature (1458)..(1459): n is a, c, g, or t
  misc_feature (1461)..(1463): n is a, c, g, or t
  misc_feature (1465)..(1479): n is a, c, g, or t
  misc_feature (1482)..(1500): n is a, c, g, or t
  misc_feature (1503)..(1503): n is a, c, g, or t
  misc_feature (1505)..(1507): n is a, c, g, or t
  misc_feature (1509)..(1509): n is a, c, g, or t
  misc_feature (1511)..(1513): n is a, c, g, or t
  misc_feature (1516)..(1516): n is a, c, g, or t
  misc_feature (1518)..(1524): n is a, c, g, or t
  misc_feature (1526)..(1526): n is a, c, g, or t
  misc_feature (1528)..(1544): n is a, c, g, or t
  misc_feature (1550)..(1553): n is a, c, g, or t
  misc_feature (1555)..(1556): n is a, c, g, or t
  misc_feature (1560)..(1561): n is a, c, g, or t
  misc_feature (1563)..(1564): n is a, c, g, or t
  misc_feature (1566)..(1566): n is a, c, g, or t
  misc_feature (1568)..(1571): n is a, c, g, or t
  misc_feature (1573)..(1573): n is a, c, g, or t
  misc_feature (1575)..(1576): n is a, c, g, or t
  misc_feature (1578)..(1579): n is a, c, g, or t
  misc_feature (1581)..(1581): n is a, c, g, or t
  misc_feature (1585)..(1586): n is a, c, g, or t
  misc_feature (1589)..(1589): n is a, c, g, or t
  misc_feature (1591)..(1591): n is a, c, g, or t
  misc_feature (1593)..(1593): n is a, c, g, or t
  misc_feature (1596)..(1597): n is a, c, g, or t
  misc_feature (1599)..(1605): n is a, c, g, or t
  misc_feature (1607)..(1607): n is a, c, g, or t
  misc_feature (1609)..(1610): n is a, c, g, or t
  misc_feature (1612)..(1612): n is a, c, g, or t
  misc_feature (1618)..(1618): n is a, c, g, or t
  misc_feature (1620)..(1620): n is a, c, g, or t
  misc_feature (1624)..(1625): n is a, c, g, or t
  misc_feature (1627)..(1630): n is a, c, g, or t
  misc_feature (1632)..(1634): n is a, c, g, or t
  misc_feature (1636)..(1636): n is a, c, g, or t
  misc_feature (1638)..(1638): n is a, c, g, or t
  misc_feature (1640)..(1640): n is a, c, g, or t
  misc_feature (1642)..(1643): n is a, c, g, or t
  misc_feature (1645)..(1648): n is a, c, g, or t
  misc_feature (1650)..(1651): n is a, c, g, or t
  misc_feature (1653)..(1655): n is a, c, g, or t
  misc_feature (1657)..(1657): n is a, c, g, or t
  misc_feature (1666)..(1666): n is a, c, g, or t
  misc_feature (1669)..(1671): n is a, c, g, or t
  misc_feature (1673)..(1673): n is a, c, g, or t
  misc_feature (1679)..(1681): n is a, c, g, or t
  misc_feature (1683)..(1684): n is a, c, g, or t
  misc_feature (1686)..(1686): n is a, c, g, or t
  misc_feature (1688)..(1689): n is a, c, g, or t
  misc_feature (1691)..(1695): n is a, c, g, or t
  misc_feature (1697)..(1697): n is a, c, g, or t
  misc_feature (1699)..(1699): n is a, c, g, or t
  misc_feature (1707)..(1707): n is a, c, g, or t
  misc_feature (1709)..(1711): n is a, c, g, or t
  misc_feature (1713)..(1716): n is a, c, g, or t
  misc_feature (1719)..(1719): n is a, c, g, or t
  misc_feature (1726)..(1729): n is a, c, g, or t
  misc_feature (1732)..(1737): n is a, c, g, or t
  misc_feature (1742)..(1742): n is a, c, g, or t
  misc_feature (1746)..(1748): n is a, c, g, or t
  misc_feature (1751)..(1752): n is a, c, g, or t
  misc_feature (1755)..(1755): n is a, c, g, or t
  misc_feature (1758)..(1758): n is a, c, g, or t
  misc_feature (1764)..(1764): n is a, c, g, or t
  misc_feature (1767)..(1774): n is a, c, g, or t
  misc_feature (1777)..(1778): n is a, c, g, or t
  misc_feature (1781)..(1783): n is a, c, g, or t
  misc_feature (1787)..(1787): n is a, c, g, or t
  misc_feature (1791)..(1791): n is a, c, g, or t
  misc_feature (1974)..(1974): n is a, c, g, or t
  misc_feature (1984)..(1984): n is a, c, g, or t
  misc_feature (2035)..(2035): n is a, c, g, or t
  misc_feature (2041)..(2041): n is a, c, g, or t
  misc_feature (3574)..(3576): n is a, c, g, or t
nnnnnnnnnnnnnnnnnnnnnnnnnnnnnnnnnnnnnnnnnnnnnnnnnnnnnnnnnnnnnnnnnnnnnnnnnnnnnnnnnnnnnnnnnnnnnnnnnnnnnnnnnnnnnnntnnnnnnnntnnnnnnnnnnnnnnnnnnnnnnnnnnnnnnntnntnnnnnnnnnnnnnnnnntnnnnntnnnnnnngnnnnnnnnnnnnnnnnnnnnnnnnnnnnnnnnnnnnnnnnnnnnnnnnnnntcnnccnnnnnnnnncnnnnnnnnnnnnnnnnnnnnnnnncnannnnnnnnnnnnnnnnnnnnnnnnnnnnttnncnantnnnnnnannnnnannnnngnnnnnnnagnnnntnnnnnnnnngnnnnnnnnnngnnnngnnnngtntnnnnnnnttnnnnannnnnnngnnntgnngnnnnnntnnngntnnntnnnnnnnnnnnnnnnnnnnnnngnnnncnnnnnntnnnnnnnntnngnnnnnnnngnnnnnnnnntnntnnnnnnnnnnnnnnnanngnannnnnngaannntnnnnnnnnntnnnnnnnntnnnnnnnnnnnnnnatntnnnnnnnnnnnnnnnnnnnnnnnnnnnnnnnnnnntngnntnnnnnnncnnnnngnannannngnnnnngnnnntnatngnnnnnngngnnngnnnnntnngnnnnnnnnttnntnntnnnnntnnngnnnnnnnntnnttntnnngnnnntnnnnnnngnnngnnnannnnnnnnntnnnnnnnnnnntnnnnannnnnnnnnnnnnnnngnngnnnnngngnnngnncntnnnnnntnngntnnncnnnnctngnnnntngtncncnnntnnncnnnnnnnnnnnntnnttnntnnnnanntngtnnntnnnnnnncnngntngntnnnnntngngnnnntnggannnnnngnnngtngannnnnnnnannnttntncntnntnttnnnnnannnntntnnnnngnnnnnnnnnnnnnccnnnnnnnncngnngngnttnnnnnnnntntggnnttnncgncnnagtnnncgnnggnntntnngnnnctnncttcntnnngnnantcntcgnnnnnttttcnnnnnnttnnnnnnnnnnnnnnncnnncnnnaaannnnnnnnngggnnnnnntnnntntnntntnnnnnnnnnnnnntttnngcncncnnnnnatnttnnnnnntngnannnnngnngnanngnnnnntnannntatnnnttnnnttnnnngnatttttaatcnnnntnnncgtcgntncnnnnctnnnntnnncnnnntnnnnngcgtngcnnnncnnnngnnnnnngggtnnnngnancnctccnnnnnnngnnnnnnnnnnccnnnnnnncnnngcnnnncnggnnnnnntnnngnnnnnnnnnnnnnnnnntnngngannnnnnnggnnnnnngnnnnnntntnnnnnnnnnnnnncnncnnncnnnnnnnnnnnnnnnccnnnnnnnnnnnnnnnnnnnacngnnngngnnnagngnnnnnnntntnnnnnnnnnnnnnnnnntttttnnnncnnctcnncnncncnnnncncnncnncnctcnnctntntnttnngnnnnnnnangnngnggaggngngtannannnncnnnananangnngnnnngnntnnntnttttttttntgnnntnttgtannncnncntnntnnnnngngngggggagngnnnannnngtnttttttnnnnttnnnnnnagggngggnnnaannttnttntttttnaannnnnnnnggnnttnnntttnaaanggggaaaataaaaaaggactgtaatttacagtccttgtgtagttgcgggagccggactcgaaccgacgacctttgggttatgagcccaacgagctaccactgctccaccccgcgatgtttgtgagtgcaaaggtatggataattttttaaatagcaaatattttgaagagaaatatatatagnttgttcttgnatttttgttaagttgttgaatgacagaaaattattttattgttaaaaatgnaaatancgtggtatgaaggaaaaacggggtgcatactttggtatttcatgataaaaatgtgtaatttcgcacaagttttgtacagatgtgcagatagatgaattaggattatggttcgtacacgagaattgcttatcgatgttgcccgtcagttgtttgcccgtcagggtgtggccgctacgacgatgaacgatatagccgaggcatcgggaaagggtcgccgtacgatttatacctatttcaagaataagaatgagatttattgggccgtcgtggaagccgaatcgaagcatttatacgctcggttggaggggcttacaaaccgggatttgcctcccgaagagaagttgctcaactatatcaatatccgtttggaggctgtgaaagaagctgtcgtgcgtaacgggacattgcgagcggagtttttcagggatatttggaaagtggagaaggcccggaggagtatagacttgcgagaagtggccttgttgcggagcatattgagcgagggcgtggagcaaggtgtatttcatattcctaatgtgacggctaccgcttcggtgcttcattatgcgcttcgggggctggacgtcccttatatccgcaataatttttcggaatcgggaatagaccgatcgagattgaaggattatatattggattttattttatacggaataaaacgatagaaatatgaaccaaagggacgaggcgcatgtcttgtccctgtattatgaaaaaaagagttatgaaattacttgaaggaaaagtcgctgtgattaccggcgcagcacggggcataggaaaggctatcgccctgaaattcgcttcggaaggagctgatatcgcatttacggatcttgttatcgacgagaacggtaaagctaccgaaaaagagattgccgcttttggcgtgagagccaaagggtatgcttcgaacgcagctaatttcgaagaggctcacaaggtggtggaagaaattgtaaaggatttcggccgtatcgatgttttggtgaataacgcaggtatcactcgtgacggtttgatgatgcgcatgacggagcagcaatgggatatggttcttaccgtgaacttgaaatcggcatttaattttatccatgccgtaactcctattatgatgaaacagaaatgcgggagtattataaatatggcttcggtcgtcggtgtatcgggtaatgccggacagtgtaattactcggcttcgaaagccggtatgataggtttggcgaagtccatcgccaaagagctgggctctcgcggcgtgcgtgccaatgctatcgctccgggttttatcattaccgatatgacagcggctctttcggacgaagtgaaagccgaatgggctaaacaaattcctttgcgtcgaggcggtacgcccgaagatgtggctaatgtagctactttccttgcctcggatttgtcgtcgtatgtaacgggacaggttatccactgctgcggcggtatgaatatgtaatcgggtctgcacgacaagatatatatagtacaggggctatatcnnnatgatatagcccctgtattgttcctatatttatttcccggcggcgtttaccgagccgctgttgatcgagttgttgattcgttgttgtccggcttcgtgtttccgtccccaattgatattccaacttatgtcgagagttaggagttgtttaatcatattggttgtcgtttctctgtaatatcccgcatagcggttccagttttcggattttactttgtaattgttgatgaagggatcgagaaccatgatcccgaagttccagtctttgtaggcataggatagtttaattccgtgtacattttcacctcctgtgagggtttctccccaaaatcgattgaaattggtttggagtatgccgttgagcgtaaatccccaatgggaaatatcgatactggcatcgatgaaaaaattgttgtaggtatgtg

SEQ ID NO: 477 - DNA, 4000 bp, Escherichia coli
  misc_feature (87)..(87): n is a, c, g, or t
  misc_feature (253)..(253): n is a, c, g, or t
  misc_feature (255)..(255): n is a, c, g, or t
  misc_feature (266)..(266): n is a, c, g, or t
  misc_feature (512)..(515): n is a, c, g, or t
  misc_feature (520)..(520): n is a, c, g, or t
  misc_feature (523)..(523): n is a, c, g, or t
  misc_feature (526)..(527): n is a, c, g, or t
  misc_feature (533)..(537): n is a, c, g, or t
  misc_feature (541)..(541): n is a, c, g, or t
  misc_feature (545)..(546): n is a, c, g, or t
  misc_feature (549)..(549): n is a, c, g, or t
  misc_feature (555)..(556): n is a, c, g, or t
  misc_feature (558)..(558): n is a, c, g, or t
  misc_feature (560)..(563): n is a, c, g, or t
  misc_feature (567)..(567): n is a, c, g, or t
  misc_feature (571)..(571): n is a, c, g, or t
  misc_feature (575)..(576): n is a, c, g, or t
  misc_feature (578)..(578): n is a, c, g, or t
  misc_feature (580)..(582): n is a, c, g, or t
  misc_feature (586)..(589): n is a, c, g, or t
  misc_feature (591)..(592): n is a, c, g, or t
  misc_feature (595)..(596): n is a, c, g, or t
  misc_feature (599)..(599): n is a, c, g, or t
  misc_feature (602)..(603): n is a, c, g, or t
  misc_feature (609)..(609): n is a, c, g, or t
  misc_feature (611)..(611): n is a, c, g, or t
  misc_feature (1986)..(1986): n is a, c, g, or t
  misc_feature (3205)..(3205): n is a, c, g, or t
  misc_feature (3207)..(3209): n is a, c, g, or t
  misc_feature (3211)..(3216): n is a, c, g, or t
  misc_feature (3218)..(3218): n is a, c, g, or t
  misc_feature (3220)..(3221): n is a, c, g, or t
  misc_feature (3223)..(3226): n is a, c, g, or t
  misc_feature (3228)..(3230): n is a, c, g, or t
  misc_feature (3232)..(3232): n is a, c, g, or t
  misc_feature (3234)..(3235): n is a, c, g, or t
  misc_feature (3238)..(3238): n is a, c, g, or t
  misc_feature (3240)..(3247): n is a, c, g, or t
  misc_feature (3249)..(3250): n is a, c, g, or t
  misc_feature (3252)..(3253): n is a, c, g, or t
  misc_feature (3256)..(3257): n is a, c, g, or t
  misc_feature (3259)..(3259): n is a, c, g, or t
  misc_feature (3262)..(3262): n is a, c, g, or t
  misc_feature (3264)..(3270): n is a, c, g, or t
  misc_feature (3272)..(3275): n is a, c, g, or t
  misc_feature (3277)..(3277): n is a, c, g, or t
  misc_feature (3279)..(3279): n is a, c, g, or t
  misc_feature (3282)..(3284): n is a, c, g, or t
  misc_feature (3286)..(3287): n is a, c, g, or t
  misc_feature (3292)..(3293): n is a, c, g, or t
  misc_feature (3295)..(3302): n is a, c, g, or t
  misc_feature (3305)..(3305): n is a, c, g, or t
  misc_feature (3307)..(3314): n is a, c, g, or t
  misc_feature (3316)..(3316): n is a, c, g, or t
  misc_feature (3318)..(3323): n is a, c, g, or t
  misc_feature (3325)..(3327): n is a, c, g, or t
  misc_feature (3329)..(3330): n is a, c, g, or t
  misc_feature (3333)..(3333): n is a, c, g, or t
  misc_feature (3336)..(3336): n is a, c, g, or t
  misc_feature (3338)..(3338): n is a, c, g, or t
  misc_feature (3341)..(3345): n is a, c, g, or t
  misc_feature (3350)..(3352): n is a, c, g, or t
  misc_feature (3354)..(3356): n is a, c, g, or t
  misc_feature (3358)..(3363): n is a, c, g, or t
  misc_feature (3365)..(3368): n is a, c, g, or t
  misc_feature (3370)..(3372): n is a, c, g, or t
  misc_feature (3374)..(3374): n is a, c, g, or t
  misc_feature (3377)..(3378): n is a, c, g, or t
  misc_feature (3380)..(3383): n is a, c, g, or t
  misc_feature (3386)..(3387): n is a, c, g, or t
  misc_feature (3391)..(3396): n is a, c, g, or t
  misc_feature (3400)..(3404): n is a, c, g, or t
  misc_feature (3410)..(3412): n is a, c, g, or t
  misc_feature (3417)..(3417): n is a, c, g, or t
  misc_feature (3420)..(3423): n is a, c, g, or t
  misc_feature (3425)..(3425): n is a, c, g, or t
  misc_feature (3427)..(3429): n is a, c, g, or t
  misc_feature (3432)..(3435): n is a, c, g, or t
  misc_feature (3437)..(3437): n is a, c, g, or t
  misc_feature (3442)..(3445): n is a, c, g, or t
  misc_feature (3450)..(3451): n is a, c, g, or t
  misc_feature (3455)..(3461): n is a, c, g, or t
  misc_feature (3464)..(3466): n is a, c, g, or t
  misc_feature (3471)..(3472): n is a, c, g, or t
  misc_feature (3475)..(3475): n is a, c, g, or t
  misc_feature (3479)..(3480): n is a, c, g, or t
  misc_feature (3483)..(3485): n is a, c, g, or t
  misc_feature (3489)..(3496): n is a, c, g, or t
  misc_feature (3502)..(3505): n is a, c, g, or t
  misc_feature (3508)..(3509): n is a, c, g, or t
  misc_feature (3511)..(3511): n is a, c, g, or t
  misc_feature (3514)..(3517): n is a, c, g, or t
  misc_feature (3519)..(3522): n is a, c, g, or t
  misc_feature (3525)..(3526): n is a, c, g, or t
  misc_feature (3530)..(3530): n is a, c, g, or t
  misc_feature (3532)..(3533): n is a, c, g, or t
  misc_feature (3535)..(3535): n is a, c, g, or t
  misc_feature (3537)..(3540): n is a, c, g, or t
  misc_feature (3542)..(3543): n is a, c, g, or t
  misc_feature (3545)..(3547): n is a, c, g, or t
  misc_feature (3549)..(3553): n is a, c, g, or t
  misc_feature (3557)..(3557): n is a, c, g, or t
  misc_feature (3561)..(3561): n is a, c, g, or t
  misc_feature (3563)..(3563): n is a, c, g, or t
  misc_feature (3565)..(3566): n is a, c, g, or t
  misc_feature (3568)..(3571): n is a, c, g, or t
  misc_feature (3573)..(3579): n is a, c, g, or t
  misc_feature (3581)..(3585): n is a, c, g, or t
  misc_feature (3587)..(3588): n is a, c, g, or t
  misc_feature (3590)..(3596): n is a, c, g, or t
  misc_feature (3598)..(3599): n is a, c, g, or t
  misc_feature (3601)..(3606): n is a, c, g, or t
  misc_feature (3608)..(3610): n is a, c, g, or t
  misc_feature (3612)..(3615): n is a, c, g, or t
  misc_feature (3619)..(3623): n is a, c, g, or t
  misc_feature (3625)..(3627): n is a, c, g, or t
  misc_feature (3630)..(3631): n is a, c, g, or t
  misc_feature (3633)..(3633): n is a, c, g, or t
  misc_feature (3636)..(3638): n is a, c, g, or t
  misc_feature (3640)..(3649): n is a, c, g, or t
  misc_feature (3651)..(3651): n is a, c, g, or t
  misc_feature (3653)..(3661): n is a, c, g, or t
  misc_feature (3664)..(3664): n is a, c, g, or t
  misc_feature (3666)..(3669): n is a, c, g, or t
  misc_feature (3671)..(3671): n is a, c, g, or t
  misc_feature (3673)..(3674): n is a, c, g, or t
  misc_feature (3676)..(3680): n is a, c, g, or t
  misc_feature (3683)..(3687): n is a, c, g, or t
  misc_feature (3689)..(3690): n is a, c, g, or t
  misc_feature (3692)..(3695): n is a, c, g, or t
  misc_feature (3697)..(3705): n is a, c, g, or t
  misc_feature (3708)..(3708): n is a, c, g, or t
  misc_feature (3710)..(3711): n is a, c, g, or t
  misc_feature (3713)..(3713): n is a, c, g, or t
  misc_feature (3716)..(3716): n is a, c, g, or t
  misc_feature (3719)..(3722): n is a, c, g, or t
  misc_feature (3725)..(3725): n is a, c, g, or t
  misc_feature (3727)..(3729): n is a, c, g, or t
  misc_feature (3731)..(3732): n is a, c, g, or t
  misc_feature (3735)..(3740): n is a, c, g, or t
  misc_feature (3743)..(3744): n is a, c, g, or t
  misc_feature (3747)..(3747): n is a, c, g, or t
  misc_feature (3749)..(3750): n is a, c, g, or t
  misc_feature (3753)..(3753): n is a, c, g, or t
  misc_feature (3757)..(3760): n is a, c, g, or t
  misc_feature (3763)..(3764): n is a, c, g, or t
  misc_feature (3766)..(3771): n is a, c, g, or t
  misc_feature (3773)..(3774): n is a, c, g, or t
  misc_feature (3776)..(3778): n is a, c, g, or t
  misc_feature (3780)..(3781): n is a, c, g, or t
  misc_feature (3783)..(3787): n is a, c, g, or t
  misc_feature (3789)..(3790): n is a, c, g, or t
  misc_feature (3794)..(3795): n is a, c, g, or t
  misc_feature (3797)..(3797): n is a, c, g, or t
  misc_feature (3800)..(3801): n is a, c, g, or t
  misc_feature (3804)..(3806): n is a, c, g, or t
  misc_feature (3810)..(3810): n is a, c, g, or t
  misc_feature (3812)..(3812): n is a, c, g, or t
  misc_feature (3814)..(3814): n is a, c, g, or t
  misc_feature (3816)..(3819): n is a, c, g, or t
  misc_feature (3823)..(3833): n is a, c, g, or t
  misc_feature (3835)..(3838): n is a, c, g, or t
  misc_feature (3840)..(3840): n is a, c, g, or t
  misc_feature (3842)..(3847): n is a, c, g, or t
  misc_feature (3851)..(3851): n is a, c, g, or t
  misc_feature (3856)..(3857): n is a, c, g, or t
  misc_feature (3859)..(3859): n is a, c, g, or t
  misc_feature (3861)..(3862): n is a, c, g, or t
  misc_feature (3866)..(3867): n is a, c, g, or t
  misc_feature (3869)..(3871): n is a, c, g, or t
  misc_feature (3873)..(3888): n is a, c, g, or t
  misc_feature (3890)..(3891): n is a, c, g, or t
  misc_feature (3894)..(3894): n is a, c, g, or t
  misc_feature (3897)..(3906): n is a, c, g, or t
  misc_feature (3909)..(3910): n is a, c, g, or t
  misc_feature (3912)..(3913): n is a, c, g, or t
  misc_feature (3915)..(3918): n is a, c, g, or t
  misc_feature (3921)..(3922): n is a, c, g, or t
  misc_feature (3924)..(3925): n is a, c, g, or t
  misc_feature (3927)..(3928): n is a, c, g, or t
  misc_feature (3930)..(3935): n is a, c, g, or t
  misc_feature (3939)..(3944): n is a, c, g, or t
  misc_feature (3949)..(3950): n is a, c, g, or t
  misc_feature (3956)..(3958): n is a, c, g, or t
  misc_feature (3960)..(3962): n is a, c, g, or t
  misc_feature (3965)..(3968): n is a, c, g, or t
  misc_feature (3970)..(3971): n is a, c, g, or t
  misc_feature (3973)..(3975): n is a, c, g, or t
  misc_feature (3978)..(3978): n is a, c, g, or t
  misc_feature (3980)..(3981): n is a, c, g, or t
  misc_feature (3983)..(3985): n is a, c, g, or t
  misc_feature (3987)..(3988): n is a, c, g, or t
  misc_feature (3990)..(3998): n is a, c, g, or t
  misc_feature (4000)..(4000): n is a, c, g, or t
tagttggtgcttttgttggcttagtggtggtagtcgttgtgagtgccaaataagcctagaagcaaacaaaaaagtacaatcaaattnaatatttttcattgtggctctcctgataagtacttccaattaaaaatttaccaaagctccaaaaacaataattgcaataaaaatgcggtttaataattgagacattttttagttgctcacaacagaaactgttattgtactgatgattcggttttgaatttttgcnangcttaacaganaaaatatgcatgctagacaagattaattttgctgacacactttaatcaaaacttactgaacaattgtaaaaaagacactgttctccaaatgaaatttggcgaatttgacagtttgtggtgttccatggaacacaaatgtcattatagacatagtcaatacacacgtccttgaattcaatgcttagagagcacacatcctgataatatttttgagagcaatttccaattgcaactagagagattgcnnnnaaaanaanttnnaaaaannnnnacanattnnaanaaaaanncnannnntttntttnaatnnantnnnatgnnnnanntgnnttngannctcttnantccttttcttcatggtgctcaagggttgcataaatgttttgactgctttaatatgagagataggctgatattttcgcaactggacttgtctttttttggaagacaagttaagttatttgaagtcgacttggattttttttcgaaattttcgcaactggtcaccaactatcttgtctcacttttgaagacaagtccactaaaagaagacaggtcaagaagattggttgcaacaatatgaagattttgactcaagaacatcattcttcaatctttggcatcaatttaacactgttttgtgttcctattttactctttaaactctttttttgaatatctaaaaaaaatttgctttggttttcactatccaatcagaatttagctaacctgtcacaactttgaaaaatgaagccaagttgcaaaaatttcattgtaaaagatgactagtaaaatttaagaagacttgaaatttaagtcgacttaaatttgaagtcaggttaaaaaaagacaagtccagttgcgaaaatatcagctcctatctctcatattacacactcaacatttctccctcctttactttgatttcaaacaaaacaaaatcaaatggtggttatttttatagatcgtttttcaatgcatttagttcttttaatatttacctcattttgatgtgtaacttgtcatcacaaggcccttactgttcaactcgatgacagaattgaactctgctatggccagaagtgtcaaatccacttttgtgggctctgaaaaatttagccgaaccctcaggtttcctgaaataacatgcattgaatatttatttagtacttcctccaacctaaaaaatgcacataagtgggcacataagtgggcgatttgcccgaatagacatcttagtattttatgcatagcaaaatatgtcttaccaactctgacagcggacgttatataagattaaatcgtcggctatataagagtcccaaactatggttattcttatcaaaagctttgaattgtgatatgtcttaccaactctgacagatggatttgcaaaagcctcagagccaccatcctgggctgttgttaagtcataggctatgatgtgataaccattcatgaaggactcgtatgaaatagcatttgtgaacaaagagttcaccatttgattggtattcatgagcctgaaaaagtcttgtttggcctggtctgctgtctgcactgaaatcagttgatctgaaacaaataaacaacaattaatatgttttaacttaaattgctgaaaaaaaatatttctcatgaatctatgaatgcatattttgcctgatggacatccgtctatttcaagctggcatttagtcagccaaaattttttgcttgngtcttgttctacatccgtatctgcaggcaaaggaggatccgccgatgttgaggtggattggcccaatcctggtggttgtgctctttgttttcctctcaacaaactcatcagggcctctgcttcttcatcatttaattctggattctcttcattttgaggtgatctgccaaagaagtgggacagcttttggtagattgatgactgtctgtcaagctgaacagatgaccttctggtgggcggttctgaactttgttgttgtaggcctaacctttgatacagaacctcaaatttactgtcgagttttttatctacaaggtcactgacaatttgctctgatggcacgttcctttgcacagtttgcacagcagttgcttcgtaaaaccactttctgccaaactcgaatggattcttgttgatatctccttggtatgctttggtatcaactagagcaaaaaaaattcttgtgggattttcggattcagaaaaaagggagtccgacagagtttctcttttattgacttcaatgccgtaggttataacggacaacctcctgaagtggtacttcatggtttgctttgggaatctgatttcaatttctttgtacatttgctctgtaagccaggcaacgggaacaaacagtttgacattttttacaattgccttgtatttttcagtgtctgtgctctttgacatgagagagaattcactgctttcccttgtgagataaaaatcgacggcggtgtgaggcggcaagggtttgtcgcaagtgtgaagttcgtggtacaattttccgataaaagtacatccctctgctctgaagtcattggttaagacatcgtctactcttaggaattgcgatctcatgataaaacccgaattagtagcctctgggcccatggttcttgccttgtcgttggcccacccttgcatctgcaatgttgaattttttacttcgctgtcaaaagtcagcaatgtgcctaggtatgctttgtaggggtacaacattttggacccagaaatattttgtccgtttattgaagtggagacttcggaaaagagagagtgcagtgtgttatttactcctgcaacaattgaagtagttgtgggaagcgaggttttgtcttcttttgtcacagtaaagtcaagctgtatcagtgttttggaaattagatagcactgtggtgcctcccgtttttccaagtgaaatcgtattgaagangnnntnnnnnnancnncnnnngnnngnannaantnnnnnnnntnnannttnntnaancnnnnnnncnnnngnanggnnntnnaaaanntnnnnnnnnaantnnnnnnnngntnnnnnntnnncnnccnttncnttnnnnnccccnnncnnnannnnnngnnnntnnnanttnnannnnttnntttnnnnnntttnnnnntttttnnnttttnggnnnncntnnnccnnnnanttttnnnnttttnntttnnnnnnnttnnnttttnnaantttnnaannngggnnnnnnnntttttnnnnaanngnttnnnncnnnnttnntttncnngntnnnntnngnnncnnnnncccnaaancntnntnnnncnnnnnnngnnnnncnngnnnnnnnanntnnnnnntnnncnnnntttnnnnntnnnttnntnggnnngnnnnnnnnnntngnnnnnnnnnttngnnnnangnngnnnnnaannnnncnngnnnnannnnnnnnnccnanngnaanttnnnnaancnnngnnttnnnnnnaannaantnnttncccnnnnttnntnnnnnnanntnnnanncnnnnntnntttnncnttnnaannngggntncnannnnaaannnnnnnnnnnannnnantnnnnnnaaanttttnncntnntttnntnnngnnnnnnnnnnnnnnnngnnaanttnnnnnnnnnnttnnanntnnnnttnnannanngnnnnnntttnnnnnnttttnntttttnnncnnnttnnnngnncnnnttnannannntnntnnnnnnnnngn

SEQ ID NO: 478 - DNA, 4000 bp, Escherichia coli
  misc_feature (75)..(76): n is a, c, g, or t
  misc_feature (78)..(78): n is a, c, g, or t
  misc_feature (82)..(82): n is a, c, g, or t
  misc_feature (85)..(86): n is a, c, g, or t
  misc_feature (88)..(88): n is a, c, g, or t
  misc_feature (90)..(92): n is a, c, g, or t
  misc_feature (94)..(94): n is a, c, g, or t
  misc_feature (98)..(99): n is a, c, g, or t
  misc_feature (101)..(101): n is a, c, g, or t
  misc_feature (103)..(105): n is a, c, g, or t
  misc_feature (109)..(113): n is a, c, g, or t
  misc_feature (115)..(115): n is a, c, g, or t
  misc_feature (120)..(120): n is a, c, g, or t
  misc_feature (122)..(123): n is a, c, g, or t
  misc_feature (126)..(126): n is a, c, g, or t
  misc_feature (129)..(129): n is a, c, g, or t
  misc_feature (131)..(132): n is a, c, g, or t
  misc_feature (135)..(135): n is a, c, g, or t
  misc_feature (137)..(138): n is a, c, g, or t
  misc_feature (144)..(144): n is a, c, g, or t
  misc_feature (148)..(148): n is a, c, g, or t
  misc_feature (150)..(153): n is a, c, g, or t
  misc_feature (155)..(155): n is a, c, g, or t
  misc_feature (158)..(158): n is a, c, g, or t
  misc_feature (161)..(162): n is a, c, g, or t
  misc_feature (165)..(166): n is a, c, g, or t
  misc_feature (168)..(169): n is a, c, g, or t
  misc_feature (172)..(172): n is a, c, g, or t
  misc_feature (177)..(177): n is a, c, g, or t
  misc_feature (179)..(179): n is a, c, g, or t
  misc_feature (186)..(188): n is a, c, g, or t
  misc_feature (191)..(191): n is a, c, g, or t
  misc_feature (193)..(193): n is a, c, g, or t
  misc_feature (196)..(196): n is a, c, g, or t
  misc_feature (198)..(198): n is a, c, g, or t
  misc_feature (205)..(207): n is a, c, g, or t
  misc_feature (211)..(217): n is a, c, g, or t
  misc_feature (222)..(222): n is a, c, g, or t
  misc_feature (225)..(225): n is a, c, g, or t
  misc_feature (228)..(231): n is a, c, g, or t
  misc_feature (234)..(235): n is a, c, g, or t
  misc_feature (237)..(237): n is a, c, g, or t
  misc_feature (239)..(241): n is a, c, g, or t
  misc_feature (243)..(243): n is a, c, g, or t
  misc_feature (247)..(247): n is a, c, g, or t
  misc_feature (252)..(252): n is a, c, g, or t
  misc_feature (257)..(257): n is a, c, g, or t
  misc_feature (259)..(259): n is a, c, g, or t
  misc_feature (261)..(262): n is a, c, g, or t
  misc_feature (264)..(267): n is a, c, g, or t
  misc_feature (269)..(271): n is a, c, g, or t
  misc_feature (274)..(278): n is a, c, g, or t
  misc_feature (281)..(281): n is a, c, g, or t
  misc_feature (283)..(288): n is a, c, g, or t
  misc_feature (292)..(293): n is a, c, g, or t
  misc_feature (296)..(296): n is a, c, g, or t
  misc_feature (298)..(299): n is a, c, g, or t
  misc_feature (304)..(304): n is a, c, g, or t
  misc_feature (309)..(310): n is a, c, g, or t
  misc_feature (312)..(314): n is a, c, g, or t
  misc_feature (317)..(320): n is a, c, g, or t
  misc_feature (322)..(325): n is a, c, g, or t
  misc_feature (327)..(329): n is a, c, g, or t
  misc_feature (331)..(331): n is a, c, g, or t
  misc_feature (333)..(333): n is a, c, g, or t
  misc_feature (337)..(337): n is a, c, g, or t
  misc_feature (339)..(340): n is a, c, g, or t
  misc_feature (342)..(342): n is a, c, g, or t
  misc_feature (345)..(345): n is a, c, g, or t
  misc_feature (349)..(355): n is a, c, g, or t
  misc_feature (358)..(358): n is a, c, g, or t
  misc_feature (361)..(365): n is a, c, g, or t
  misc_feature (367)..(367): n is a, c, g, or t
  misc_feature (372)..(374): n is a, c, g, or t
  misc_feature (377)..(378): n is a, c, g, or t
  misc_feature (380)..(380): n is a, c, g, or t
  misc_feature (382)..(386): n is a, c, g, or t
  misc_feature (392)..(393): n is a, c, g, or t
  misc_feature (396)..(396): n is a, c, g, or t
  misc_feature (398)..(406): n is a, c, g, or t
  misc_feature (408)..(409): n is a, c, g, or t
  misc_feature (412)..(413): n is a, c, g, or t
  misc_feature (415)..(415): n is a, c, g, or t
  misc_feature (418)..(420): n is a, c, g, or t
  misc_feature (422)..(424): n is a, c, g, or t
  misc_feature (426)..(428): n is a, c, g, or t
  misc_feature (430)..(433): n is a, c, g, or t
  misc_feature (436)..(436): n is a, c, g, or t
  misc_feature (440)..(441): n is a, c, g, or t
  misc_feature (444)..(444): n is a, c, g, or t
  misc_feature (446)..(448): n is a, c, g, or t
  misc_feature (453)..(453): n is a, c, g, or t
  misc_feature (456)..(459): n is a, c, g, or t
  misc_feature (464)..(464): n is a, c, g, or t
  misc_feature (469)..(471): n is a, c, g, or t
  misc_feature (473)..(473): n is a, c, g, or t
  misc_feature (477)..(481): n is a, c, g, or t
  misc_feature (484)..(485): n is a, c, g, or t
  misc_feature (487)..(487): n is a, c, g, or t
  misc_feature (490)..(490): n is a, c, g, or t
  misc_feature (492)..(492): n is a, c, g, or t
  misc_feature (498)..(499): n is a, c, g, or t
  misc_feature (502)..(505): n is a, c, g, or t
  misc_feature (507)..(508): n is a, c, g, or t
  misc_feature (510)..(510): n is a, c, g, or t
  misc_feature (886)..(886): n is a, c, g, or t
  misc_feature (1989)..(1989): n is a, c, g, or t
  misc_feature (2879)..(2879): n is a, c, g, or t
gtcaattgcctcgcgtacaaaaaaaacatgccacatgtcaacattggaggagggaagaaagccccatctaagggnncntcgngcnngncnnngngcannanannnaagnnnnnancaaanannganacnannatngnnaatggnatgngnnnngnaanganngcnnannacnaggcnangtacgannngcngnaanangagaagnnngagnnnnnnnctaanctntannnnatnngnannnanattnacaanaaaananannannnnannnagnnnnntgngnnnnnnggtnnagngnnaagtnaaatnnannnttnnnntnnnntnnngnangagnannanganctannnnnnnagnttnnnnntnagctnnnagnngngnnnnnaggagnnganannnnnnnnnannacnnantannntnnnannntnnnntgnaggnngangnnnagtgngannnngaatntggannntngagnnnnnatnngnacngngatgannacnnnngnnangacgatagcgatagcgatagcgatagcgacagcgacagcgaaagcaacaacaatagcggcgaagacgcgaacggcgaccggcagctgtcctccgatgaggccgagaagaaagatgacagcatactgcacaacagagacgaagaagaagacggcgtacgcctaccatcaactctggaggaaatgtttagggaagcgaagatgcctgcagaggagagagagagattgcaagagctgcgagcggagtttagcagtttgcgagcaagtgtgcaggacaaacatgacaagaacgaacagatttggactcattctagtgctgaggccaaataatgaaaagtagacggttttttgaagcaaaagcacttctccgtattaggcngtcgttcgcactctcgcgcatttcttcgtcgcctgtagacagatattcaccatcgctcattgtagcgaccctctactttagattcttcccatccattttcaaataaaaaataaaaaaaattagaaaaacaagtcaaaaacaaaccatgtacactctttaacgaccaactcccgataagcacttaagcacatcggggtggagtattttcgcatggtatttcttgtgtttcgtattcgcttcttgcccctcaccctcattaaattaaattccttcgttctggaggatctctcccattctcctcatacttgaactcttcctacagaaataagatgacagtcctcctctcaagttatcaaactggcaatctgacgacgtgatcattctctctctccacctccacgcccctccttctcagtcccctcgcaatctcctcgggtcttccatcccccatttgcccctctccattccccctgatcctccatcccagccgctcgcagtggcttacatcgatcctacggagatctggtgcatcatacaagaacatttctagcccagtcggggtaatgttagtgcaatggcggagctctacagtttggagcgcgcacttttgggcaaggcgggaggatccagtgccaaaagtgtggaagctgtcgttgccgttgccgctgccgctactgctgttgccacagcgactacttccactgcgactactgccagtgggactattgctgccgtcgttaattataatgccaggtgttgtggctacgtcctctttcgggagaaggatgtccggcttagtgagaaaaagaagcccgcggtcggtgataactttgttgccagacaaattgaggtgcttgagatacatctgtccgatcgtcttcaagctctcgttgtcgatcccggtgcaaagctcaaggtcccaggtagttagtcctttgcacccgtccctaacctccccttccacaccatctcccccaacccccctgcaccagcctgtccccagaaacctgagcttcctcagtcctcccctcgcaatcgccttaacaccctcattggtcaccatactagactgcctgaccgtggatttagacaagtctagactngtgagatttttgcacgaaacgattgacttgacgccggcgtcagttacatcagtgccgcggagagaaagggtggagagcgaatgggagagagcagaggcgatcacaacgcaacatgaatcctctatccctgcacaataatccaggaaaagctcggatacattaacaaagcgagtcaggacggagcccaagatggtcttctccaaccttggagatgtatcgaacgcagcgcggcagctgccaacaccgacatacaaactcttgagatccagctttttcacagtcgtgcgcgcaacttcgcggtaagccttggagacgagtgaaagtgaggagataacatcagtcgttgggaggtagccagagaagaagcagcgcgagattacatcagcgtgccccgtcaaagaagggtcaaagggactgggaggtctgggatccgtcgtctggacaagcgttgttaccatcggtgttaccatcggtgttgtgaccaatgacgatgaatgttttgacgagggcgacgatgcgattgtgctgctgagcccaaatacatatttgaaggagttcttgttcactgtgttcggtgctgtagctgcagcagtgctattgtcagcagtgctattgtcagcagtgctattgtcagcagtgctgttggctgcaaatgtgacagctattggacgatcaacaccggcgatgattctcctcatcatgggaggatcgttcgcaccgcccttctcgtcgcttggtatcttccagcccctctctccctccaactttcctccattcctgtctccatcgccccattcccctggaatcaaggcgttacaactggcaagtccaaaagagcaaccaggcgccgatagctgtggtcctcggacgtaattgtgaatagaattcanagatgtgcttatattgctactcctaatttcgttaattgatgtactcgcagtgtttcctggggcttcgtttgaagatttctcctctggatccttcttggtagagcttccaatgtctgtaccaaaggtgttgccctctgtgttttcgccacctttctccctgacctctttcttgctaccgtcgacagaagcttttccaaatgacggagtcgtggctctcgctccttcgctgttaattgttgaagaggaaggggttctcccagctgtcttcctcccatacttgattttcttggaaagcctgccgccatttctgccgtttccgttcccgttccccccgggagggagctcaccatcagagtaactctggatcgcccggccgttaagatcgactcggccctctgcataacgagatactctcagtcctccttttcccccattattgtttccactgctgcctttactgctaccacagtcaatgccactgccatcatcaccgtcaataccacctccatagacgttatttatcccacaactagagccagtaccgcccttaactgggcgctgctgctgctgtgtgctgctaaaaactgagtgcggagtggtagtggattcagaaacaaactctgaggtcccctggccactgctgttcggggtggggtggtccataacacacgcaaccactgattcaagaggtagacacgacattttgaatgggttagaacttttcaatccaacgtggggaggcacatcccacccgaaaacgaggtcgccaaaaacaatatccaggagtaattctcctcaacgacgggtgtttaggaaagttttgtttcacctaaagatctctgagtagtcttccaatacttacctagacccttaagttaggaaacggtcaggatgacttccttcttggagtctgaaaaaagacccaaagcttcttcttttctgccaaaaccttgttttccaccctacaccttcgtattctttggaacatctgagtaattttcgatcacctcacctttgtcacctttgtgaacacaaaatggagttagcgaaagattgggcttcaattgaccctaatccaaagacaaaggccttgacttctgcactcacagaagaacaagcgg

SEQ ID NO: 479 - DNA, 4000 bp, Escherichia coli
  misc_feature (1)..(2): n is a, c, g, or t
  misc_feature (5)..(5): n is a, c, g, or t
  misc_feature (8)..(13): n is a, c, g, or t
  misc_feature (15)..(15): n is a, c, g, or t
  misc_feature (17)..(19): n is a, c, g, or t
  misc_feature (21)..(27): n is a, c, g, or t
  misc_feature (29)..(30): n is a, c, g, or t
  misc_feature (32)..(36): n is a, c, g, or t
  misc_feature (38)..(45): n is a, c, g, or t
  misc_feature (47)..(54): n is a, c, g, or t
  misc_feature (56)..(61): n is a, c, g, or t
  misc_feature (63)..(63): n is a, c, g, or t
  misc_feature (66)..(68): n is a, c, g, or t
  misc_feature (70)..(70): n is a, c, g, or t
  misc_feature (72)..(80): n is a, c, g, or t
  misc_feature (82)..(84): n is a, c, g, or t
  misc_feature (87)..(90): n is a, c, g, or t
  misc_feature (92)..(95): n is a, c, g, or t
  misc_feature (97)..(97): n is a, c, g, or t
  misc_feature (99)..(100): n is a, c, g, or t
  misc_feature (102)..(102): n is a, c, g, or t
  misc_feature (104)..(107): n is a, c, g, or t
  misc_feature (109)..(114): n is a, c, g, or t
  misc_feature (116)..(117): n is a, c, g, or t
  misc_feature (119)..(126): n is a, c, g, or t
  misc_feature (128)..(129): n is a, c, g, or t
  misc_feature (131)..(138): n is a, c, g, or t
  misc_feature (141)..(142): n is a, c, g, or t
  misc_feature (145)..(148): n is a, c, g, or t
  misc_feature (150)..(156): n is a, c, g, or t
  misc_feature (158)..(162): n is a, c, g, or t
  misc_feature (164)..(166): n is a, c, g, or t
  misc_feature (169)..(169): n is a, c, g, or t
  misc_feature (172)..(172): n is a, c, g, or t
  misc_feature (175)..(183): n is a, c, g, or t
  misc_feature (187)..(187): n is a, c, g, or t
  misc_feature (190)..(192): n is a, c, g, or t
  misc_feature (195)..(196): n is a, c, g, or t
  misc_feature (199)..(199): n is a, c, g, or t
  misc_feature (201)..(202): n is a, c, g, or t
  misc_feature (204)..(204): n is a, c, g, or t
  misc_feature (206)..(214): n is a, c, g, or t
  misc_feature (216)..(219): n is a, c, g, or t
  misc_feature (222)..(222): n is a, c, g, or t
  misc_feature (224)..(225): n is a, c, g, or t
  misc_feature (228)..(228): n is a, c, g, or t
  misc_feature (230)..(235): n is a, c, g, or t
  misc_feature (239)..(241): n is a, c, g, or t
  misc_feature (243)..(246): n is a, c, g, or t
  misc_feature (248)..(250): n is a, c, g, or t
  misc_feature (252)..(253): n is a, c, g, or t
  misc_feature (255)..(265): n is a, c, g, or t
  misc_feature (268)..(272): n is a, c, g, or t
  misc_feature (274)..(286): n is a, c, g, or t
  misc_feature (288)..(293): n is a, c, g, or t
  misc_feature (295)..(297): n is a, c, g, or t
  misc_feature (300)..(305): n is a, c, g, or t
  misc_feature (307)..(308): n is a, c, g, or t
  misc_feature (310)..(310): n is a, c, g, or t
  misc_feature (314)..(317): n is a, c, g, or t
  misc_feature (320)..(325): n is a, c, g, or t
  misc_feature (327)..(337): n is a, c, g, or t
  misc_feature (339)..(339): n is a, c, g, or t
  misc_feature (341)..(341): n is a, c, g, or t
  misc_feature (343)..(344): n is a, c, g, or t
  misc_feature (346)..(349): n is a, c, g, or t
  misc_feature (351)..(352): n is a, c, g, or t
  misc_feature (354)..(365): n is a, c, g, or t
  misc_feature (367)..(371): n is a, c, g, or t
  misc_feature (373)..(377): n is a, c, g, or t
  misc_feature (379)..(383): n is a, c, g, or t
  misc_feature (387)..(388): n is a, c, g, or t
  misc_feature (391)..(394): n is a, c, g, or t
  misc_feature (398)..(408): n is a, c, g, or t
  misc_feature (412)..(419): n is a, c, g, or t
  misc_feature (421)..(425): n is a, c, g, or t
  misc_feature (427)..(428): n is a, c, g, or t
  misc_feature (430)..(434): n is a, c, g, or t
  misc_feature (436)..(437): n is a, c, g, or t
  misc_feature (439)..(441): n is a, c, g, or t
  misc_feature (443)..(446): n is a, c, g, or t
  misc_feature (450)..(461): n is a, c, g, or t
  misc_feature (464)..(466): n is a, c, g, or t
  misc_feature (468)..(474): n is a, c, g, or t
  misc_feature (476)..(480): n is a, c, g, or t
  misc_feature (482)..(484): n is a, c, g, or t
  misc_feature (486)..(488): n is a, c, g, or t
  misc_feature (490)..(491): n is a, c, g, or t
  misc_feature (493)..(497): n is a, c, g, or t
  misc_feature (499)..(501): n is a, c, g, or t
  misc_feature (503)..(521): n is a, c, g, or t
  misc_feature (523)..(526): n is a, c, g, or t
  misc_feature (528)..(531): n is a, c, g, or t
  misc_feature (533)..(534): n is a, c, g, or t
  misc_feature (536)..(540): n is a, c, g, or t
  misc_feature (544)..(549): n is a, c, g, or t
  misc_feature (551)..(552): n is a, c, g, or t
  misc_feature (554)..(556): n is a, c, g, or t
  misc_feature (558)..(561): n is a, c, g, or t
  misc_feature (563)..(570): n is a, c, g, or t
  misc_feature (572)..(576): n is a, c, g, or t
  misc_feature (578)..(578): n is a, c, g, or t
  misc_feature (581)..(584): n is a, c, g, or t
  misc_feature (587)..(588): n is a, c, g, or t
  misc_feature (590)..(597): n is a, c, g, or t
  misc_feature (599)..(599): n is a, c, g, or t
  misc_feature (604)..(612): n is a, c, g, or t
  misc_feature (614)..(616): n is a, c, g, or t
  misc_feature (618)..(619): n is a, c, g, or t
  misc_feature (621)..(624): n is a, c, g, or t
  misc_feature (626)..(626): n is a, c, g, or t
  misc_feature (628)..(633): n is a, c, g, or t
  misc_feature (635)..(640): n is a, c, g, or t
  misc_feature (642)..(642): n is a, c, g, or t
  misc_feature (644)..(651): n is a, c, g, or t
  misc_feature (653)..(655): n is a, c, g, or t
  misc_feature (657)..(660): n is a, c, g, or t
  misc_feature (662)..(663): n is a, c, g, or t
  misc_feature (665)..(673): n is a, c, g, or t
  misc_feature (675)..(683): n is a, c, g, or t
  misc_feature (685)..(690): n is a, c, g, or t
  misc_feature (692)..(696): n is a, c, g, or t
  misc_feature (699)..(702): n is a, c, g, or t
  misc_feature (704)..(712): n is a, c, g, or t
  misc_feature (714)..(714): n is a, c, g, or t
  misc_feature (716)..(717): n is a, c, g, or t
  misc_feature (719)..(719): n is a, c, g, or t
  misc_feature (721)..(727): n is a, c, g, or t
  misc_feature (729)..(729): n is a, c, g, or t
  misc_feature (731)..(731): n is a, c, g, or t
  misc_feature (734)..(740): n is a, c, g, or t
  misc_feature (742)..(743): n is a, c, g, or t
  misc_feature (745)..(747): n is a, c, g, or t
  misc_feature (749)..(751): n is a, c, g, or t
  misc_feature (753)..(753): n is a, c, g, or t
  misc_feature (755)..(755): n is a, c, g, or t
  misc_feature (758)..(758): n is a, c, g, or t
  misc_feature (760)..(762): n is a, c, g, or t
  misc_feature (765)..(768): n is a, c, g, or t
  misc_feature (770)..(771): n is a, c, g, or t
  misc_feature (774)..(775): n is a, c, g, or t
  misc_feature (777)..(777): n is a, c, g, or t
  misc_feature (780)..(783): n is a, c, g, or t
  misc_feature (785)..(812): n is a, c, g, or t
  misc_feature (814)..(818): n is a, c, g, or t
  misc_feature (821)..(821): n is a, c, g, or t
  misc_feature (823)..(828): n is a, c, g, or t
  misc_feature (830)..(832): n is a, c, g, or t
  misc_feature (834)..(843): n is a, c, g, or t
  misc_feature (845)..(850): n is a, c, g, or t
  misc_feature (852)..(852): n is a, c, g, or t
  misc_feature (854)..(854): n is a, c, g, or t
  misc_feature (857)..(861): n is a, c, g, or t
  misc_feature (863)..(875): n is a, c, g, or t
  misc_feature (877)..(877): n is a, c, g, or t
  misc_feature (880)..(885): n is a, c, g, or t
  misc_feature (887)..(888): n is a, c, g, or t
  misc_feature (891)..(895): n is a, c, g, or t
  misc_feature (897)..(898): n is a, c, g, or t
  misc_feature (900)..(901): n is a, c, g, or t
  misc_feature (903)..(907): n is a, c, g, or t
  misc_feature (910)..(916): n is a, c, g, or t
  misc_feature (918)..(919): n is a, c, g, or t
  misc_feature (922)..(926): n is a, c, g, or t
  misc_feature (928)..(928): n is a, c, g, or t
  misc_feature (930)..(933): n is a, c, g, or t
  misc_feature (936)..(947): n is a, c, g, or t
  misc_feature (949)..(954): n is a, c, g, or t
  misc_feature (957)..(960): n is a, c, g, or t
  misc_feature (962)..(962): n is a, c, g, or t
  misc_feature (964)..(978): n is a, c, g, or t
  misc_feature (980)..(983): n is a, c, g, or t
  misc_feature (985)..(989): n is a, c, g, or t
  misc_feature (991)..(993): n is a, c, g, or t
  misc_feature (995)..(996): n is a, c, g, or t
  misc_feature (998)..(1014): n is a, c, g, or t
  misc_feature (1016)..(1019): n is a, c, g, or t
  misc_feature (1021)..(1026): n is a, c, g, or t
  misc_feature (1028)..(1029): n is a, c, g, or t
  misc_feature (1031)..(1031): n is a, c, g, or t
  misc_feature (1034)..(1039): n is a, c, g, or t
  misc_feature (1041)..(1045): n is a, c, g, or t
  misc_feature (1047)..(1051): n is a, c, g, or t
  misc_feature (1054)..(1057): n is a, c, g, or t
  misc_feature (1059)..(1060): n is a, c, g, or t
  misc_feature (1062)..(1065): n is a, c, g, or t
  misc_feature (1067)..(1067): n is a, c, g, or t
  misc_feature (1070)..(1074): n is a, c, g, or t
  misc_feature (1076)..(1076): n is a, c, g, or t
  misc_feature (1078)..(1078): n is a, c, g, or t
  misc_feature (1080)..(1084): n is a, c, g, or t
  misc_feature (1086)..(1092): n is a, c, g, or t
  misc_feature (1094)..(1098): n is a, c, g, or t
  misc_feature (1100)..(1104): n is a, c, g, or t
  misc_feature (1107)..(1108): n is a, c, g, or t
  misc_feature (1110)..(1111): n is a, c, g, or t
  misc_feature (1113)..(1114): n is a, c, g, or t
  misc_feature (1116)..(1123): n is a, c, g, or t
  misc_feature (1125)..(1126): n is a, c, g, or t
  misc_feature (1128)..(1132): n is a, c, g, or t
  misc_feature (1134)..(1141): n is a, c, g, or t
  misc_feature (1143)..(1149): n is a, c, g, or t
  misc_feature (1151)..(1158): n is a, c, g, or t
  misc_feature (1160)..(1166): n is a, c, g, or t
  misc_feature (1168)..(1170): n is a, c, g, or t
  misc_feature (1172)..(1173): n is a, c, g, or t
  misc_feature (1176)..(1180): n is a, c, g, or t
  misc_feature (1182)..(1183): n is a, c, g, or t
  misc_feature (1185)..(1185): n is a, c, g, or t
  misc_feature (1189)..(1194): n is a, c, g, or t
  misc_feature (1196)..(1212): n is a, c, g, or t
  misc_feature (1214)..(1214): n is a, c, g, or t
  misc_feature (1216)..(1216): n is a, c, g, or t
  misc_feature (1218)..(1224): n is a, c, g, or t
  misc_feature (1226)..(1228): n is a, c, g, or t
  misc_feature (1230)..(1231): n is a, c, g, or t
  misc_feature (1233)..(1233): n is a, c, g, or t
  misc_feature (1235)..(1236): n is a, c, g, or t
  misc_feature (1238)..(1240): n is a, c, g, or t
  misc_feature (1242)..(1242): n is a, c, g, or t
  misc_feature (1246)..(1250): n is a, c, g, or t
  misc_feature (1252)..(1253): n is a, c, g, or t
  misc_feature (1257)..(1260): n is a, c, g, or t
  misc_feature (1262)..(1262): n is a, c, g, or t
  misc_feature (1264)..(1265): n is a, c, g, or t
  misc_feature (1267)..(1273): n is a, c, g, or t
  misc_feature (1275)..(1283): n is a, c, g, or t
  misc_feature (1285)..(1293): n is a, c, g, or t
  misc_feature (1295)..(1304): n is a, c, g, or t
  misc_feature (1306)..(1311): n is a, c, g, or t
  misc_feature (1317)..(1323): n is a, c, g, or t
  misc_feature (1325)..(1335): n is a, c, g, or t
  misc_feature (1337)..(1339): n is a, c, g, or t
  misc_feature (1341)..(1347): n is a, c, g, or t
  misc_feature (1349)..(1350): n is a, c, g, or t
  misc_feature (1352)..(1355): n is a, c, g, or t
  misc_feature (1358)..(1381): n is a, c, g, or t
  misc_feature (1383)..(1389): n is a, c, g, or t
  misc_feature (1392)..(1399): n is a, c, g, or t
  misc_feature (1401)..(1402): n is a, c, g, or t
  misc_feature (1404)..(1404): n is a, c, g, or t
  misc_feature (1408)..(1413): n is a, c, g, or t
  misc_feature (1415)..(1420): n is a, c, g, or t
  misc_feature (1422)..(1430): n is a, c, g, or t
  misc_feature (1432)..(1448): n is a, c, g, or t
  misc_feature (1450)..(1456): n is a, c, g, or t
  misc_feature (1458)..(1458): n is a, c, g, or t
  misc_feature (1460)..(1460): n is a, c, g, or t
  misc_feature (1462)..(1469): n is a, c, g, or t
  misc_feature (1472)..(1474): n is a, c, g, or t
  misc_feature (1476)..(1477): n is a, c, g, or t
  misc_feature (1479)..(1487): n is a, c, g, or t
  misc_feature (1490)..(1494): n is a, c, g, or t
  misc_feature (1497)..(1503): n is a, c, g, or t
  misc_feature (1505)..(1506): n is a, c, g, or t
  misc_feature (1508)..(1508): n is a, c, g, or t
  misc_feature (1511)..(1511): n is a, c, g, or t
  misc_feature (1514)..(1515): n is a, c, g, or t
  misc_feature (1517)..(1518): n is a, c, g, or t
  misc_feature (1521)..(1522): n is a, c, g, or t
  misc_feature (1524)..(1525): n is a, c, g, or t
  misc_feature (1527)..(1531): n is a, c, g, or t
  misc_feature (1533)..(1534): n is a, c, g, or t
  misc_feature (1536)..(1552): n is a, c, g, or t
  misc_feature (1554)..(1563): n is a, c, g, or t
  misc_feature (1565)..(1566): n is a, c, g, or t
  misc_feature (1568)..(1573): n is a, c, g, or t
  misc_feature (1578)..(1578): n is a, c, g, or t
  misc_feature (1580)..(1581): n is a, c, g, or t
  misc_feature (1583)..(1588): n is a, c, g, or t
  misc_feature (1590)..(1607): n is a, c, g, or t
  misc_feature (1610)..(1614): n is a, c, g, or t
  misc_feature (1617)..(1622): n is a, c, g, or t
  misc_feature (1624)..(1635): n is a, c, g, or t
  misc_feature (1637)..(1640): n is a, c, g, or t
  misc_feature (1642)..(1642): n is a, c, g, or t
  misc_feature (1646)..(1672): n is a, c, g, or t
  misc_feature (1674)..(1678): n is a, c, g, or t
  misc_feature (1681)..(1689): n is a, c, g, or t
  misc_feature (1692)..(1700): n is a, c, g, or t
  misc_feature (1702)..(1704): n is a, c, g, or t
  misc_feature (1707)..(1716): n is a, c, g, or t
  misc_feature (1719)..(1721): n is a, c, g, or t
  misc_feature (1723)..(1730): n is a, c, g, or t
  misc_feature (1732)..(1734): n is a, c, g, or t
  misc_feature (1736)..(1737): n is a, c, g, or t
  misc_feature (1982)..(1983): n is a, c, g, or t
  misc_feature (1986)..(1986): n is a, c, g, or t
nnccnttnnnnnngntnnngnnnnnnntnntnnnnnannnnnnnnannnnnnnnannnnnnanttnnnantnnnnnnnnngnnnttnnnnannnnantnncnannnnannnnnngnngnnnnnnnncnncnnnnnnnnttnnttnnnnannnnnnnannnnnannnccnttnaannnnnnnnnaaanaannnccnnaancnncngnnnnnnnnntnnnnggntnnttncnnnnnntttnnntnnnntnnntnncnnnnnnnnnnnttnnnnngnnnnnnnnnnnnncnnnnnncnnnttnnnnnncnnantttnnnnaannnnnncnnnnnnnnnnncnangnncnnnncnncnnnnnnnnnnnntnnnnnannnnntnnnnntttnnaannnnaaannnnnnnnnnngggnnnnnnnntnnnnncnntnnnnncnntnnnannnntttnnnnnnnnnnnnccnnnannnnnnncnnnnnannncnnntnngnnnnnannntnnnnnnnnnnnnnnnnnnntnnnncnnnngnntnnnnntttnnnnnnanncnnnannnntnnnnnnnntnnnnntnccnnnnaanncnnnnnnnntnaaaannnnnnnnncnnngnngnnnncntnnnnnntnnnnnncntnnnnnnnnannncnnnncnncnnnnnnnnnannnnnnnnngnnnnnncnnnnnccnnnntnnnnnnnnngntnncngnnnnnnngntnaannnnnnngnnannngnnncnanccnannnccnnnntnnggnntnaannnnannnnnnnnnnnnnnnnnnnnnnnnnnnntnnnnnaantnnnnnnannnannnnnnnnnncnnnnnncntnaannnnngnnnnnnnnnnnnntnccnnnnnntnnttnnnnncnncnncnnnnnccnnnnnnnannttnnnnntncnnnnccnnnnnnnnnnnncnnnnnncannnntncnnnnnnnnnnnnnnntnnnntnnnnncnnngnnannnnnnnnnnnnnnnnnannnncnnnnnntnnanccnnnnnnannnnncnnnnnaannnncnncnnnnanccnnnnnancnannnnncnnnnnnntnnnnntnnnnnaanncnncnncnnnnnnnncnncnnnnncnnnnnnnnannnnnnntnnnnnnnnannnnnnntnnnannggnnnnncnncnaaannnnnncnnnnnnnnnnnnnnnnntngncnnnnnnncnnngnncntnntnnncntttnnnnngnnaaannnnantnnannnnnnncnnnnnnnnntnnnnnnnnntnnnnnnnnnncnnnnnnaaaaannnnnnnannnnnnnnnnntnnncnnnnnnncnntnnnnttnnnnnnnnnnnnnnnnnnnnnnnngnnnnnnnaannnnnnnnanncnaaannnnnntnnnnnnannnnnnnnngnnnnnnnnnnnnnnnnncnnnnnnncntncnnnnnnnnttnnncnntnnnnnnnnnccnnnnnccnnnnnnntnnanttnaannannccnncnncnnnnncnncnnnnnnnnnnnnnnnnncnnnnnnnnnngnncnnnnnnccccntnngnnnnnnannnnnnnnnnnnnnnnnnccnnnnnccnnnnnncnnnnnnnnnnnnannnntncccnnnnnnnnnnnnnnnnnnnnnnnnnnncnnnnnccnnnnnnnnnccnnnnnnnnngnnnccnnnnnnnnnnccnnncnnnnnnnngnnntnngatttcgcatcgatcacgcacgaaattcatcgcaatgtgcgagtgcaccggcatcgccgcgccgagcgcgacgtcgatcgcgagctgtccctcgggcatcgccgccgccgctggcacgagcgcggcgagcgcgatcgagctcgcgtgatagatcttcatcatcccgcgcccgcgatcggcgttcaggacgcccgacatcgcgcgcggcgtccacgcgcgaggcgatgtgacgcgcgcggtcccgnncgnccggacggacgtcgcgccgtcgagccgtcgggacggacgcgcgattttcaaaaacgcgcgtcacacgcgagcgacgacgacggcgacgacgacgggcgaacatgggaatcaagggcctgacggcgctgttgcaagacaacgcccccggggcgatcaaggagcaaaagttcgagtcctacctcgaccggcgcgtcgcgatcgacgcgtcgatgcacatttatcaattcatgatggtggtggggagacagggcgaacaacagctgacgaatgaggcgggagaggtgacgtcgcacttgcaggggatgttgaatcgaacgtgccgaatgctcgaggcgggaataaagccgatttacgtgttcgatgggaagccgccggtgatgaagggaggagagctggcgaagcgcaaggacaagcgagaagaggcggaggcggcgttgaaggcggcgagagaggcgggaaatcaagaagaggtggagaaactgtccaaaagaacggtgcgagtgagcaagcaacacagtcaagaggtgatgaaactcgcgtcgttgctcggagtgcccgtgttcgaggcgccgtgcgaagccgaggcgtcgtgcgcggcgatgtgcaaggcgggactggtgtgggcggtggcgacggaggatatggatacactcacgttcgccgcgccgcggttggcaagaaatttgatggcacccaagtctcaggacaagccggtgctggagtttgactacgacaaagttctagccggtctcgggctcacgcccgagcaattcatcgacatgtgcatcttgtgcgggtgcgactattgcgacaccattcgcgggatcggtccgaagacggcgttgaagcttatcaaagaacacggttccatcgaaaagattctcgaagagatcgacactgagaagtatcctccgcctcaggattgggattttgccggcgctcgtgagttgttcaaaaatcccgaagtcatggacacgacgggcatcgcattgagttggaaggcgccaaacgaggaaggattgattgactttttggtcaaggaaaagcaatttaacgaggaacgcgtgcgcgccgtgtgcgccaaagtcaagaaggcgcgccaaggtaaagcgtcgcaaaaccgcctcgagagcttcttcggcccgccgaccataatctccagtaccatcggcaagcgcaaggttgaagaaaagaagggtaaaaacggcaaggctggtctcgcgaacaaaaagtctaaaggcgtcagtggcttcagacgatcgaagaactgatagctatcgaatagaacactgtatgttgtcatgtcacaccacttcaaacacgctttgggcgcgacctccacaactcgccatgccgacgctagtgaatacccgcgccgtcgtgacatctgagcacgtgtccacgtctacgccgcgcgcgcgtggcgccgcatcacgcgttactgtcgcacacgcgtcgtcgttcagccgcaacgtgtgtgcatcttctctcgccttgctcgtgactttcacccaagcaaacgtagcgttcgcggcaccagctgcgccgtcatatagcggtgtggacccgagcaagagctccttcatccaaggattggtcgataagagcgagaaggacaaggcgaagaacgatcaagcgcgactcgataacttttacagacgagagtatcggataaaccgaatcgtcggtggcgaagttctgaaggagccgtgcgatccccgggatccagaatttggttatgagtgtaggccaatgctcccacgattgccgcaggatcgaggtgggttcgatgagcccttagagagagagaagactggatacgggaaagtactcgggacgcgagatgtcgacagagccgcagacgctctcgtcgctgcggcggtggacgagacgctcgaacgagcgatcgagactatcgatggcgaatcagacgcgaatggtgacgcggtagcccgctttgactcggatactgaattctcgccgagcgttcagggcttgtccgaatagttttatg

SEQ ID NO: 480 - DNA, 4000 bp, Escherichia coli
  misc_feature (1978)..(1978): n is a, c, g, or t
  misc_feature (1992)..(1992): n is a, c, g, or t
gtcgtttttgattcaattgatattgatataacttttcattaatttgtttgatttgaatttgaatatcattaattttttcaatactacttgccaatttagtaataatttcctcattaaatatattatcccaaagaccgtccgtacctaatacaataacatcaccttcttcaacggtgtattgatcaataattgcatcattaggtgaatccataatattaattggatcatttttcatttcatcgggtaaaactgataattggtatggagcattaaagtaatgttgtaattcatgagtttgatacacaacttttccatttctaataacaataaatccagagtccccaatattagatgaatatactgtaccagtagttttatctaaagtaagaatacaagctgtagaactaccggcttcaatttcatttttttctactactttattataccctccaacaagaatatcttgtggatctggccaactattagtagtagcacattccttacaacaattcattaaatcccatgcaaataaacttggatcataacctaagaaggtccaaccaccaacaccatctgctataccaagagcagaaaaacttggttgatctaaaatgaaatatgcatcttcaccacagtcttctttacaaattgctggtaatgtaccagatggacgtggattcttcggttgactagcactagcagtatatatactgaattttttaagatagacagatgattcagacatttcttcgtcttctttatctatataggatgatgctgatgaattctgaattaatgtagaatcaccactattaagtgttgagtcattataattaatagaatttgtattttgactcactatatttccaagtgagtttctattagaattattaaatgtgttattatttaatggaataattggatcggattccgatgaagttgtcattgttgagtttggtcgtgatatagtttcattactaacagaaagcaaattggtagctgacgttatatcatctgaattgtttatttcttcaaattcttcaccgatattaatatcttcatattcttcatcactatcttcatcttcattatcatcatcatcttcttcagaactattatcaactacatttgattttttattattaatttcatcatgaacactaacattaatatagtcaaaaatgacaggtgctttttcttttaattcttcattgtttttgctttcagtatcagattcattctcaggttcattctcattttcggatttttcttctgcttttgctttgttattagattcatttggtatacaataacttgttttgggtgtttgtggtggtgtaggtaatactgaacaggattctgatgttatatcaactgtttctatagttacagctatattttcagtgtttggttcagtattaatattatccgtggttgttgacatatcagtattattaatattttgtgactggtgattaatgtctttgagttgtttaatttcaggatttaattttatagtatttgaaggaggattattttctttattattcttattaatatttatattttttgaattaattaaaattgaagaaattaggttgtcagtttttatattatcgagttttttcctttttatttctatattattaagattttgatctgaatttgattcggtagataaatctaatttctttttattattactgttaagtatgattttattattaaaattatatcttaaattgttattgtcatttaaactacttttaatttttatagtttgacaattttccattgcaatataaaattattggtatatattattctttttttttctaaaatgaaaaattttacaaatatcttaatatattggttgggctatatttgtgtatatataataataaaataaattaattaaaataatatttttaaatattttcaaaaaaaaaaaaaaaaaaaattaggagttttttttttntttttttttaattntttttataaaattatttttatgtaaatattttgtattaattattactttataatataattattgcctatcaatatatatatttgaagttattaattattcaatatatattatttaattttatgatattaatattctattaatatcattttattatatttagaaattgatttttatataaagcttttgatttctttataacaaaatactattacttactagatattataaatgtaaatctgattatttttaaaaagtaattatcatttctttattaattatttgtttatggggtattagttttaattatttatataattttaattttatttttttaattatatatgtataatatggtattattttttttaaaaggtaattatattcattgtatatatttaaaataatataaaacatataaaatttattatttcttaaataataattatttacttagtataacaaacgtttcattatttataaaaattaaatcaataaaaaagagaaacaaatgttaaagaataataaaagggtaattattatttaagtaaatataaaatttttaaatttgagatttaaaacaaataatagtatttattaattatttaaaaataaaataaaaataaaaataaaataaaaataaaaataaaatataataaaaaaaaaatacaaaacaaggaatttgttataatttttattgcaaataataaataataaaaaaaaaaattttttttttaatttttattattatttaatttaaattatatttttatttaaaaaaaaaagtttctatatatatattacatattacaataaaaattaataaataatatattataatcgatatcaatatattttaacaaatttgatgttttgatatttctatttcggtaatctaattagttaattaatttaattatttatacatatataatcaatgtaatattaatatatcaaaaatttccttttaatatatgtaatgtatattacacaatatatatattatgcttaggtatatttaaattttatataattataaaaatatgtttttttgattttgtgttattgtttttacgacttctatcaaactttattatttttatatttataaaaatatatataatatatcataaataaattaataaatatattcaaaatataattaaaaattcatattttaatataattaatagtattttaaatatattattattgatactattttaatttaaatataaataaataaataaataaattaataaattaataaattaataaataaataaataaataaataaataaataatcaagcttgtaaattacaaaatttatatttcaactatttattttattattttttatttttatttttatttttattttttatttcaatttttattttattattttattttattttatatttatattcaactattttattttatttatcaattatctttaaaatatatattaatatatatatatatatattttaattttttaaaaacttatttttaaaaatcgttaaaaaaaaaaaaaaaaacaccacgttaaaaatttgattcaatagaaattaagtgtatattaattaaaaagcctttaattaattataattacagaaagaattattaaattattaaatatttatatttcatattatatgaaatatattataatatataatatatataatttatttattcatacatataataaattatatataatttattgattcatatatataataaaatttaaataatttttataattatagaaaagattcctgtttttgaatattttaaatccatttttatttatatatggcgatgttaaaattttatcagcctatgaaaacattgattttacttcataagaaaaaatgaaatcaatgaagttctcatatgttatgttagtatcggttatcattttagaaataatactgtttactaataataatttttatatctaaaacctttattaaataatatatatatttttaaaaaa

SEQ ID NO: 481 - DNA, 4000 bp, Escherichia coli
  misc_feature (1992)..(1992): n is a, c, g, or t
  misc_feature (2013)..(2013): n is a, c, g, or t
  misc_feature (2020)..(2020): n is a, c, g, or t
gatgtcaccccggacatcatcaagcgcttcaacaagggtgaccgaacagcagcggttcggcggattgcttcgcgtgtcggcgaaccggctttgattgcgcgggtgcgggagctctttgaggaagatgaagagttccgcggtcttgccacgcggtacctgcgcgagttcgagcgactgctgacccaggcgggcgaagcggaccccgatgaattgcttagcgcaagcctgctgactgcggatgttggcaaggcctatttgctgctttcccgcgcggttgaccggcataaatagataaaaatgaatctcgagtgatttgagttgccgtttggcagttcacctgtcgtgctgcctgtcagttggatgttatttcgttacaacagttttcatatggtaatttattataataaatgataatcgtacgtaatgttaattggttaatttgatcccgtgtggcaggttgatgcagggttagcgttacaaatggaactcgagatcgatgaaacggatcggaatctcctgcaggtcgtgcaggaggatgcgcgtttgtcgtttcgggaggtggcacgtcgtgttggcatgtcgactccggcggtcgccgagcgtattcgcaagctcgaaggcgccggagttatctcgggatataccgctcgggtagagcgtctggcgttgggggaagaggttggcgcttttctgcgcctgaccgtatccgatctggattatcgtcgcgtgaccggcctttgcgccacgttggatgctgtcattgaatgccatcacgtgaccggcgatgatagcttcttcattcgggtgtcggtccattcgatcgcggaactcgaggatgttatctcgcgatttcgcaagattggtgatgtgcgcagctcgttggtgctgtcgtcgcccgttgatggaaagccggtgcgtccggcctctcgagccacgaggtaaaggcatggcagttcctgatcaggatatggcggcgctcgccgagtctgtgtgttcgggtgaccgacgcgcgctggcgcgcgccataacacttatcgagtccacgcgtgacgatcaccgtgatcaggccgaggcgcttcttgaggcgctgctgccacataccggcaacgcaatgcggatcggcatctctggggttccgggggttggaaagtccaccttcattgaaaccttcggccagcatgtgattgcgaatggtcataaggtggccgtgttggctgtggatccgtcctctcagcggacagggggatcaattctgggtgacaagacgcggatggagcaactctcgcgcgcgcctgaggcatttatcagaccgtctccgacagcgggcacactgggcggtgttgcgcgccggacgcgggaggttctgctggcctgtgaagcttcgggcttcgatgttgtgctcgttgaaactgttggtgtcgggcaatccgagacagctgtctcggatctggtggatatgtttgtcctgctcctgctgcccggtggcggcgatgaactacagggtatcaagaaagggatcatggagctcgcggatctcgtggtggttaacaaggccgatggggatctgcgtgatgctgcgggccgggcagcttctgaatacgccaatgcgctccggttgttgcaccctctgactgccgactgggtacccgaggtgctgacctgctcgtcattggaaggagggggcgttcccgaaatttggacacgaatcggcgattttcgcgaaatcgttgaggaatcgggtgctttggagcgcaagcgtgcggatcaggcccggcgttggatgtggggtgaagttgatgaaaatctgctatcagccttccggcggcacccaaatgtccgggaaaaactctccgaactcgaagaaaaggtctctcaggcccgtgtcacgccctcggcggcagcccaaatgcttctggatgcttttcgcgggaccgaataacggtcaactcaggcttgaccaagccggttgcttaccctaaaaactccgccgancgcgccgtctttggcgcgaancttattnatggagcgaatcatgtcgcgccgctgcgccattactggcaaaggcgtgatgacgggtaacaacgtcagtcacgcacacaataaaacccgccgccggttcctgccgaacctgcagtcgaccatgctgtacagcgagacgctggcacgtggtgttcgtgtgagaatgtccacgaaggcgatccgcaccgttgagcacaagggcggcgttgatgccttcctgcgtgacaccgctgtttcgaagctgccgcgcgaactgcgtcagatgaagcgcgatctcgacaaggtggctgtggccagctaatcgtcgaatttaccgatgaagcgaaagcccgcgattcgcgggcttttttgctgcgtgcccaacgaatattgatcgtcgtatatttggggcgatacgcagccggatgatattgcgatgaccgactatcccggattttcttttgatgtcgccaagacggtgaccgccgatgcggattggccgggtgcggcccgtcggggtgttctgaaaacaccacacggaacaatccagactcctgcattcatcttctgcgcgacccgtggggcgatccgcggtgtcctgccggcacaagcgcgtgctgagggcacccagttcgttttgggaaatacctaccatctgatgttgcagcccggcgcagagcaaatcgcgaagctgggcggtttgcacaggatgatgggttgggatggcccgatgcttacggattcaggcggcttccagattttttctctcggcggcggtagcggagcaaaagagatcaagggaaatcgtggtgacgggcgcgacccctcgcttttgaagatcaccgaagagggggcctcttttcgttcctatattgatggcgcaaaaatcaccctgacccctgaggactcgatccggattcagcgtgggatcggtgccgatatcatcctcgtgcttgatgagtgtacgccctaccacgtggatcgggactacacggccaattccatggaaatgacccatcgctgggccaagcgatcacttgccgaattccagaaggatgcggaaggctcagcggggccgcaggcgctttatgggataacgcagggcggtgtgtatgaggaccttcgtcgcgagagttcggagttcacagcctcccaaccctattttggatacgctgttggtggatgcctgggtggggattccggcgagatggatgatgtggtcaagatggccatggccccgctcaatgccgcaacacctgtggcccgtccgatccatctgctcggcgttggcagcgtccgcgatgtctggaacggggcggcaaagggtattgataccttcgactgtgtaaacccgacccggctggcgcgccatggcagcgcctatatccgtccgggacttggtgagaccgaaaatggtcgggacttcatcaacatcaagaatgcgcgattccgtgatgatgagggcccgcttgatcccgaatgtgattgtgcgacatgcatgtctgtttcgcgtgcctatgtgcatcacctcgtgaaagcgagtgaaatcaatgccgggcaactgctggccattcacaatgtccggttcatgaatcggttgcttgaggccgttcgtgatgcgatcgaggccgataactacgcagcggcttggaagttctgggtcgaaggctaaggcctcgcctagggcagcagctcgaacatcagcaggaccgtcgggcgggatttcgaaaaatcattgtcgcttgcgacgtagagaattgtctgcccctgcagcccttgcgaggtcgcaatcgcttcaaaatttgctgtgatgaatggtgggtctagccgcgcgatttcttgcgtctggatcggtgcgcccgggcgaagctgtcgtttgggaattttcgcgaagcgtgttccctgcgggttggcggctgtgccccgccgttcgatgaccatgatgtcgccattcttcagcaacgtggccccggttggccgataaggctgatacagggcatag

SEQ ID NO: 482 - DNA, 4000 bp, Escherichia coli
  misc_feature (425)..(425): n is a, c, g, or t
  misc_feature (2499)..(2499): n is a, c, g, or t
  misc_feature (3015)..(3015): n is a, c, g, or t
  misc_feature (3360)..(3360): n is a, c, g, or t
  misc_feature (3749)..(3749): n is a, c, g, or t
catgttccacgagtcacagacgttgcattcgtgatagaaatgagcttcgtcgtgctaccaacgacggcaccaggactcacgacagcagtgaagcttctgaccgtggccgcagtggctccagccggtgtcacagaaactgtcaccggtgttgtacctgccgttgtgaaagtgtatgaaaccttataaccgcccgtatttgtattccaaacaccctgcgaaaggacaatgttgttcgcccgaagcacgacaaccattagcacgtcacttaccgcaacgtttccatatacatcagcgggaaagatgtacagcgaatattccgtaccagcaacaaaagcagcagagcttccttgtgcaggtaaaccagccgaagcagcaaatgaagcagttccgtcgaccaaggccggcgcaaccacattattcgtcgnaatgataatctctgggttcaccatcgtcaatgctactccactggcataggccaagacagagtattgatcggatgcgaacttaagtacaccttcggcgactaatccagttccggtactgtcggccttaatagtcaaagtttggattctcgcggtgtttttcgacttgatctggacaattacgtcatccgaaaatcgagccgtggtgatggcgtttccatatgaatctttcaaactcaacggtaacgataacgtagctccgggcgcgtacccacctgctggagttgaaggcttggtaatagtagacacacttccacttgccttcgcggcagctaaagtgaaagaaacaggcgagtccttcaccgcatgatagaccgaaggcgtgtccgcatcagctttagatactgaaagtgtgtaagtcccagacttcgttgtgtacaatttgtccacataaagacggcgattcatatccgcgtctcctgcaccggttcctagtggtgataaagtcaatgatacttgactttgaggtcgagaaagtttcgagagaaacgtcgtggaaatcgtgttcatatccaaattatattccaggttccattgatttatgatgaacgtcaaactcgatccaacaacgccagaaactggtgcaccggttaccttgaagtaatctgcctcgttcgtgaggaacacagaggcaatgtgggtagacgatccttgatcaagcgggtacccgtctactgagactgtaagtgtgtatgtttcagcgtacaggggagtaaatgatccatagtatgaaccaaccgaccctgttctatcagaaagagaattcgaaacttctgcagctctagttccggagatgctcccagtcacagtgacagaaaatgcagaggattgtccagaaacagcaatgctatttccaagacggtcgatagcaatgacataaaagtaagcaggttgaccaacttcgatgtattcactcggcgtggtcatcgtagacttagtacttggtacatcagaaaccacgttgatactggtagatgtactgagagtttcacgatcgaatggttggtctgtatccacattcaataggttacttatcttcgcagtgaacgtatatgttccaactgtattcactgacggaatcgaaacaagatgcttaccagcagagatacacgatgtgaaggtacctggttctgataactcaccaccggtgacaccccacgcccaattgaagttatcgcgcgtaacacacgtcggattcgaatagatatcttttatggatactattattttttgagttccaacacgtctagtgccgtaatccaccgtagttgacgaggtagcaatgtatgtgctcgcttttacaacaattgtcttggaaaccgcaagctcattcgtattgacgtaaatcttgaaggtgtacgagccagcaacttgtggagctgtgaacttaattttaatgtcatacggttcttgcgtatccaagggagtaatgacgatgctgtcagtaaatgaagacgacgcaggcgtactcgtgaacacgataccacttgcactcggaacttccttcttatttgtggcttggttcccttgagaatccaaaggatcaagcgtgaactcttcctcctcgcccgcaatcaaggatgtcgggaagtctaccgcgacagactcctcggaaatcggaccatgtctcacgtcgatgacaagtttattatcaacgaattgagaaatagcttcaccatattcatcacttccaatttttacatctaactcaatcaataccggagccttaatcaagagtgaaattgaatacgtgccatcaaaattgtctttccagggctgagcagacaggcccgcgttctcaacaatagcttggcccgcattctcatgaccagcagggaagacgcagctcgtgtaatcagcggcggtaccaaatttgcaaagatacgagacaaacaaactttggccaccattagagagatcgatcaagttatcaagtgtttgagaatctccagaattccagcctcgtgtgacaactgtgtaagtgacggtcccagtttgcgtgaagctctccttgccnccacccgttgcagaatctctttccacacaatcaacggcgtttgaattcaagggttccgtcgccgatccttcatcacagacgccgtacatatacgagttctctggactgatgacggtttcagaaacttcaaatgaagtgatcattgcgcctgaggccaattgaccaccaaacacaaagcttcccgcatcgttcttgaacaccaccatggcaatgtagaagcctgcatcagatgcatcgtaagaaatcgtgtacgtaccgtcagcattgtgcacggcgctcgcaggcacagcgctagatccgcacccagctggatcagccgctgctacagttctgctcgagactttgcaaacccgagcaacgaaatctttgtcttctccgtagactaatcccgaagatttcgacgaaattttgtttgggagaacgctatcgtacggagtcaactcaaaactggactggccagttcctttgttgtccgtagtagaagaagtatcggaatactgcaagtcccaaattgtntgcgcgacagacatcgtacccggaatgaccgtgaactcttcgtaatcggggatgaggtttgcttgaacaaccgtagtagaatcgtacggcgccccagtacccgcctgaacgaaataaccttcataagcgagcatcttacccactgtcggccaatattgcagagcgaaggtttcttcattctcatcgtcgtacaagctcatgaagtaagcctccactttaaagcgagtggcaattttcctatctactgtaaaatatgcattatcatcgtaaaccgcagccgaagcagagtcagctgttgatgctgtaatatccgtgccaatgactaagacattgttgatttctacngttggaacatctgttccgatgattgtaggcgaccacgtaacactacttcccgagtactggcttacttttgaggtgaagtaatgcgttttcaaggtagaagacaccgttccgatgttctttaatcccgtgttagaattggccatgaaaccctcggtgtcgagctcgatagtgtagccaactttgtcagttgacgatgctttgaacacggacgtagaacgctgcgtactcggttcaagcgagtaatattgcgccatatctcctgcagtcattctcgtaagtgttacggtgtacgtggtgcagagagagtccgtgcacgtcgcatccggagtatccttcgtactactgggaagaattgttaagctgaccgtaacgggggttccaggaactangtcatacacggtataactcgtatccgttccatggatggcatcacccgcatcatttgttttaacaacatcgttgattcggacatacgttcctgggtacaattcccactcaactgtggcggcgtcggcgccatgttggatgcttctggtgtacgcgagaacagaagcgtcaaacgaaagtggttcggtcacagcactaccagtaaaatcgacacctccaacatttaccgtaccgttgatatcgtacgcattaa

SEQ ID NO: 483 - DNA, 4000 bp, Escherichia coli
  misc_feature (1058)..(1058): n is a, c, g, or t
  misc_feature (1990)..(1990): n is a, c, g, or t
  misc_feature (1992)..(1992): n is a, c, g, or t
  misc_feature (2219)..(2219): n is a, c, g, or t
  misc_feature (2343)..(2343): n is a, c, g, or t
  misc_feature (2351)..(2351): n is a, c, g, or t
  misc_feature (2681)..(2681): n is a, c, g, or t
acatatggttgtacgagcttttttagcttccacccattgcttttttattcgttgcttcaattgcctgctttattattaaggaaaagtcttgttctttcatcacttttaacccttcggcagtagcgccgcctggagttgttacttgctctcttaaagacgcaggatctttggtttcatgcagcatttgtacagagccatacatcatttgaataactaaatctttggctgttttttcgtccacaccgtaagcagtagttgcatcaattaacgattctgcaaaataatataaaaatgccggtgcactgccagttacagccgttagctcatgtacttctttctctgaacactcatgcgcttcaccaattccttttaaaatcatttgaagcacttctttatgctcttttgtggcagaagttccaagtgtatacagtgacatcgattgtccaatcatagcagctgtatttggcataatccaagcgacaggcgtatcctgcggaagatgactttctaagtaactcggaccaattcctgccgctaacgttacgacaaattgttgatttaaatgagtcgaaagttccttgagcacggaaggatgggcctcgggaggcatcgctaaaataataacatccgaattgtcaacttcttggcgccaattttgcgtcgtttgtacgccgtacgttgtttcaacacgctgtaaccgctcaatatctccgttgtttgacatcaccactgcctcaatactgtcagcgctgctcgtaaccaaaccagccgctacagcttcagccattcgtcctgctccaataaataaaattcgctgttttttcatctgttactcccagttatatgtccagaattcttctctagttaataaacgttccatttgcggatagtcagataagcgatcgaagtcaattgcgttcatcattccttctgtttgagaacgatgggcttttaacgcttcaatttttttatctttcatcgctgttacatcaaaaataacatctggttctccaatatgttcaatacgatcttttgaaaacgcatgacaccaaacaacnggacgcttttcttttggcatacgttttaccgcttgaatcgtagctgcacccgtagcattatgatcagggtgtaccgcaaagccagggtaatgcgttaaaatgtgagtcggctttacatcgttaatgatttcttcaattttatctgcaaaaacatcaatatcaagaaattccagcgttttatcacgaagccctagcatacgcaagtcttgaatatctaaaacgttcgctaaatctaaaagttctttttttcggatttgaggtaaagtttcacggttagcaaacagcggtctacccatatttcgtcccatttcacctagcgtaacacaggcatatgtaacgggcgttcctttttgtctagcttgcgtgatcattcctgctgctccatatgcttcatcgtcaggatgcggaaatacaattaataatctttcttccatgttctattctcctctcttttctgttatgaaaacggatgttcacttaattgaagggcaactgctaaacgaccttcaaagtcatgcccagctagaagaagtcggccttcttcatcaatttcccaatctgttaatccctctgcataaatccatcctaaatcaatttgaagacctacacgataaggaccttctccagttatctttccgtttgaaatagtgactttaccattgcgaataaaagccccaactgtcattactttttcatttacgtgtgaagcatatgcaccgtttgtcgtttcaaggtgtacatatacgtctttatttaaaaatgtttgtatttttttttggactgtttctttatgaattggttgcacgcttgttactcctttctcatgttcataaattgtattgtactaaaaatcatgagcgaatcctaatgtttagttctagactttgaatttctttattccatcgttcataatcatacataaatgttaattntncccaagtcaacatactgatttcttgaatgtctataataatctcagcgagttcacgactaagcatacctagttcttttccttcgaccagcttttttttgtaacgattaaaagctggatctaattgttcaatttgtgcataaatttcatggatagagccatattgttgaataagaggcagtgcggctttttctcctacaccaggaacgcccggaatattgtcagatttntcaccaagcaatgcttttacgtccacccattgacgaggatgaatattgtattcttcttgaaagtgcttaaagccataaacaagatcgccaacctgctttttggcaataatttgcgaaatatgtngatctagnagctgaagcaagtctcggtcattgctatagatgtaccctggactttgcttttccttactccacttgcttgcaagtgctccaattaaatcatctgcttcataagaagacaatgacatttgataaatgcctactgtgtcaaaaaattgttttaacgtttcgtactgctgaatcagcggctcaggcagctctgctcttgtttgcttatatagggcgtatgtatctttacgttttgtatcctcacgcttaacatcccaagcgacgaaaatatggcttggctcatattggtgaatcaatgcatgcattttttgaatcgttactctcagggcattngtaaattggcccttactgtttcttgtcaacgctgcttcatctctgccataagaagtagcaaaataacagcggcttaataaattaaatccatcaattactaatagtgtttcgttcacatagtcacgtcctttgaaaactttgctcctttagcttttagagcaaacatactatagcacttgttctttgcacgcgtcaatgaagcgcacaaagctcaaaacacgcccatttttttctctcaatgtaaatgtagtataaagatgttaaattgttgttatgatttattcgtttgacttttagaacttttgactatcctataaaatgaggatgaaagatcaatcctacaaatgaaggtgaaaaaagtgaataaaaacacgatgattaaaacattaaaagttatatctgttgtgtcgcttctcgctttgttatttatcattgcttatgatcgttccatgtctacatccatgattattttgttcagttcgctcattttctttgtatttgtacttagcgacttttttttcgatcgcaagccgtggggattaaaaggccttcaattatatatatcactgatgttattcatcattgccatttttgaaatgcatcaagttgtcagttcactttgcgttatttccattatggctctaccaaaagttattgacgaattagcttaagtgtgaatgataaatgataaaatccatgatcacaatgatcatggattttattacgttttgagtaatttttcagagatgcgaagagcttcttctatgccaaatttacgcactaaactgatggcttcctttatttctcgttttttcaaatcatgggtcggatttaaatttaacaacacttgaataacaactaaatcccgcatcgtaaacatcatattctttttcatatctcgctgaaatgtatactgctcttttaagagccggtcacttattgctaacactttcgactccggaagatgtagctgcgctcctgcttcttgacaagaccacaattttttcactcgatcttcagcattcatatttgcgactcgtgcatatgtaatatcgctgttttcttgacgaatctctatctcttttaacgttggctttagcaccgtttttcgcttggagacttttttcttatcaactcctgtatccctgaggactctgccgtgaacggtgtaaatgtcgtattcattttctctttttacatcttgtttattgtattttggaaaataaccatttacaagcatcgttctcagcatatctaattctttttttaatccatgaacttcaatatatccaacagcataaatttctttgtggaatttt

SEQ ID NO: 484 - DNA, 4000 bp, Escherichia coli
  misc_feature (1988)..(1989): n is a, c, g, or t
  misc_feature (2005)..(2005): n is a, c, g, or t
  misc_feature (2067)..(2067): n is a, c, g, or t
  misc_feature (2955)..(2955): n is a, c, g, or t
ctcgtttcataaatttttcgttccagctctttatttaataaatcagggtcgtttggtttaaataatacttgaataatttctggcatagtttgaaaagctttttctccaagaacttttgggttcaccggaacttgtctccaaccatatatgctaaaattatttttagttaattcactttcgacaatagttttacaactttcttgagctgaataatcatttcttggtaaaaaaatcattccaacacaaatttctgagttatcgtaaaaatgaccagtaacttctattttctctataaagaaatctttgggaatctctacatggatcccagcaccatcaccagtttttccatctgcatcaactgctcctctgtgccaaactgcttttaatgcctcgattccatattctacaacttttctagatttttttccttcagtagatgctattaagcctacaccgcaagcatcatgttccatttcttctgaataaacatggtttttttttaataaatctaaatttttattatattttttcactaagctacttttgattgttttaaatttttattttctaaataatttttaatagattttgctacatctctaccatcttttatagcccaaactacaagtgatgctcccctaacaatatctccagctgcaaaaaccccttttaaatttgtttccattgtatcaaaatcaatttttacagtaccccacttagagacctgtaaatcattacaatcaaacaaagttggtaaatcctctggatcaaagccaagagccttaattaccatatcagcttttacctcaaaatcagaattactttgtatctcaggctttcttctacctgtctcatctggctctccgagtttaattttatctactattaatttttcaattttatttgttcctttaaattccttagggctggacaaccaaacaaattccacaccttcttcttctgcatttgcaacttcccttgcagaaccaggcatattttctttatctcttctatacagacattttactgattttgctttttgtctaattgatgttctaacacagtccattgctgtatctcctccaccaattacaacaacatcttttccctcagcattcaaagtaccattatcaaataactcaactttatcacccaagccttttttgtttgatgctgttaaaaaatccattgctggaaaaatattatttagatcgtttcctggaagatctatttctctggctttataaacacctgttgcaatcaatatagcatcatgtttttttcttaattgatctaatgatgcatcttttcctacttcaaaattttgaataaattcaattccactatcttcaagaagttttgttcttctctcaacaacaaatttttctaatttaaaattagggattccataaattaataaacctccagctcgatcatatcggtcataaattgttattttataaccctgttttcttaattcctccgctgcagctaatccagcaggaccagctccaattattccaatactttgatttctctcattttttaattctattggtttaacccagccattttcccaagcagtatctgttatatatttttctattgatccaattgtaactgttccatgtcctgattgctcaattacacaattaccttcgcacaatctatcttggggacaaattcttccacaaacttcgggcatattatttgtgctttgtgataattcgtaggcttctttgagccttccttcagcagttaatttaagccaatcggggatattattgcttaatgggcaatggacttggcaaaagggaactccacattgagaacacctgcttgattgttcgctggcttttttattgataaattctttatatatttcgttaaaatctttttttctattctcaacctctcttttaggtggagtttgttgacctatatcaacaaatttaagcattttttcagacataaaaaattttaattgnnggcaagttatatatanattttattaaataaagcataaaataggtcaactattatgaccttattaaagagtttattagntaaaaatcaaacgaatttgttttttgcatagctcatattcttaaatcgaattgttttacatagataatttttaagttacgacacaataatgtttcaaaatattatagaaattttaatcctatctttagttcagggagtatcagaatttttacctataagttcatcagcgcacttaataataattgaaacactatacgattttaaaaatagctcacttcttatagatattagtttacatcttgggtctttaacagccattatattttattttcgtaaagatcttttaaatttaaaaaacaaccaacaattattaacactaatattaattggatctttgccagtcattattactggatttattctttatcaaacagagataatttacttgttaagagatataaaaattattgcatggacaacattaatatttggtatcttattattcttagcagataaaaataattttaataaaaaaatttcaagcgacttaaatttgaaatcaattttactgataggcttatttcaaattttatcacttatacctggggtaagtagagctgggataactattacagctgcaagaattttaaaatttaatcgagtagactctagcaaaatatcatttctactatctataccagcacttggtggagcaagttttttaggcttgaaagatttaattaaagagtcttttgaattaaattatttagtattcttagcaatagtgacttcttttattttttcttatatgacggtaaaattttttttaatttatattaataaattttcaatgaatatttttgtaatttaccgaataattattgctgctattttatttttattaatctacaattaatttctattcaaaagtggtaaaagttgagatancaatactccacacaatataaaaaaacatcctattagattattaatatctaaaatttgactcaataaaaaccaagctgctattgtcgcaaatacaccttctaatgaaaatataattgcagctggagcaggtgaaatattttcttgggcatagatttgtaaaacaaaagctaaaccacctgacaatatacctgcatataaaatttgaaatttttcctctaatatattcactaaaataaaatcttcataaactagagctataataaaagaaaaaattgctactatgattgtttgaagtgcaccaatagtaaggggtaaattaaattttttaataataattcctgtaaaaattatatgggtactccaaaaaaaagcgcccagtaaaactaagctatcacccattcttacagtagcgtcataaaagttagttaataaataacctcccattacacacaacagaactgatggccaaacactccaatgaatgtcttttttatgaagaaaaaatacgataattgggaccattggtacgtagaatattgtaaaaaaagctgcatttgcaacatccgtatatattagggcaacctgttgtaatgctgagcctaaaaataaggataagccaattaatagaactagaatttgaaagttttttttatcttttttaataattaaattaattttttttttctcaaaaaataataccaaaggagctaatgccaaaaaaccaacgaaaaatctaactgaattaaaagtgaatggtccaatattatccattccagtatcttgagcaataaatgttgttccccaaatgaaagtgcacagtagagcactaaataaagacatcgattttgacatactctaaactgctaacttataagcaaagttttttccaagattttcttttaaatcattattaaatcttgcagcttcagctccatcgattattctgtgatcataggacaaagaaataggcaacattattctagtttcaaatttaccgtttatatagatttgctttttctgagacttaccaattcctaaaatagca

SEQ ID NO: 485 - DNA, 4000 bp, Escherichia coli
  misc_feature (906)..(906): n is a, c, g, or t
  misc_feature (2689)..(2689): n is a, c, g, or t
  misc_feature (3365)..(3365): n is a, c, g, or t
ccgcccccgcaatggacctgtaatttcagtgttggcaattgatctctcaatgtttccgctagaaccatcccaacggctcgcgacttatcacctacacagatcataaaaacatcaattgaacgacgcttcgggctagattcctcatcaagcatctcaactaaggccattaatcgctccatacccatagcaaagccaattgcagaagaactacgagcccctaattgttcaaccaaactatcatagcgcccgccagcacaaacagttccctgtgcgcctaaatcatttgttacccactcaaaaacagtatgcccataataatcaagcccacggaccaaccgacaattaattttatagtcaatacccatctcatccaatagctgggtgaggcctttaaaatgttgcaggctctcatcccccagagattccattaaggccggtgcctgttcgaccagagcctgtacttcaggatttttactgtcaagaatcctcagcggattggtctgtaatcggcgccgactgtcgtcatccaatgaagcaatatgttttgaaaaatagacaaccagtttttccctgtaatgttgccgctcttcctttgaacccaaagtattcaattgcaactctaatttatctcttattcctaactgagtccataatcgatgcccaagaacaattatctcagcatcaatatcaggacccgccataccgtatgtttctacccctaactgataaaattgtcgataacgacctttttgtggccgttcatgacgaaacataggtccgtaataccatagccgctgaatttggttatggagcaagccatgctcaataccggctcgaagacaccccgctgtcccttcaggtcttaatgtcaatgaatcaccgttacgatcattgaaggtatacatntctttttcaacaatatccgtaacttcaccaattgaccgattaaacagttcagttttctccacaataggcaaacggatttcctgataaccataactggctaaaacctgttgaaacaccttctcaacacgttgccagctttgcgtttgctcagggagtacatcatgcatccctcttactgcttgaatattctttgccataaacctatctaatttattttcaatacattaaaagtagtattgttcaaatacaactcttccgttgaatgttattatttatttcaccaacgattgggcttctttcgacgctggaaaatttttctttaaaatctggcgataatgttccgcggccgttaatcgacccaactggttttcgatcttatatgccaacaaaactgaagccgctgtttcaaaattaactgtgaaaaattgctcaatatagttacgtgctgaaagaaactcttggcgcacataattaagtgtcgctaattcaaataaagccggcgcaaaactattatttcgcgtaattgcttgtaaaaagtttttttcagcaagttgttgattccctttaatgagttgacagcgcccagcattactataagacaaccacgagcggttattaaaaggcaattcagcagctttgatgagcatctcaaagccattatcaacgtccccgtgctgacacaaaaaacgtccgtaattatttaatacacttgggttgtcaggagcgagactcaacgcacgtttataataaggcacggctaattccttcttacccgtcgtttcataaaaaatagccagtgcgttgtgacttgcgaaattttcatcatcaacggcatgggccttgttcaacttcgttaacgcaacgcggtaatcacccatttccatataacgaagacccaaatcaatatagagttgtgcatctgtcttgcgtttttctttatttctagcatcggttgcagcgcaggcggtcagaaaaaatactagcgctaaaataaaccatccctttaaattaaaaaaatcgttatttaatttagccataattttcagtaatgatcactcttgaactaaaaggtcaacccgaaaggggttcgacattgacacgatttttcgctaatttaacttgccgccgacttttatcggccacctttccgactaactggccacacgcagcatcaatatcctcaccccgtgtttttctgacggttgtgattattccggctttatgtaaaattcttctaaaggcctcaatagcacttgcttttgaacattcgtaacccgaatttgggaacgggttaaatggaattagattcattttacaaggcacgttttttaataatttaactaacgcgcgtgcatctgaaaatgtatcattcacgccatcaagcatcacatactcgaaagttataaaacctcgcggtgaatgtttaactacatcctgacaggcctccatgagttgcgctaagggatacttctgattaatcggaaccaactcattccgtaagacatcattaggagcatgtaacgataccgccacactgacatcgcaagctgctgataaacgatacatagctggaaccacacctgaagtactcacggtaacccgccgttttgataacccataagcgcaatcatccaacattaaattgactgctttgacagtattatcaaaattaagcaagggttcacccatgcccatcatgaccacattggttattctagactcatcacccagtcgatgattcgcaacccataattgaccaataatttcagcagtcgttaaattncgattaaacccttgttgggctgttgaacaaaaagaacaggctaacgcacaccccacttgtgatgacacacacaaggtcccgcgtttttcctcaggaataaaaaccgtttcaacacggttcccacaagccatttttaagacccatttaaccgtgccatctgtcgccaccttctcaaaaactatctcaggaaagttgatcatgcaatgctcttttaagtaagttctaagtgacttacttaaatcggtcatttcatcaaaatcagtcacccccgcctgataaagccatttaagcaattgttttgcacgaaagggtttttcacctattttcgagaaatacgcttctaaccccttcttgtcaaaatcaagcaggttgtcaaaattgcgcttaacgggttctgttacagagttcatcgtcattaaaaaagaacgcaatttcttctgctgctgtttctaacgcatctgaaccatggacagcattttcatcgatactctctgcaaaatcagcacgaatagtaccggcatcagcttccgctggattggttgcacccattaattctctattttttaaaactgcattttcaccttccagaacctgaaccaccacgggtcctgaaatcatgaaagaaaccagatcattaaaaaaaggacgctcgctatgtactgcataaaatccttcngcttgttcttgagtcaaatgcaacatctttgatgcaacaatgcgcaagccatttttttcaaaacgactgtaaatatcaccgattacatttttagcgactgcatcaggctttacaatagaaaacgtacgttcaactgccatttatctctccaaaataaaaaaatttaatttttaacaatgtccctacggatgattattaatatcctccccttctttctcgggtaacatcaaatcctctttacgaacacccagcgccaacacaacggggcttgcaataaatatagacgaataagttcccgtcaaaacacccactaataatgcgatagcaaaattatgaataatctcaccgcctaaaaaggctaaggcaattagtaccagcatagttgtgagtgatgtcatcaacgtccggctcaatgtctgatttaatgaattatttaaaataacctgcggtgttcctttcctaagatttctaaagttctcccgtatccgatcataaacaacaatagtgtcgtttaatgaatacccgataacggccaaaatagcggctaataccgttaaatcaaactctaacccaagaacagaaaaaaagcctagtgtaataacaacatcatgaatcaatgccgccactgaccccaa

SEQ ID NO: 486 - DNA, 4000 bp, Escherichia coli
  misc_feature (1)..(1150): n is a, c, g, or t
  misc_feature (1641)..(1641): n is a, c, g, or t
  misc_feature (1643)..(1649): n is a, c, g, or t
  misc_feature (1652)..(1654): n is a, c, g, or t
  misc_feature (1659)..(1659): n is a, c, g, or t
  misc_feature (1661)..(1664): n is a, c, g, or t
  misc_feature (1668)..(1668): n is a, c, g, or t
  misc_feature (1670)..(1675): n is a, c, g, or t
  misc_feature (1682)..(1689): n is a, c, g, or t
  misc_feature (1692)..(1692): n is a, c, g, or t
  misc_feature (1696)..(1697): n is a, c, g, or t
  misc_feature (1700)..(1700): n is a, c, g, or t
  misc_feature (1702)..(1703): n is a, c, g, or t
  misc_feature (1708)..(1711): n is a, c, g, or t
  misc_feature (1716)..(1716): n is a, c, g, or t
  misc_feature (1722)..(1722): n is a, c, g, or t
  misc_feature (1724)..(1727): n is a, c, g, or t
  misc_feature (1731)..(1731): n is a, c, g, or t
  misc_feature (1733)..(1733): n is a, c, g, or t
  misc_feature (1735)..(1737): n is a, c, g, or t
  misc_feature (1739)..(1739): n is a, c, g, or t
  misc_feature (1744)..(1744): n is a, c, g, or t
  misc_feature (1749)..(1749): n is a, c, g, or t
  misc_feature (1752)..(1766): n is a, c, g, or t
  misc_feature (1769)..(1774): n is a, c, g, or t
  misc_feature (1778)..(1779): n is a, c, g, or t
  misc_feature (1782)..(1790): n is a, c, g, or t
  misc_feature (1793)..(1806): n is a, c, g, or t
  misc_feature (1808)..(1817): n is a, c, g, or t
  misc_feature (1821)..(1822): n is a, c, g, or t
  misc_feature (1860)..(1865): n is a, c, g, or t
  misc_feature (1867)..(1872): n is a, c, g, or t
  misc_feature (1875)..(1878): n is a, c, g, or t
  misc_feature (1880)..(1884): n is a, c, g, or t
  misc_feature (1921)..(1921): n is a, c, g, or t
  misc_feature (1923)..(1928): n is a, c, g, or t
  misc_feature (1930)..(1946): n is a, c, g, or t
  misc_feature (1983)..(1984): n is a, c, g, or t
  misc_feature (1986)..(1991): n is a, c, g, or t
  misc_feature (1993)..(2001): n is a, c, g, or t
  misc_feature (2003)..(2008): n is a, c, g, or t
nnnnnnnnnnnnnnnnnnnnnnnnnnnnnnnnnnnnnnnnnnnnnnnnnnnnnnnnnnnnnnnnnnnnnnnnnnnnnnnnnnnnnnnnnnnnnnnnnnnnnnnnnnnnnnnnnnnnnnnnnnnnnnnnnnnnnnnnnnnnnnnnnnnnnnnnnnnnnnnnnnnnnnnnnnnnnnnnnnnnnnnnnnnnnnnnnnnnnnnnnnnnnnnnnnnnnnnnnnnnnnnnnnnnnnnnnnnnnnnnnnnnnnnnnnnnnnnnnnnnnnnnnnnnnnnnnnnnnnnnnnnnnnnnnnnnnnnnnnnnnnnnnnnnnnnnnnnnnnnnnnnnnnnnnnnnnnnnnnnnnnnnnnnnnnnnnnnnnnnnnnnnnnnnnnnnnnnnnnnnnnnnnnnnnnnnnnnnnnnnnnnnnnnnnnnnnnnnnnnnnnnnnnnnnnnnnnnnnnnnnnnnnnnnnnnnnnnnnnnnnnnnnnnnnnnnnnnnnnnnnnnnnnnnnnnnnnnnnnnnnnnnnnnnnnnnnnnnnnnnnnnnnnnnnnnnnnnnnnnnnnnnnnnnnnnnnnnnnnnnnnnnnnnnnnnnnnnnnnnnnnnnnnnnnnnnnnnnnnnnnnnnnnnnnnnnnnnnnnnnnnnnnnnnnnnnnnnnnnnnnnnnnnnnnnnnnnnnnnnnnnnnnnnnnnnnnnnnnnnnnnnnnnnnnnnnnnnnnnnnnnnnnnnnnnnnnnnnnnnnnnnnnnnnnnnnnnnnnnnnnnnnnnnnnnnnnnnnnnnnnnnnnnnnnnnnnnnnnnnnnnnnnnnnnnnnnnnnnnnnnnnnnnnnnnnnnnnnnnnnnnnnnnnnnnnnnnnnnnnnnnnnnnnnnnnnnnnnnnnnnnnnnnnnnnnnnnnnnnnnnnnnnnnnnnnnnnnnnnnnnnnnnnnnnnnnnnnnnnnnnnnnnnnnnnnnnnnnnnnnnnnnnnnnnnnnnnnnnnnnnnnnnnnnnnnnnnnnnnnnnnnnnnnnnnnnnnnnnnnnnnnnnnnnnnnnnnnnnnnnnnnnnnnnnnnnnnnnnnnnnnnnnnnnnnnnnnnnnnnnnnnnnnnnnnnnnnnnnnnnnnnnnnnnnnnnnnnnnnnnnnnnnnnnnnnnnnnnnnnnnnnnnnnnnnnnnnnnnnnnnnnnnnnnnnaatcttatagacgtattagacattatattgatacaactctagcccgtatctacaacagtagaaatcttatagacgtattagacaccagatacatcattcatatcactatatctacaacagtagaaatcttatagacgtattagacttgagaaaaaactatgagtgattaccaatctacaacagtagaaatcttatagacgtattagacagacaaagcaaaagaggcaataaaaccatctacaacagtagaaatcttatagacgtattagacttggttaattcttgatgattttgagaatctacaacagtagaaatcttatagacgtattagacacatcgacgagcctagagaagtaaaaatctacaacagtagaaatcttatagacgtattagacatatgacagaagtaacattcgagtgggatctacaacagtagaaatcttatagacgtattagacggaaaaaaggaaatgaatggggttataatctanannnnnnnaannntttanannnntttnannnnnntgaatannnnnnnnacnagannatntnnaaaannnnaaaanttttanannnntttnanannnangaatntttcnttnnnnnnnnnnnnnnnaannnnnnaaannttnnnnnnnnnttnnnnnnnnnnnnnntnnnnnnnnnnaccnnatctacaacagtagaaatcttatagacgtattagacannnnnnannnnnnaannnntnnnnnatctacaacagtagaaatcttatagacgtattagacncnnnnnnannnnnnnnnnnnnnnnnatctacaacagtagaaatcttatagacgtattagacnngnnnnnntnnnnnnnnnannnnnnaatctacaacagtagaaatcttatagacgtattagactcctcagatgctttatttaagccaaaaatatgcaaatagcttctgcgagaggctacgaacttttggcttaaataagcatttctgttttctcggacactgaggttttggcacgttaacatttccataaagatttatacccttgataatttgttaaaaaacaacaatttctgtctcttcattctttgcataaccatagcgtatcactttcttcttgcacccttcgcatacttggaagataacgatgctatccgctcctgtgaatttcttactatacttcaattctacctcatctaagatattacgcaagaccctgtcactattgcgaatttcaaaaactgaatattggatacggcgtccatacttcaaaatgaacttcgcaaagcgagctctcgtcttattcgattcgaaatcataggagagaatgagcatattagtgatctctatcaaaaaatggaaaatcgccctcattattaagtgtgtgataatagaatgccttcacgtattggaatatctcttccttctcttcaagaatagcctctgtgaaaagtttggcatatttggtactctgctcatatttcaagaaatattgtttggtcttagaagaataactgaaatctttctcatttatctgaccaagatgacgcatcttgagcaattttttctcgacgatacagcggaacggttcttcgatgtcgcacgaaagtgattttcgctggaaaaacaaccggtgataaaaaccacgatacgtatcaaaaccaaaaagacgaagcaaagaatcgatgtagttaaagagtattgtgtaaccgatatcaagcaaaatattattagaatcaatcttgccacgtggtacgcgccctcgccaatcaatatctgaaaaatattcctgaaaaaatttcttactcatatccccttctataccgagcaaagaacgattctcatctgcattatctatcttctgaaagagtacgttccgatattcaagaagaggtagattttcagatgagatagttttcataccacatgaagtcagtaaggaaagttgattgttaattttatttttcactatcaaacgtgctttttccattctctcttcatcggataaagcatattggttctcacgtaaaagataattcccgcttgcctctgatccaacagttgcatacgtttcgaggttgcgtttcagaaaatgtatagaaacaccattttcgagacatttgcgaaggagaacacttgtaaaagatatttcacccaagacaaaaagtgagatcactttcccgcaaggaatttgattgactaccttgccattctcctcataagcaatattttgattcttgattctgagacaatattccttctctttctctggttggatgaagagtatttgcttctctcggaaatcgggtagcgtaaacataatgatgttgataggaaattagagatctggtcgacataacgtctggtaaatacagtgttcacatttcttcagattcgtttccaaagaagagtgattcatctgaaaactttgcatagcatcaatcgtttcctcaaactctcgcaaactctctcctgttggtaatggcacagtgtatctcttgttatcttccagagaacggagaacaagttcttccacaggaaagcccatttcttgcagtgcgaaatattgagcatagagctggaagaaatagccctgatggaggaaagatatttttgactttcgttcaataagcatcttcttttccttgtcataaatatctatcttccctatgagtccatacttctcagaatacacctcaagtgcttgcaaaaatttcacatcggacgaatacgtgccagtatcaatagtcgtatgattgagcctgcctcgcgtttgtgcagaagtatggtacgtcgtatcagaaaaattctcatacaaagaatgaaaataaagtgatctcggacaaaagagaaaatcattg

SEQ ID NO: 487 - DNA, 4000 bp, Escherichia coli
aacacgtctcgacatcccttcgggcaaggcgttcaccgactatcgcatcgtgaccgaactgaaagctcccgacggcaaagtggtagcttccgacgaacaacagggtacgaaatacgacgaaaaaatattcaaccaacatttcgtggtagacaaccctgcactctggtcgcccgattctccggcactctattctgcagtgtccaaagtgtatgaaggcaatacgctgaaagacgaatataccacgcctttcggtatccgttctatcgaaatcatcccgaacaagggattctatctgaacggtgaacgtaccatatttaaaggtgtgtgtaatcatcacgacctcggcccgttgggcggcattgccaacgaagcagggatacgccgccagatacgcatcctgaaagatatgggttgtaacgctatccgcacttcccacaatatgccggctcccgaactgatccgtgcgtgcgacgaaatgggtatgatgattatgtccgaatcgttcgacgaatggaaagcagccaaattgcagaacggttatcataagatatttgacgaatgggcggaaaaagacttggtgaacctgattcaccagttccgcaacaatcccagtgtcgtgatgtggtgcatcggcaacgaggttcccgaccagtggaacggtgaccgcggaccgaagttgtcccgcttcctgcaagacatctgtcaccgcgaagatcccacccgccccgtcactcaaggcatggatgctccggacgcagtggtgaataataatatggctgccgtaatggatgtagccggattcaattaccgtccgcacaagtaccggacgaattacaagaagctcccgcaacagattatcctggggagtgagacagcttccacagtcagttcgcgcggcgtgtacaagttgcctgttgcccgacgttcgatgcagaagtatcccgatcatcaggcttcgtcatacgacgtagagcattgcggttggtctaacctgcccgaagacgactttatccagcacgaagacctcccctactgcatcggggaatttgtatggaccggcttcgattatctgggtgaaccgacaccgtactacaccgactggcccagccactcgtccctgttcggtatcatcgaccttgccggactgcccaaagaccgctattacctctaccgcagtcactggaacaaggacgtggaaactctccacatcctcccgcactggaactgggaaggacacgaaggcgaagtagtcccggtatttgtctacacgaactacccgtctgccgagctgtttatcaacggcaagagccagggcaaacgtaccaaggacctctccgtaacgattgacaacagtgccgactctgcttcaacagcaaatctcaaacgtcagcaacgttaccgcctgatgtggatgaatacgaaatatgaaccggggactgtcaaagtggtcgcttacgacaaagacggcaagcccgttgccgaaaaggaaatgcataccgcaggaaaaccgcatcatatcgaactgatagcggaccgctcgcaaatcaaagccgacggaaaagacttgtcattcgtcaccgtcagagtagtagacaaggacggtaatctctgtccgctggcggataacactatcagcttcaaagtgaaaggcgcaggaacttaccgcgcaggagccaacggaaacccggcttcactcgaatcgttccagaccccgaagatgaaggtattcagcggaatgatgaccgcaatcgtttcttcttcggacaagccgggaaagatcacactggaagctaccggaaaaggattggcgaagggtgtgttgaatattgaaagcaagtagaaaataaaacaaatataagaggctgactaaccagtcgacagtatctaaaactctcctccttcaggaaggaggagtacccgtagggggaggtggtaggtgaatgcgtaagtccattattatcagcattgtgtatccacctaccaccccggctttcagccacccctccttccccggaaggaggggaatggaagatactaccgacttgttaaacagcctcttatttctttataaaagacctgttattataaactcttttgacaaatacgctcgaacaagaaaatcagaacgcaacccaccgcatagcaggcaatgtctttccaatcgaacgtagatccgagaataatttttgccgcccggttcgtaatccctaaggtttccaccaactgaaagtattgcatcacttctataaagcaggcaaaaagaaatacatagaacggcattctcggaatccccgttggcagaaatatacggacaaaactatacacaagcacaaccaccagtacatctccaatgtaaggacggacaaaattatcacatacgtacaaagctatcaatacctctatacaaaatattaccagaaagctgataatgtaaaatatccttttcttcatccttctcttactcacagggttaaaaatccgttttgatctgcaaaggtacaactttttgtttctccgtcaaatacttccagtaccggacaggcatatcctgcttgtgctttctcggattcatacgttccttgatgcagatagccttgaagtacgttttccaaagttgctggaaaagtttttcatccttatccataaggctctcgtccagcattcccgttatcaggtgagcttcgcggctgtcgtcatcgaaggaaatcagcgtcacctcctgcaaatcataataaaaaccgtagcggcgtttcatatcataaataatccacttctgattggcaaagcggtctttgaaatgctgcaccgtaagcggcagagcattatactgcggttcgaaagccgcgaaaaacgtgccgtccgccgccttctgaaaacggacaaactgcattatatgcacacgctcaccgtccaccttcttccaaatctgtgcaagccggaggacgtccggatcggcaaaattcgtttcgatagaacgcggcgcatcaatcgccttgcggatataacggaaaataagaataccgacctccggaagctccgacagccaactctgcgtgagacagccaagcgcggaagacgaaaccttcttctgcaatccccgccacacacgcgccgccttctcctcgtcagtgactacggtgtgcagatcgtcacagaataacggcaaagcgtctccttccgacagcagcgcatcgggaaaggtcttgcggaagtaagcgtcgaaaacagccgtcagcagaccgtcgaaggttttatcgtagaggtagacattcattcgcaaagttcaattcattcgctaaaatcgagtaacagttgccgttcatccaccttctttttcggcttcggcagcaacagactgcgtacccgttgcggcgaaagctcgttcacggtcgccatttggagaggcagttccttgcacgtaatgaaatactgtgccttcttcatcaccactccgatcttcttcaattcataaaatcccagtcgcgagaaacggcgggaagcgacaatcagcttcgccgatttcacaccgatgccgggcacacggaggagcatttcgtaatccgccttgttgatatcgaccgggaactgctccggatgacgcaacgcccacgagagtttcggatctatttcgaggtcgagatcgggatacgcatcatccactatctcatctactttaaactgatagaaacgcagcagccagtccgcctggtagagacggttttcacgcacgagaggcggctgcttcaatgccggaagacgcttgtcatacgtatttacggagacgtatccggaatagtagacacgcttcatcgtcgggcgcccgtagagtgccgacgagaggaaaagaatatccttatccgattcggaggtcgctcctacgatcatctgcgtgctctgtcccgcaggcgcaaagcgcggggcatggcggaacttctgccgttcctccttactttccaatactccctgctggatgtatttcatcggggcgaaaacgctttta

SEQ ID NO: 488 - DNA, 4000 bp, Escherichia coli
  misc_feature (1934)..(1934): n is a, c, g, or t
  misc_feature (1940)..(1941): n is a, c, g, or t
  misc_feature (1946)..(1946): n is a, c, g, or t
  misc_feature (1961)..(1961): n is a, c, g, or t
  misc_feature (1967)..(1967): n is a, c, g, or t
  misc_feature (1973)..(1974): n is a, c, g, or t
  misc_feature (1976)..(1976): n is a, c, g, or t
  misc_feature (1988)..(1989): n is a, c, g, or t
  misc_feature (1994)..(1994): n is a, c, g, or t
  misc_feature (2000)..(2000): n is a, c, g, or t
  misc_feature (2449)..(2450): n is a, c, g, or t
  misc_feature (2452)..(2457): n is a, c, g, or t
  misc_feature (2459)..(2466): n is a, c, g, or t
  misc_feature (2468)..(2468): n is a, c, g, or t
  misc_feature (2470)..(2473): n is a, c, g, or t
  misc_feature (2475)..(2476): n is a, c, g, or t
  misc_feature (2479)..(2481): n is a, c, g, or t
  misc_feature (2483)..(2485): n is a, c, g, or t
  misc_feature (2488)..(2498): n is a, c, g, or t
  misc_feature (2500)..(2500): n is a, c, g, or t
  misc_feature (2502)..(2505): n is a, c, g, or t
  misc_feature (2508)..(2508): n is a, c, g, or t
  misc_feature (2510)..(2510): n is a, c, g, or t
  misc_feature (2512)..(2513): n is a, c, g, or t
  misc_feature (2515)..(2515): n is a, c, g, or t
  misc_feature (2518)..(2519): n is a, c, g, or t
  misc_feature (2521)..(2523): n is a, c, g, or t
  misc_feature (2526)..(2527): n is a, c, g, or t
  misc_feature (2529)..(2533): n is a, c, g, or t
  misc_feature (2535)..(2537): n is a, c, g, or t
  misc_feature (2540)..(2540): n is a, c, g, or t
  misc_feature (2543)..(2543): n is a, c, g, or t
  misc_feature (2545)..(2545): n is a, c, g, or t
  misc_feature (2547)..(2550): n is a, c, g, or t
  misc_feature (2553)..(2553): n is a, c, g, or t
  misc_feature (2555)..(2555): n is a, c, g, or t
  misc_feature (2557)..(2557): n is a, c, g, or t
  misc_feature (2560)..(2560): n is a, c, g, or t
  misc_feature (2562)..(2563): n is a, c, g, or t
  misc_feature (2566)..(2566): n is a, c, g, or t
  misc_feature (2568)..(2569): n is a, c, g, or t
  misc_feature (2571)..(2579): n is a, c, g, or t
  misc_feature (2583)..(2583): n is a, c, g, or t
  misc_feature (2585)..(2585): n is a, c, g, or t
  misc_feature (2588)..(2589): n is a, c, g, or t
  misc_feature (2591)..(2591): n is a, c, g, or t
  misc_feature (2593)..(2594): n is a, c, g, or t
  misc_feature (2596)..(2597): n is a, c, g, or t
  misc_feature (2599)..(2600): n is a, c, g, or t
  misc_feature (2602)..(2608): n is a, c, g, or t
  misc_feature (2610)..(2610): n is a, c, g, or t
  misc_feature (2613)..(2618): n is a, c, g, or t
  misc_feature (2620)..(2621): n is a, c, g, or t
  misc_feature (2623)..(2625): n is a, c, g, or t
  misc_feature (2627)..(2628): n is a, c, g, or t
  misc_feature (2631)..(2634): n is a, c, g, or t
  misc_feature (2637)..(2638): n is a, c, g, or t
  misc_feature (2640)..(2642): n is a, c, g, or t
  misc_feature (2644)..(2650): n is a, c, g, or t
  misc_feature (2653)..(2665): n is a, c, g, or t
  misc_feature (2667)..(2671): n is a, c, g, or t
  misc_feature (2674)..(2674): n is a, c, g, or t
  misc_feature (2676)..(2679): n is a, c, g, or t
  misc_feature (2683)..(2683): n is a, c, g, or t
  misc_feature (2686)..(2686): n is a, c, g, or t
  misc_feature (2688)..(2689): n is a, c, g, or t
  misc_feature (2691)..(2692): n is a, c, g, or t
  misc_feature (2694)..(2694): n is a, c, g, or t
  misc_feature (2696)..(2698): n is a, c, g, or t
  misc_feature (2700)..(2700): n is a, c, g, or t
  misc_feature (2702)..(2708): n is a, c, g, or t
  misc_feature (2710)..(2720): n is a, c, g, or t
  misc_feature (2722)..(2722): n is a, c, g, or t
  misc_feature (2724)..(2724): n is a, c, g, or t
  misc_feature (2726)..(2727): n is a, c, g, or t
  misc_feature (2729)..(2729): n is a, c, g, or t
  misc_feature (2731)..(2732): n is a, c, g, or t
  misc_feature (2734)..(2736): n is a, c, g, or t
  misc_feature (2738)..(2738): n is a, c, g, or t
  misc_feature (2740)..(2741): n is a, c, g, or t
  misc_feature (2743)..(2743): n is a, c, g, or t
  misc_feature (2745)..(2746): n is a, c, g, or t
  misc_feature (2751)..(2751): n is a, c, g, or t
  misc_feature (2754)..(2755): n is a, c, g, or t
  misc_feature (2757)..(2759): n is a, c, g, or t
  misc_feature (2763)..(2771): n is a, c, g, or t
  misc_feature (2773)..(2773): n is a, c, g, or t
  misc_feature (2775)..(2777): n is a, c, g, or t
  misc_feature (2779)..(2780): n is a, c, g, or t
  misc_feature (2782)..(2784): n is a, c, g, or t
  misc_feature (2786)..(2787): n is a, c, g, or t
  misc_feature (2790)..(2795): n is a, c, g, or t
  misc_feature (2797)..(2807): n is a, c, g, or t
  misc_feature (2809)..(2814): n is a, c, g, or t
  misc_feature (2817)..(2817): n is a, c, g, or t
  misc_feature (2819)..(2824): n is a, c, g, or t
  misc_feature (2826)..(2827): n is a, c, g, or t
  misc_feature (2829)..(2829): n is a, c, g, or t
  misc_feature (2831)..(2832): n is a, c, g, or t
  misc_feature (2835)..(2837): n is a, c, g, or t
  misc_feature (2839)..(2842): n is a, c, g, or t
  misc_feature (2844)..(2845): n is a, c, g, or t
  misc_feature (2847)..(2848): n is a, c, g, or t
  misc_feature (2850)..(2852): n is a, c, g, or t
  misc_feature (2855)..(2855): n is a, c, g, or t
  misc_feature (2859)..(2862): n is a, c, g, or t
  misc_feature (2865)..(2868): n is a, c, g, or t
  misc_feature (2874)..(2874): n is a, c, g, or t
  misc_feature (2878)..(2887): n is a, c, g, or t
  misc_feature (2889)..(2892): n is a, c, g, or t
  misc_feature (2894)..(2898): n is a, c, g, or t
  misc_feature (2901)..(2902): n is a, c, g, or t
  misc_feature (2904)..(2904): n is a, c, g, or t
  misc_feature (2906)..(2910): n is a, c, g, or t
  misc_feature (2912)..(2914): n is a, c, g, or t
  misc_feature (2916)..(2918): n is a, c, g, or t
  misc_feature (2921)..(2921): n is a, c, g, or t
  misc_feature (2923)..(2923): n is a, c, g, or t
  misc_feature (2925)..(2925): n is a, c, g, or t
  misc_feature (2930)..(2931): n is a, c, g, or t
  misc_feature (2933)..(2937): n is a, c, g, or t
  misc_feature (2939)..(2943): n is a, c, g, or t
  misc_feature (2946)..(2947): n is a, c, g, or t
  misc_feature (2949)..(2955): n is a, c, g, or t
  misc_feature (2957)..(2958): n is a, c, g, or t
  misc_feature (2963)..(2967): n is a, c, g, or t
  misc_feature (2969)..(2973): n is a, c, g, or t
  misc_feature (2975)..(2975): n is a, c, g, or t
  misc_feature (2978)..(2983): n is a, c, g, or t
  misc_feature (2985)..(2986): n is a, c, g, or t
  misc_feature (2988)..(2990): n is a, c, g, or t
  misc_feature (2993)..(2999): n is a, c, g, or t
  misc_feature (3001)..(3002): n is a, c, g, or t
  misc_feature (3006)..(3009): n is a, c, g, or t
  misc_feature (3011)..(3011): n is a, c, g, or t
  misc_feature (3014)..(3014): n is a, c, g, or t
  misc_feature (3018)..(3021): n is a, c, g, or t
  misc_feature (3024)..(3025): n is a, c, g, or t
  misc_feature (3027)..(3028): n is a, c, g, or t
  misc_feature (3031)..(3032): n is a, c, g, or t
  misc_feature (3034)..(3038): n is a, c, g, or t
  misc_feature (3041)..(3041): n is a, c, g, or t
  misc_feature (3043)..(3044): n is a, c, g, or t
  misc_feature (3046)..(3048): n is a, c, g, or t
  misc_feature (3051)..(3054): n is a, c, g, or t
  misc_feature (3057)..(3058): n is a, c, g, or t
  misc_feature (3060)..(3061): n is a, c, g, or t
  misc_feature (3063)..(3063): n is a, c, g, or t
  misc_feature (3065)..(3072): n is a, c, g, or t
  misc_feature (3075)..(3077): n is a, c, g, or t
  misc_feature (3079)..(3084): n is a, c, g, or t
  misc_feature (3090)..(3090): n is a, c, g, or t
  misc_feature (3093)..(3093): n is a, c, g, or t
  misc_feature (3095)..(3104): n is a, c, g, or t
  misc_feature (3106)..(3110): n is a, c, g, or t
  misc_feature (3112)..(3116): n is a, c, g, or t
  misc_feature (3118)..(3118): n is a, c, g, or t
  misc_feature (3121)..(3123): n is a, c, g, or t
  misc_feature (3125)..(3127): n is a, c, g, or t
  misc_feature (3129)..(3130): n is a, c, g, or t
  misc_feature (3135)..(3137): n is a, c, g, or t
  misc_feature (3139)..(3151): n is a, c, g, or t
  misc_feature (3153)..(3153): n is a, c, g, or t
  misc_feature (3155)..(3160): n is a, c, g, or t
  misc_feature (3163)..(3164): n is a, c, g, or t
  misc_feature (3166)..(3169): n is a, c, g, or t
  misc_feature (3171)..(3177): n is a, c, g, or t
  misc_feature (3180)..(3181): n is a, c, g, or t
  misc_feature (3183)..(3185): n is a, c, g, or t
  misc_feature (3187)..(3192): n is a, c, g, or t
  misc_feature (3196)..(3198): n is a, c, g, or t
  misc_feature (3201)..(3202): n is a, c, g, or t
  misc_feature (3204)..(3210): n is a, c, g, or t
  misc_feature (3214)..(3222): n is a, c, g, or t
  misc_feature (3226)..(3226): n is a, c, g, or t
  misc_feature (3230)..(3230): n is a, c, g, or t
  misc_feature (3232)..(3239): n is a, c, g, or t
  misc_feature (3241)..(3242): n is a, c, g, or t
  misc_feature (3244)..(3244): n is a, c, g, or t
  misc_feature (3246)..(3249): n is a, c, g, or t
  misc_feature (3252)..(3252): n is a, c, g, or t
  misc_feature (3254)..(3256): n is a, c, g, or t
  misc_feature (3259)..(3261): n is a, c, g, or t
  misc_feature (3263)..(3267): n is a, c, g, or t
  misc_feature (3269)..(3269): n is a, c, g, or t
  misc_feature (3271)..(3275): n is a, c, g, or t
  misc_feature (3277)..(3282): n is a, c, g, or t
  misc_feature (3284)..(3285): n is a, c, g, or t
  misc_feature (3287)..(3287): n is a, c, g, or t
  misc_feature (3290)..(3293): n is a, c, g, or t
  misc_feature (3298)..(3303): n is a, c, g, or t
  misc_feature (3307)..(3309): n is a, c, g, or t
  misc_feature (3311)..(3315): n is a, c, g, or t
  misc_feature (3317)..(3317): n is a, c, g, or t
  misc_feature (3319)..(3322): n is a, c, g, or t
  misc_feature (3324)..(3331): n is a, c, g, or t
  misc_feature (3333)..(3335): n is a, c, g, or t
  misc_feature (3337)..(3339): n is a, c, g, or t
  misc_feature (3341)..(3341): n is a, c, g, or t
  misc_feature (3343)..(3346): n is a, c, g, or t
  misc_feature (3349)..(3349): n is a, c, g, or t
  misc_feature (3352)..(3358): n is a, c, g, or t
  misc_feature (3360)..(3362): n is a, c, g, or t
  misc_feature (3365)..(3366): n is a, c, g, or t
  misc_feature (3368)..(3369): n is a, c, g, or t
  misc_feature (3372)..(3376): n is a, c, g, or t
  misc_feature (3378)..(3379): n is a, c, g, or t
  misc_feature (3384)..(3384): n is a, c, g, or t
  misc_feature (3386)..(3386): n is a, c, g, or t
  misc_feature (3388)..(3396): n is a, c, g, or t
  misc_feature (3398)..(3405): n is a, c, g, or t
  misc_feature (3407)..(3408): n is a, c, g, or t
  misc_feature (3410)..(3413): n is a, c, g, or t
  misc_feature (3415)..(3418): n is a, c, g, or t
  misc_feature (3420)..(3421): n is a, c, g, or t
  misc_feature (3424)..(3424): n is a, c, g, or t
  misc_feature (3426)..(3428): n is a, c, g, or t
  misc_feature (3430)..(3433): n is a, c, g, or t
  misc_feature (3436)..(3439): n is a, c, g, or t
  misc_feature (3441)..(3441): n is a, c, g, or t
  misc_feature (3445)..(3448): n is a, c, g, or t
  misc_feature (3451)..(3455): n is a, c, g, or t
  misc_feature (3458)..(3459): n is a, c, g, or t
  misc_feature (3461)..(3466): n is a, c, g, or t
  misc_feature (3469)..(3470): n is a, c, g, or t
  misc_feature (3472)..(3472): n is a, c, g, or t
  misc_feature (3474)..(3476): n is a, c, g, or t
  misc_feature (3478)..(3479): n is a, c, g, or t
  misc_feature (3481)..(3481): n is a, c, g, or t
  misc_feature (3483)..(3488): n is a, c, g, or t
  misc_feature (3490)..(3491): n is a, c, g, or t
  misc_feature (3493)..(3493): n is a, c, g, or t
  misc_feature (3495)..(3499): n is a, c, g, or t
  misc_feature (3501)..(3502): n is a, c, g, or t
  misc_feature (3504)..(3506): n is a, c, g, or t
  misc_feature (3508)..(3508): n is a, c, g, or t
  misc_feature (3510)..(3522): n is a, c, g, or t
  misc_feature (3525)..(3534): n is a, c, g, or t
  misc_feature (3536)..(3547): n is a, c, g, or t
  misc_feature (3549)..(3551): n is a, c, g, or t
  misc_feature (3554)..(3555): n is a, c, g, or t
  misc_feature (3557)..(3558): n is a, c, g, or t
  misc_feature (3561)..(3561): n is a, c, g, or t
  misc_feature (3566)..(3567): n is a, c, g, or t
  misc_feature (3569)..(3571): n is a, c, g, or t
  misc_feature (3573)..(3573): n is a, c, g, or t
  misc_feature (3575)..(3578): n is a, c, g, or t
  misc_feature (3580)..(3580): n is a, c, g, or t
  misc_feature (3584)..(3585): n is a, c, g, or t
  misc_feature (3587)..(3587): n is a, c, g, or t
  misc_feature (3591)..(3591): n is a, c, g, or t
  misc_feature (3593)..(3595): n is a, c, g, or t
  misc_feature (3598)..(3598): n is a, c, g, or t
  misc_feature (3604)..(3604): n is a, c, g, or t
  misc_feature (3606)..(3609): n is a, c, g, or t
  misc_feature (3613)..(3616): n is a, c, g, or t
  misc_feature (3618)..(3619): n is a, c, g, or t
  misc_feature (3622)..(3624): n is a, c, g, or t
  misc_feature (3626)..(3626): n is a, c, g, or t
  misc_feature (3630)..(3640): n is a, c, g, or t
  misc_feature (3642)..(3643): n is a, c, g, or t
  misc_feature (3645)..(3654): n is a, c, g, or t
  misc_feature (3658)..(3658): n is a, c, g, or t
  misc_feature (3662)..(3663): n is a, c, g, or t
  misc_feature (3666)..(3666): n is a, c, g, or t
  misc_feature (3668)..(3669): n is a, c, g, or t
  misc_feature (3671)..(3671): n is a, c, g, or t
  misc_feature (3673)..(3673): n is a, c, g, or t
  misc_feature (3675)..(3675): n is a, c, g, or t
  misc_feature (3677)..(3678): n is a, c, g, or t
  misc_feature (3680)..(3681): n is a, c, g, or t
  misc_feature (3683)..(3684): n is a, c, g, or t
  misc_feature (3687)..(3691): n is a, c, g, or t
  misc_feature (3693)..(3693): n is a, c, g, or t
  misc_feature (3696)..(3699): n is a, c, g, or t
  misc_feature (3702)..(3702): n is a, c, g, or t
  misc_feature (3704)..(3704): n is a, c, g, or t
  misc_feature (3706)..(3709): n is a, c, g, or t
  misc_feature (3711)..(3716): n is a, c, g, or t
  misc_feature (3718)..(3719): n is a, c, g, or t
  misc_feature (3721)..(3721): n is a, c, g, or t
  misc_feature (3723)..(3727): n is a, c, g, or t
  misc_feature (3729)..(3738): n is a, c, g, or t
  misc_feature (3740)..(3742): n is a, c, g, or t
  misc_feature (3744)..(3745): n is a, c, g, or t
  misc_feature (3747)..(3747): n is a, c, g, or t
  misc_feature (3750)..(3752): n is a, c, g, or t
  misc_feature (3754)..(3755): n is a, c, g, or t
  misc_feature (3757)..(3763): n is a, c, g, or t
  misc_feature (3766)..(3767): n is a, c, g, or t
  misc_feature (3771)..(3771): n is a, c, g, or t
  misc_feature (3773)..(3775): n is a, c, g, or t
  misc_feature (3777)..(3780): n is a, c, g, or t
  misc_feature (3782)..(3783): n is a, c, g, or t
  misc_feature (3786)..(3789): n is a, c, g, or t
  misc_feature (3791)..(3791): n is a, c, g, or t
  misc_feature (3793)..(3793): n is a, c, g, or t
  misc_feature (3795)..(3795): n is a, c, g, or t
  misc_feature (3797)..(3799): n is a, c, g, or t
  misc_feature (3801)..(3801): n is a, c, g, or t
  misc_feature (3803)..(3803): n is a, c, g, or t
  misc_feature (3805)..(3805): n is a, c, g, or t
  misc_feature (3807)..(3809): n is a, c, g, or t
  misc_feature (3811)..(3819): n is a, c, g, or t
  misc_feature (3821)..(3823): n is a, c, g, or t
  misc_feature (3825)..(3826): n is a, c, g, or t
  misc_feature (3829)..(3829): n is a, c, g, or t
  misc_feature (3833)..(3834): n is a, c, g, or t
  misc_feature (3837)..(3841): n is a, c, g, or t
  misc_feature (3843)..(3843): n is a, c, g, or t
  misc_feature (3845)..(3848): n is a, c, g, or t
  misc_feature (3850)..(3850): n is a, c, g, or t
  misc_feature (3852)..(3852): n is a, c, g, or t
  misc_feature (3855)..(3865): n is a, c, g, or t
  misc_feature (3867)..(3874): n is a, c, g, or t
  misc_feature (3877)..(3880): n is a, c, g, or t
  misc_feature (3882)..(3885): n is a, c, g, or t
  misc_feature (3887)..(3888): n is a, c, g, or t
  misc_feature (3890)..(3894): n is a, c, g, or t
  misc_feature (3896)..(3897): n is a, c, g, or t
  misc_feature (3899)..(3903): n is a, c, g, or t
  misc_feature (3905)..(3906): n is a, c, g, or t
  misc_feature (3908)..(3908): n is a, c, g, or t
  misc_feature (3910)..(3915): n is a, c, g, or t
  misc_feature (3917)..(3919): n is a, c, g, or t
  misc_feature (3921)..(3923): n is a, c, g, or t
  misc_feature (3927)..(3927): n is a, c, g, or t
  misc_feature (3929)..(3935): n is a, c, g, or t
  misc_feature (3937)..(3938): n is a, c, g, or t
  misc_feature (3940)..(3942): n is a, c, g, or t
  misc_feature (3944)..(3950): n is a, c, g, or t
  misc_feature (3952)..(3953): n is a, c, g, or t
  misc_feature (3955)..(3959): n is a, c, g, or t
  misc_feature (3961)..(3963): n is a, c, g, or t
  misc_feature (3965)..(3967): n is a, c, g, or t
  misc_feature (3969)..(3978): n is a, c, g, or t
  misc_feature (3981)..(3986): n is a, c, g, or t
  misc_feature (3988)..(3988): n is a, c, g, or t
  misc_feature (3990)..(3992): n is a, c, g, or t
  misc_feature (3994)..(3994): n is a, c, g, or t
  misc_feature (3996)..(3996): n is a, c, g, or t
gcagttatgcttgccggaaacgatagaggaactgtttctggaatatcttcccaggttggcagagagcggattggtactggatggcatcggtaacgtgcgaggctaccggttcatgggttgtccgggcattgacgggtttgccatgctggaacgtcttcatcaggccaagttgaacggtagcggtaaactggagcgttttgtccttgacatcgatatggaggatgacggcaggctgctcgggaaatactacgattatggtacctatacctccaccggagcgatagacaaccgtcattccggattgcgtggcaggctctgcctgacaaagtacatggatgacgaacaggccgaccggtatcgtgagcggtatccggaactggagatcgtacaaccggcctacagcatcatcgagtcggacgaaagcgctccggacgatgccaacatttccaacccggacaacgagaccggttataagtatggcaatacttacgtcatgaatgcccacgtggcggcgatcctcaagaagcgccaccgtgtgcttgccaaggtgacgaaaaagcccacgagccgtaaagtggagatggcgggccagacggttgacgtgaacaatccggacggcgagatgacctattgtccgttggatgataccagcagtaataaatactacgatggcagcgcagccaaacttgacagcagcgagggcgactggatgatgtacgaaccgttcttttggtcgaaaggtgtcaatgactacctgaacgagaaatattacagctgttacagttccaacggccctgacgatatgcctcctgttccggatgtgacggtgctgacgttggacgacatcaaagacacgcagggcggtttccttacagagcgcaaacttttgagtggcaaacccacgttgaaggattcttatagcacggacaagacctattcagtctgcaaggtggatgtacaaggctataagcgtgtacgttttccgagtgttcccggtacgggtttggtcggcagtctatttgttgacggctccggaaacgtggtcaaaaccatcgtggtctctacgatcggtctgaagttcgaggccggcatgtacttgatatcggatgttccggaggacgccacggccttgcacttctcgatcctgaacacggccgagtttgacaaggtggttctttccaactccgacaagatcgaggatatggagcccgattgggtggccaacgaggaacatctttgcgcggtagtaggcagtagcgtggtaggtagcaagttgcgttcatgcataacaggtaattccacgacggccagcatgaactggatcgactttcattattactcggttcagcgcggtatgcaacagatagacgcgttgatgcactcccgtatagcgaacttgttttacgcaagatatggccgtcgtgacagccaggaacagtgcggaggcggtcagcatacgagcaatcgtatcacgggcggtacagccggttatggtatgcaggatacgatcggttatgacgaagcgtataaaataaacgacaagatcacgaattccatcgtggacggttctatccaccagtacgcttggtatcgtggccaggacgagtatggttctccgaccgtgactcaggtaaacaatatcagttgtctgggctatgaggacatctacggccataagtacgagatgatggacggtgttgatttacccaacgatagtggcaaccaaggtaaatggcgtatttggatgccggacggcacggtgcgttgggtgaagggtaaaacgatcagtgaccagtggataacaggtgttgcccatggtaaatacatggatatcgtaccggtaggaacagctaacggctcgtccagtacatattattgcgataaatattggataagtaccgcagccttccgtgtggtctatcgcgggtacaacnatgcgnntgcgnatggcggcgtgtcgnatgcgnatgcgnntnacgatgcatcgnnctcgnacacgnatgtcggctcccgtctggccttccgcggcaaactcgttcgggcggaaagcgtggaagcgtataaagcgattcgcgaagtgttgtaagcgcaaagcgccaaagcgtggagcgaagcgactaaaacgaaagaacggtgttcggatggtttccgaacaccgttcgtgttattataaataccggcgtaagccggtcgaaaatgttttaagaaaatgaaatttgatagtgctttagtatgtgtgagagagtgcacaacacaccaatttatactatacaaatgtagcgatttttggcgagattaccaaatttcttagtaataattagaagtgagaaattaagcggaaaagggcagggtagggggtgtttaggggtgcgaaaaaaagaacgtttcgttttgggaaaaagaacgtttcgttcccaaaagtcgaaacatttcgttttgcggattatanntnnnnnnannnnnnnngncnnnntnnttnnntnnntannnnnnnnnnnangnnnnttntngnngntgnngnnnagnnannnnnannnatnttntntnnnnggnangntanannggnannannnnnnnnngtancnttnnangnnannanntnnnnnnntnagnnnnnntnngnnnanntannnnatnnannntnnnnnnnatnnnnnnnnnnnnncnnnnnaantnnnntaanttnanngnntncnnntnannnnnnncnnnnnnnnnnnantntnntngnnannnangnngnannaattntcnnannnaatnnnnnnnnnanannnannannnanngannnnnnannnnnnnnnnngnnnnnntcncnnnnnntnnanannatnnngnnnntnnanngnnntcntatnnnnggnnnnatacanaaannnnnnnnnngnnnngnnnnncanntntnnnnntnnnannnaangnanaaacnnannnnntnnnnnagnnannnnnnntnngttannnnntnnnnnanaannnnnntnnannnggnnnnnnngnntctnnnnanacngatnnnnttnntnnttnnannnnngangnntnnnatnnnnttnnannangnnnnnnnngtnnnannnnnnccaatnggnannnnnnnnnncnnnnngnnnnntntannnannncnnggatnnntnnnnnnnnnnnnntngnnnnnngannannnntnnnnnnnttnntnnnannnnnnctannnagnncnnnnnnnatgnnnnnnnnnctgnaatntnnnnnnnncnngnannnngtngnnngannntnnnnncnannnnnannnnnnanntnggnnnnctttnnnnnnatgnnngnnnnnantnnnnannnnnnnntnnnannnantnnnnggntannnnnnntnnngcnnannttnnnnncnngaaantntnnnnnnnnntnnnnnnnnanncnnnntnnnncnnggntnnncnnnnttnnnnancagnnnnaannnnngannannnnnnttnncntnnngnntntnnnnnntnntntnnnnnanngnnnanannnnnnnnnnnnnaannnnnnnnnnannnnnnnnnnnngnnntannannatnagttnntnnnangnnnntnattnnangatngnnntantttccntnnnnctannnngnnaannntnagtnnnnnnnnnnnanntnnnnnnnnnntgantatnngtnannanantncnnanncnnatnnnnnanggnnnncgnanannnntnnnnnntnntnannnnnannnnnnnnnntnnngnntnatnnnannannnnnnnagnnggtngnnntnnnngnnaannnncngnangnnntnantncnnngnnnnnnnnnannngnntanactnntgnnnnntnannnnantnaannnnnnnnnnngnnnnnnnnaannnngnnnnannannnnnanntnnnnnannantnnnnnntnnnannnaatntnnnnnnnanntnnnannnnnnngnnannnnntnnntnnnannnnnnnnnnatnnnnnntntnnntntnaaca

SEQ ID NO: 489 - DNA, 4000 bp, Escherichia coli
  misc_feature (421)..(421): n is a, c, g, or t
  misc_feature (500)..(500): n is a, c, g, or t
  misc_feature (532)..(532): n is a, c, g, or t
  misc_feature (586)..(586): n is a, c, g, or t
  misc_feature (598)..(598): n is a, c, g, or t
  misc_feature (637)..(637): n is a, c, g, or t
  misc_feature (652)..(652): n is a, c, g, or t
  misc_feature (880)..(880): n is a, c, g, or t
  misc_feature (904)..(904): n is a, c, g, or t
  misc_feature (1075)..(1075): n is a, c, g, or t
  misc_feature (1120)..(1120): n is a, c, g, or t
  misc_feature (1156)..(1156): n is a, c, g, or t
  misc_feature (1165)..(1166): n is a, c, g, or t
  misc_feature (1189)..(1189): n is a, c, g, or t
  misc_feature (1389)..(1389): n is a, c, g, or t
  misc_feature (1404)..(1404): n is a, c, g, or t
  misc_feature (1407)..(1407): n is a, c, g, or t
  misc_feature (1413)..(1413): n is a, c, g, or t
  misc_feature (1992)..(1992): n is a, c, g, or t
  misc_feature (3533)..(3533): n is a, c, g, or t
tgcaattgaaatataccaaacaatatcataagagcctgtcacatcataaactttgccccccaaccaaccacctaaaaaagctcccacttgatgaaataaaaaagcaattccatagagcatgctcatatttttaacaccaaaaactgttgtgattgttccttgagttagtggaattgttgaaagccaaagcactcccattaaagcagcaaatatataggctgttaaatttgtaacaggaaataaaataaaaattaaaataatcactgcacgtgatgcataaatagaacttaagagtaaaggttttctaatcttacctcctaaaaatcctgcgtaataagttccaaaaatattaaatagtcctattaaagctaatacaatagtccctatttgcggtgatagacctctatcaattaagaatgcnggcgcatgagtcataataaaaagaatatgaaagccacatacaaagaatccaatgcataacagccaaaatcctttatggntaaaagcttctgttaatatttctcttaatganaaatcttgagcaactgtttgttgaattggcttttcaaacataggaacggcgagnactaacattacnagtgtgaaaacagataaaataccaaaggctaaagttggnccaaagttttgcaanaacactaaagatgcaggcaacattataaattgtccaagggatgcgctcgacattgcaattccaattgaaatgcttcttttctctggcgttacagacctgctaattgctccaaaaattggaaatgtaactcctgatattccaattcctaaaattcctgatgcaataataaatcctgttttggttgaaagagatcccattaaaaacaaacctaatgaataaagaatgctnccgacaaatacgacaacaccagancctatcttgtcagaaattctaccggtaaaaggttgccaaattccccacattaaattttgaaaagcaagacccattgcaaacacttctctgccccactcattcttttcactaataggaattaaaaatattccaaaagagtgtctaatcccaaatgcaagggcaagtagaatngaacctgcaataagcacaaatattggttgtttaaatttatctaanacttgaaacattgttattaactaataacattatttnaaaaataannaatttatataatgagtaataaantatttaaaattttatttggtttattagttatctcagcgatagcaatgctaacctattatcgaggaatagaccccactccttttaacagtgatttatttttctgggctttattgtttggatcgattgctgcattaatcgatggtagcttaggaatggcttatggtgtgacaggtacagcttttttattaggctacggaatntctcctgttaaagcngtngcttanattcatatagctgaaatttttgtctcaggatcgtcaggattaaatcactggaaaattggaaatgttgatacaaaattatttaaaaaacttctgatacctgggatcgttggggctattcttggagctttagtaataactaaagttaaaattccctatttatcaatcgtaatttctatttatttattcttcatgggaatatttctaattgcaaaagcctattcaaaaataaaattacaatttaaacaaaaaaattcagctgttattcctcttgcggtaaccggtggatttgtggatggcgctggtggaggtggctggggtcctgttgttacaacaagtttattaggtggaaaaatgttgccaaaaaaagttattggaactgttaatgcttccgaattttttattaatttagcatcagcaactacttttgtatttttagttaaaattacagattgggaagcattagctggccttataattggtggttttttaatagctccttatgctgcaaaagctacctcaaaaatgagtattaaaatgattttaacagttgttggctgtcttattataataataagtctnagaaaaattattccgctatttatataattttataacaaataattgcaacaatcgtaggtcccaaagcggataaaaacaaatacaaaggactaacgatacctccagagaattttttatttaaaattgaataacctgcagggttaggagcgtttgcaattacagttaatcctccaccagtaattgctcctgctgcaattgcgtacttgaattggtctgaaaggccatcaacaagcgaggctaaataagtaagagcagcattatctgtaacagctgttaaggctgttgcaacatagtaaatctgatctggggttaatttagcaagaactgtttgaagccaccatttttgttgtcctcctaaaaccactaatcctgctaaaaataacgaaactagaaaagcttgattaataatcagcttatcttgatattgattaaaggcatttacaaccgctaaaaatattaaaaaaattccaagaaaaattattaaatcatgaacaaaaaagattactcctaaaagtaaaattaaatgtaaaatcaaaacaaaagacggaattttaattgttttaatcttagattctcctaatttagtaagttcatttctaaaaagaaaagtaagaattatactatttacaaaaacggcaagtgcagtcctccacgcaaaagtattaatcatgaaatttaaatcccaattccatttagcagcaaccataagaatgggaggcgcagcaaatggtgtcatagctccacctatgcttacatttacaaataaagttccaatgattccatatttaaatttatttgaaattttttttgagtaaaaatgatctcttaaaattaatgcccccaaagtcattgctgcaggctctgttataaatgaacccaacaaaggcacaaaagacattgtaattaaaaaaagacttaaagatttattaacaggtaacaatgctgatatttttttaacacaagataatgaaaaatctaaaatcggcttactagctgctattaccattattacaaaaacaaataatggctcaacataactttggttatttaaataattaactgtttcagtttttcctagtaaaaagaatataattaaaaccaaaactatagcccaaaatccaaaaacaatttcaacctctcccaacatatcaaaaatattatgatgccttggaaatttctgagctagagatttaaaaaattttacagaaaatgtatgaagaattgctacaacaaatattattaaagctatactttgaactaacgtagggctcataaaatatatttaacctaatctacaaaaaatactatcttatagacgaaatggatttgtaatttttaataactttttaaaaacttagtgaaaaacttctattttgagtaattttagaggagggggatttttaaagtgctaaccagaagttagcactttaaaaaaaaatgcttacttcttagccggagctagaacagcagaagcggcgttgattgatttaacgcaatcagcttcttttttagctgctagtgcatcaccagctgcttttctnagatcaccagcttttttagttgctgctgcatctaattttgctgtttttactgctgcatcgtaacctttgattaaatcagcgcaagatttagcttgagcatttgcaaaagatacgaataagaacatacttacgattgttgctagtatagttttcatttgttttacttgttgttaagttaattaggggcgaaactatttaatttaggctttcctgtaaatgtttttttgacaaggaaaagccttcattcttaataaagattcttaaatacccaagtaaatcaacgatttttaaacaaactacatacctggcctatgtgtagttctgttagttaagaatttatcttaaatttataagaatcgatttattttttggctcttatgcttgcttgggcagcagataatcttgcaattggaactctatatggagaacaagagacataatgcaatccggctctatggcaaaaatct

SEQ ID NO: 490 - DNA, 4000 bp, Escherichia coli
  misc_feature (312)..(312): n is a, c, g, or t
  misc_feature (1986)..(1987): n is a, c, g, or t
  misc_feature (1992)..(1993): n is a, c, g, or t
  misc_feature (1996)..(1996): n is a, c, g, or t
  misc_feature (2004)..(2004): n is a, c, g, or t
  misc_feature (2012)..(2012): n is a, c, g, or t
  misc_feature (2025)..(2026): n is a, c, g, or t
  misc_feature (2031)..(2031): n is a, c, g, or t
  misc_feature (2033)..(2035): n is a, c, g, or t
  misc_feature (2046)..(2046): n is a, c, g, or t
  misc_feature (2055)..(2056): n is a, c, g, or t
  misc_feature (2059)..(2059): n is a, c, g, or t
ttcttgccaaatgggatgagacaaccaatatcagaacctatagactcattatccagaccgatacaaccggacgagcatattcacaatttcagatctcaaccgatggcacagttggcaatattaaaacggcaaccggcaaaacacagattgttgccggacaatggtacctattaaccggatattttaacgcaacaagtccaggaacaatatatatttacgttaatggtgtcagtgatggcaccacctcatctgttggcacttccattcctgatacgactgctaaattttatctgggagcaaccaaaaccggcncctcaacttatactaattttttagatggttcggttgatgaaatgcgtcttttttccggaacccgaacccaaggatcaattgcctattccatggaaagaggaaaacctgtaataaatatgacttttgacgacggatctggactccaggcgatcgatcattcaccggagacaaatagaggcgccctgataaattttccaaccgataatagtgagtggatcgagggaatcaataaaacttatgctttgcagtttgacggtagttctaactatgttgatttgggcaataaaccaaaacttcagttaggaggagcgatgactatttccacttggattaatccaacagatctgtcaagcgattacactattgtttcccaaccaaatacaaacggctacacatttaagataacaacagccggagagatgacttttggtgcattaggtggaacaacagtcaccacatccggcgccggtatcacagccggtgcctggcaatatgtaaccttaagttacgacggatcaaacgctacgttttacaaagacgggcgattaatttcgagtcctgctttgactttgtggagcgttaccgatggcgcaatattcgtgggcaaagccggttcgactccccaatattttaaaggaaagatagatgaattgatgatttatccctataacagaaccgcttttgaggtatatatagatcgaaataaaggtcttgtcaattttggtaatgaaaagtcactgcaacctcataacgctcaaatcgcctgtccaaaaggatttatccatgttcccggcgatcctttatatggtacttctgatttttgcgtgatgaagtatgaagccaaatgcgctttaacttccgaccctactaccggtattcaaccggctcacgccgatgcttgttccggagaaagcggtggtgattattacggaacctacaaaaacagcggtgccggttgtgcctgcagtagtgccaacagtaaacaaatcgtatcggttgcctcgggctttcccatcgcctatattgcccaggatgacggaaccgtcaatgattctaaaagttattgcgaaaccaatggttggcatttgattactaatgccgagtggatgaccattgccagaaatgtcgaacggcaaggagctaactggtgtgatttaaacggcgcaaactgcggtttttccccgggacaatcaagtaaatatttagctgccggtcataacgataacgtgaacgatccggctgcaggcggggacggtaatagcgccattattgccagcactaacgatagttatgcctgttacgggacagatacgggggcaaccacttgtaccaatgctggaaaccagcaaaagcgaactcacgccctggccaatggtgaagttatttgggatctggcgggtaatgtttgggagtggacagataatacggttttgagaaaggatgagcctgaatgtcagggagaaggttgtgttgttaattggcagtggagtgactttgcagttggaagtttgacatcatatttattggataacggacaaggagcctctatgggttatgatgtcattagaccttctaattcttcttggaatgccaatcaaagagttggaagaatttatcattatagtaatccttctgatacggacacaacagtctacgcctttttacggggtgcgnnctggnntancgggtctnacgccggngtgtttacactcnntctgngnnntactccgggtnactctggcnncgntagcattgggttccggtgcgccgtccctgtcaataagtaatacttcgtagatatctatttatcttctttatctttccgcgaagcggtcgaaaaatctgcaagtattaataaataggcttatgtttcaaaaagtgtgttactataaggtagtttaaactgctataatcttctaaagttatacattaaattatttatcatgattaaagtatcctcttttaaaaaactctaggatgtccattgtgcggggaaaaagcacgaagaaatggtaaaacaaaaatcggtaagaaaagatttttctgtagttattgtcactattcttttatccgccagagacatgttaaggttggttattctgactttgttaaattccaggattttatcgtcaacaaacttaatggttcgatgattttttgtgtaataatcttaattttagcgattctgtgttaagaactgtgagctcttacaattaacatatgtgcttgacaggggacaaaaattatactaaaattgtaccataatatggacaaatttataaaaagagatgtttgggacaaggtagttaatgatcttcaaaaagaagagataacgattatcttgggaccaagacaggtcggaaaaacaactttgattctaaaattgattaattacctgaaagatcacggtgtaaaaaaagagcagatctattattataatcttgacgatgttgaactgcgtggtcggataaaaaaagacttttattttttgaaaaaagacatagaacaaactttcgggaaaactttagaaaacattaaagacaagctgtttttattcattgatgagggtcagaaagttcctgccatttttgagttagtaaaaatattttttgatcaaaaatatcgattaaaaattatcatttccggctcttcttcaatcacgattaaagataaatcagccgaaacattagccggcagggtaagttatttttatctatcaccgttgattttttccgagttagccgaaaaaaatttatcaatatataataatttagaaaaaattccaaacagcgattttttaagagagaagacggctgaaggctatcgaaatataaaagaatatcaatatcttcttgacaaaatgttactgtttggagcatttcctaaggtggttaaccttaatccgtctgacgcggtaaactctcttaataatttcattgctacttatttagataaggatataaaagacattggcagtcgcgttgatattgaaaattttcatctttcatttaagaatctgattgattatttagctaatctcattaatttttccaaattatcatcagatttagggataaaaagggattcgatttatcattattttgaactaatggaaaaaactttagttgttcaaactgttccgccatttatctttcccaatttaaaacacatttttaagagtaaaaaatttttcttttttgataacggagtagcaaccagactgaaaggatatcttaatcttgatgagttaaaaagatcgcagttcaccggtagtttatttgagaattttatttttcagaatttgtactgtagaagtttaaacgatatcaaaaaaccatctttttattattttcgcgattatcagaatcatgaaattgattttatttatcaaagaggggatgtcattgttccgattgaggcaacctattctcataagattgaaaaagcgaaattgcgaaattttcatcacttttttagactttatccaaaagcctcttatggaataattttttaccttggtgaagtacaaaaaatatcaattggagaaaaatcaatctttactctgcctttttttctcgtctaaaataacatctcttccaaaatgcaaatctacatatcgatagccttgattcaatcttattgctattccaccgcttcggtggattggcagaaaagatgtgttttatcg

SEQ ID NO: 491 - DNA, 4000 bp, Escherichia coli
  misc_feature (1989)..(1989): n is a, c, g, or t
aggtccatggtgccgggatgggcgcggaacagcggccgcacaggtccgcgctcgacttcgatccgcacgccgtcgcgctcgcctgatagcgccatcatcgtcgccgcgacctcgtcgaacgcggcctcgtccggcgccacggcgagcacctgggcgcgacattcgatggggatgacgttgacccactggccgccggccacgacccccacgctgtaggtgacaccgcgcgcgaaatccgacttcgactcgatctcctcgatcaggcgagccatcgcacggatggcgctgcggccgtcgcggttggtcgcgccggcatgcgccggccggccgtgcgtgacgacggtgaagcgctggaaggcgtgccggcccgtgaccacggtattgccgggccgccccggttccggcaccagcacgtagcggtgcgcccgcgcctcggcctcgattcgcgcccgcgtcgaggggctgccgacctcttcgtcgggcacgaacatcaccgtgacaggcaactccggcgcgccgctctgccgcagcgtttgcgccagggcgtaggtcgccaggcgcatgccgcccttcatgtcgaagatcccgggaccgtagacacgatcgccgtcgcgccgtaccggcaaccggccatcgatcgtgcccacgggatgcaccgtgtcgaggtggccgagcaccagcacgcccggcccgtcgcgccgtccgcgaaatcgtgccgtcagcgtgtcgccgtagccgtcgcggccgggttcgcgctcgatggccgcgccgagcgcgcgcatctcggcctcggcggcgtccatcatgcgattgaccgcgcccgcgtcgtaggtcgggctctcgacgcgcacccactcgaggatggcgtcgaggatctccccggcgtcgaaagcgttgcgacggcctgcgacgctcattccggcttgatgcccttctcgcggatcagcgtgctccagcgcttctcctcgcgcaccatcagctcgtgcagttccttcggcgtcgacgcgacaagatcgacgccttgcttggcgaatcgctcctttatctccttgtcggcgacgaccgcggcgatcgccgcctgcagcctgtcgatgatcggcttgggcgttcccttgggcaccaccaggcactgccagaactcggcggcgaagcccgtcagaccagtcgcctcctccatcgttggcaaatcggggaaggccggcgagcgcttggcgctgctgatcgccagcggacgcgtggcaccgcgcgccaggagcggcgcggcctcgagcgaggcggagaacatcatctgcgcgatgccggcaccgagatcctgcgccgccggcgcgccgccgcgatagggcacgacggtcatgtccagcttggccatgtccttgaacagctcggccagcatgaagttggtggcgccgatgcccgaggtggcgatgttgtacttgcccggattggctcggatgagcgcgatcagttccttcacgtccttggccggcacggccgagtggacctgcaggatgaacggcgtcaccgacatcaacgacaccggctcgaagctgtcgaagggatggtattggacgttgccctgtaaagtcgggttgatcaccagcgaggtgccgccgccatagatcgtgtagccatcgggtggggccttggcgaccaggttcgaggcgaccgtcgtcgccgcacccgccttgttgtcgacgatcaccgctacgcccagcaactgcgtgagcttttcggcgaaggcacgcgccaccacgtcgttcaggccgcccggcggatagggcacgatcaaggtgatcggtttggccggccaggcttgagcccgcgcgcccgaaccggtcgcggcgagcgccgcccatccacccgccgctgcgagccacccgcgtcttgtaaccatcgaacaccccctgcgcctttgcggtcgttccgccgccgctaccgaggcacaatgcacgaggtagcattccgatccaagtcatgataaagtgagtnttcaatcatttaatgggctggggatatgtctggactcaacatgagccccgcggggttggctgatctggcgcgcagcaaggagcacgaggccaaggcggccggcgccgacgggctcgacctgatcctgtcgcgcgattctggcatggatgcccgcgacatcatgaacctgcgccgcttcaccacgagcgagaagctgctgatcatcttccgctgtcccaagccctcggcgcgtgccttccatggcaccttgccggccaagaccttcgccaccaaaaccaagaccaacgacagcggcacggtgttcggcaaatccgggctgatggtatccgactacgacatgatgagcgtctggcgctccaccggcggcggctacgccaagatctacatctcggcgctggagcccggcgcgccgcgcggccgctggtcgccggaggcgcgcgatctggtgcgcgcgatgaacaccttcctggtgtcgaagctccagcacggctgccaggacgacttcctgtcggccgagaagaaccccggcgtaaagatggccgaccacttcctcgccatccgcaccggcgacggcatctatctgcgcgacccgaactactgcgagaacttctatcgcgcccatgcgctgtactggccgtacctgtcgaacggcaagcactgcggccgcggcctgggctgagcccgaacgatccgacgcgtcttcgacggcggacgcgccacaaccatcgcgtcagccggcgccggcgatcacgcaccaaaaaaaatcggcccgcgcaatcgcacgggccgaaagtcaaacagggaggcttcacgtctgggagacgtaggatcctaagatccctgcccaaagcgaggcttcaggcccatgcgcaaaagacactaccaactcaacgccatagcgccctttaggcatattcaggagataggcgatccggctggtttacgtatggggaaattggtcaagccagccatgcggggtccgcagttctttggaaaaaagtcgtggctccacgctctgatcagacgctgacaatcacgacaatgttcactgccgcatctccacgaccttgcgcagcaggaagtcgcggaacaccgcgatgcgcttggagtgccggagttcctcgggataggtgaagaagacgtcggtcgaacgcttgtccagctcgggcagcaccggcacgagcttggtcgactgacgcgcgaggtaatcgggcagagaggcgatgccgaggccgttctcgacggcgcggaagatgccgtaggtgttgttgacacgcagcacgaccttgcgcggattcccgtcagggttgccctgctgcagcagccagttgacgtcctgcaccggtgcgcgcgcgtcctcgccgaagatgatcaggcggtgcttgtcgagatcggccgccttctccggcttgccgtacttctggacgtagctctccgacgcgtagacatgcgactgcaccgtcatcagatggcgctggatcaggccgggctggcgcggcgcgacgagacgcaggccgacatcggcctcgcgcatgccgaggtcgaggtcgttgtcgctcagcaccagcgacacgtcgatctcgggataggcctcgatgaactcgtgcatgtgcccggtgagccatgtcgaaccgaagccgaccgccgaggtgatcttcagccggcccgccggcttgtcctggttggcgcgcagcaggccttcggcggtgttgaccttgccggccatctcgcgcgccgtgcgatagagcagttcgccctgctcggtgaggatcagaccgcgcgcgtgacgatggaacagcatcacgccgagctgctcttcgagcgcgccgatctgccggctgatcgccgactggctgagcttcagctgatcgcccgcatgcgtgaagcttcccgcatccgccacggcgtggaagatgcgcagcttgtcccagtccatcacggccccgtctccgtccgctccctgtgcgtttctccgaggacgccggtttctccgacgctccgcttatccttt

SEQ ID NO: 492 - DNA, 4000 bp, Escherichia coli
  misc_feature (986)..(986): n is a, c, g, or t
  misc_feature (1245)..(1245): n is a, c, g, or t
  misc_feature (1989)..(1989): n is a, c, g, or t
  misc_feature (1991)..(1991): n is a, c, g, or t
  misc_feature (2045)..(2045): n is a, c, g, or t
  misc_feature (2860)..(2860): n is a, c, g, or t
atgaaaatggaatcgaaattccattcccgcagcttgatgtcaacgtaaagaatccggtataaaatcggacaaaaaagtgaaaaagtttgacaaatattggaaaatatgctactgttagccatgtagtcgtgcacaattttgtgcaactttttagatttattgtgtattaggaggaaaaagaaatgcagggaactgtaaaatggtttaacgcaaagaagggttatggatttatctcagatgcagaaggaaatgatgtattcgttcatttctccgcattaaatatggatggattcaaagagcttaaagatggagaagcagttgaatttgaggtagtagaaggagaaaaaggacctcaggcagctaacgtagttcgcttaggttaattcgtatagagttgaatatgaaataagcgcagagcaggaagatggatatccgtcttcctgtttttaggtttatcaggtgtaaatgtaaaaaaaatgtgttatactgataaagactgtgagtcagattatgagaacatggaggataaaacatttgaatttagcagcgttaacagcatatgaattaatcaaagaagaaaatctgacagacatccatgcaaagggatatctgcttcgacataaaaagagtggagctaaaatcagccttatttccaatgatgatgaaaataaggtcttttatattggattccgtactccggtagaggacagcaccggcgtaccacatatcattgagcatacggtattgtgcggttcggacaagttcccggtgaaggacccgtttgtggaactggtgaagggttctttaaatacattcttaaatgccatgacttacccggacaagaccgtttatccggtggcaagctgcaatgataaagattttgctaatctgatggatgtatacttagacgctgtgttccatccgaatatctataagaaagaagaaatcttcaaacaggaaggctggcactatgaattagaggatanagatgcaccggttaccatcaatggagtggtatacaatgagatgaagggcgcattttcttctccggagggtgtcttagaccgtgtagtattaaattccctgttcccggataccacatacagcaatgagtccggcggtgacccggaagtaattccggagcttacttatgagcagtaccttgatttccaccggaaattctatcatccatgtaattcttatatttacctttatggaaatatggatatggacgaaaaactggantttctcgataaagaatatttaagccattatgataaaatcgaagtagattccgcaattcagctgcaggctccttttgaaaagccggtaaccatcagcaagccatattccattgcatcttccgaaagcttagaggataatgcatatctttcctataatgtggcaatcggaacgaatcttgagagtgaactgactctggcatttgatgtcttggattatgcactattaagtgcaccgggagcaccgttgaagcaggcacttattgatgcaggaatcggaaaagatatcatgggcggatttgataacagcaccttacagccaattttttctgtggtggcaaagaatgccaataaagaagacgaagagaagtttgtaggaattatcgaagatactttaaagaaaatcgtcaaagacggtctcaatagaaaatccctgttagcaggaatcaacagtgaagaattcaaattccgtgaagcagattacggtaatttcccgaagggattaatttatggattatcctgtatggacagctggctttatgatgatgacgaaccattcttatatcttaaaatattagacgtatttgcagcattaaaggaaaagattgaaacaggatattttgaagaactgattcagaaatatcttttggataacagccataaatcctatgtatccattgaaccggaaaaaggcttaaatgccaggctggaaaaagaattagaagagaaactggcagcttataagaangncttatcagaagaagagattgataagttagtagaggatacaaagcatttaaaacngtatcaggaagagccgtcaccaaaggaagacctgatgaagattccgatgttaaaacggcaggacatgaagcgtgaagcacagccgctggtatatgaaaaggtaagctgcaatggcatcgaaaccattcataccaacatttattccaatggcattcattatctgaatctgatgtttgatatcagtgatattacagaagaagaactgccataccttggggtgttaaaagctgtacttggttatatggatacagagcattataattatgcagacttagcaaatgagattaatcttatgaccggcggtatctcttcccagattaatatttatgcggatactaagaaaaaagacagtttccatgcaaaatacgaagtacgttccaagattctttatcagaatctggaagaggggcttagacttctttctgagattctgatgggcacacagattacagatgaaaaacgtctctatgagattttagcgcgtatcaaatcgagactgcagatgtccttaagctctgccggacattccgtatctgccatgcgggcaatgtcttatttctcaccggtagcccgattcaatgacctggttggcggaattgcactgtaccggacgattgcagaattagaagaacattttgaagaaaagaagcagttcttaatggataaattaagaagccttacagagaaaatatttgtaaagaacagactgttgatttccctgacggcagacgcagaaggatatcagctgttagaagaaaaattcccgcagttcttaactgttttaccggatggagagaaagagggagaagcagttnccttccattgtgagaaaaagaatgaaggcttcttagatgcatccaaagtacagtatgtatccagagccggaaattatttatcgaaaggatattcctataccggagcacttcgtatcttaaaagtaattttaagctatgattacctttggattaatgtccgggtaaagggtggtgcatatggctgcatgagcggatttatgcggaacggagatgcatatttcacttcttaccgtgacccgaaccttaagagcaccaatgagatttacgaaggtatcccggcatatttaagagcttttgatgcagatgaacgtgatatgacaaaatatatcatcggaacagtaagtgatatggataccccgttgaatccggctgccaagggcatgcgttccgtaagtgcttatcttaccaatatttcttatgaggaattacagcgtgagagaaatgaagttttagatgcacagccggaaaatatcaaaaatctcgcagtgcttattgaagcagtactcgcacaggatgccttgtgtgtcatcggtgcagaggaaaatgtagaagcagaaaaagatatgttcttagaagtaaagaatctttattaaaagctgtgggtaatagtcccgcagcatacataagaaggagtaagtatgacggaaaattttaaatcaggctttgtaacactgattggacggccgaatgtaggaaagtccaccttgatgaatcatctgattggacagaagattgcaattacatccaataaaccgcagactaccagaaaccgtatccagactatttatacggatgaaaacagaggacagattatttttgtggatacacctggtatccataaggcaaagaataagctgggcgaatttatggtaaatgtggcagaacacacattaaatgaagtggatgtcattttatggctggtggaaccgagtgattttatcggcgcaggagagcagcatattattgaaaagttaaaaactgtaaagacaccggttattctggttatcaataaattagataccttggataacaaggataaaatgctggagtacattgacacttatcgtaaagtttatgactttgcggaaatcgtaccggcatctgcactgcggggagaaaatacggatgttatcattgatt

SEQ ID NO: 493 - DNA, 4000 bp, Escherichia coli
  misc_feature (214)..(214): n is a, c, g, or t
  misc_feature (585)..(585): n is a, c, g, or t
  misc_feature (719)..(719): n is a, c, g, or t
  misc_feature (732)..(732): n is a, c, g, or t
  misc_feature (787)..(787): n is a, c, g, or t
  misc_feature (1166)..(1166): n is a, c, g, or t
  misc_feature (1750)..(1750): n is a, c, g, or t
  misc_feature (1789)..(1789): n is a, c, g, or t
  misc_feature (1931)..(1931): n is a, c, g, or t
  misc_feature (1997)..(1997): n is a, c, g, or t
  misc_feature (3313)..(3313): n is a, c, g, or t
tcaagtggggcaagcccgtcttcagctcgtccgacccgaacgtcaaggtctcccaggacggttcctccgccgttgtgaccgttggcgagaaggccacggcgaaggtgatggtgaccaacagggtcaccgcgccctctccgaaggtcgacatcgtcaagaaggactccaaggggaatgacgcgaacacttcgaatgaagccgtggacctgagggncagcaacggatccacgcagcttaccttcaaggtgaccaacaacgggaccgagaccctgaccgacgtgaaggtcacggactccgtgaccgcgggcaaggccaaggtcgacaacctctcctgcaccttcccggacggcacgaagggcacgacgtgggctggccccttcgcaccgggcgtctccttcccgtgcaccgcggacctctccggcgtgacggcaggcgacccgcatgccgaccgcgccaacgtcgaaggcaagggcaagttcaccggcaagcccgtttccgatcacgatacgtacaacgcgaaggtgaacaccccccagaagcctgcccccggtgctcccggagctccgaccgtatccccctcgacgntggtgaagcccacgcctcctgtggctccgaccactatgagcccgactccgaccgcgtcgatctctccgtcgccttcaccgacgaccgcgagcccttcgccgaccgcaagcctgtcgccgaccgcgagcccgtcncccacggcgagcncttcgccgacggctagcttgccgccgaccgcgagcccctcgcccacggcgacccngtcggcgaccgccagcccgacggcccagcgcccgacggccacctcggggccggcgaagccgagcccgtcgacgaccgcgaagccttccaagccttcactgcccagaaccggtgcgaaggttctcggcctggggatcgtcgctctcgtggcgatcgccggaggtgcagccctgatcctggctcgccgcaagaagaactgacggtttcactagtcagctgaacggctgacgagcctccgaggggtccgcgcgaggaatcgcgcggacccctctcctcgtacgggacggccttgccttatggaggaccaactttcctcatgcgggatgacggcctcgctgatcgccggtcggctcggttggaaggaagaaaagacatgaggnctcggagccgtcccgggcctcttcgacgggacgatgccgcgagccgggcgccgaactcctccgcggtgggcggcgtcccgatggagggccgataggatggcgccatggagtcgatacgcgaagacctgaccgccaacccccggatactcgtcgtgtgcacggggaacatctgccggtcgccgatgggggaggccgttctccgccagcggctcgaaggcgccgggctcgcctacgaggtagcgagctgcggggtttcccccgaagagcacggcaacccggtctatccgcctgccgcccgggccttggaggaggccggctatcccgttccctcgcattcggcccatcgcgccacccgcgcggagctcagggaatccggcctcatcctcgcgatgaccacgggccacgcgcgggcgctgcgccgcatgtgcgagcaggctggagcgcccgcctcgcgcatccacctgtggcgcgagttcgacgggtcgggcttggatgtcgcccccgaagggtgcttcggtcccggcggcgccctccacgacgacatcgaggccggatacaggtcggagttctactactcctacggnaggtacgacgtcgtcgacccctggggcggaggcccggangaataccgcgagacgctcgacgccgtcgagcgcggagccgacgggatcctcgcgctgctgagcagcgtcgccaaacgcgtatgatccacctcaccggtccgttccgaggtcctcactgccctgcgccgagatccgtgccatngaggcatgggccgagactcgaggcgcgggagtcgagcgcccggcgcgcccaccgactggcgggcgngcgcctgccggtaggcgcaccgtagggcgtcggcccattatggaccgacttgcgacgacggcttggcgggcgtcctggtcgagcgcgcggacgatgcgatccgccggctacttcatgcccgcgttgccggcgttctgcgcctgtttgagcccctcgggcacaggccgggcgccggagaagacgtcgagcaggatcggcgtgtaggcgttggtccccgcattgactttcggcccgaccggcggacggacggtccgccccctggccgcctcgacgaacgccgagacgtccacgcccttcgccttccagtagtcgacgaaggcgccttgtgcgctcaccaccccggggaaggagaccccctgttcggccaggggcagttgcccctgcctggtgccgagccatgcgaggactttggccgtcgcctccttgtgcttcgtcttcgcattgcccacggcggcgacgccgtgcaccgtggacaggcggcccttcgggcccgccacgagtggggcgagaccccaatcgactcccttggcggactcggctatcgtcttgagattgtaagggcccgactggtagagggcgagcttcccttggacgaagaggtcacgggtggcgtctgcgctggtgttggtgtccgcggccggaggggcgacgcggtgtttggagatcatgtccaccaggtagccgatggcgtcctctcctgcggagctggcgaaggcgaactggccggagggactctggtagtcggcgccggcctcggccaggaaggggaggtagaccgcctgcatgtcggcctgggcgttgaaaccgtagaccttggtgtgcgaagcgtcgaacccggcctcgccgggatgcctgcccgctgcgtcgacggtgagcttcctggcggcggacagcagggtgtcgccctgccctccgtgaggcgcccaggccaagctgcggacgtcgactccggccgcgcccacgaggctcttgttgtagtagaggccgatcgaatcccacagctggggaaccccccacagcttgcctttgcgagtgtagaggtcgacgactggcttctgccactcgtcgtggtcggcgcccacggcctggccggcgtccatgatgtcgccgctgtccgcgtactgggcgaaattggaggagttcgtccagtagacgtcggccatgtccccggaggagacgtccaatggcaggcgtttccagtactgctcccacggcacgacctcgaccctgacgtcgatgcccgggttcttctccgtgaacttcttgaacgacgccttgtaggccgaggcggccttctcgtcccagaggcggaaggngacggtggtcttcccgccgctcccgtcctgctcggccgccggcgagcatgcggacaggacgagggcggcgacggccagagccgcagcgattgcggccgttcgccgtgaacggttcattcggtctctccttcgagttctggttccgcggattggggattcgcgccccgcctgcgggcggggcgtcgagcgtctcgcggtattcgtccgggcctccgaagggtcgacgaccgggtcgtacctgccgtaggagtagtagaactccggcccgtatccggcctcggcggccgccgagcaaggcgccgtaggaagaacacccgtagaatacgggttattccgccatttcgcgtcactgcgccgctcaccggcccgtgccggcgaaggctatcgcacatcgccgatgcccaaggctgcgacgatctgcctgttgaatgccaggaagaggacgacgagcggcgcgagggcgacggtggtcgccgccatgacgagcgtccagttcccggagcgttcttcctgcagcgcctgggtggcgaccgtcagaacgctccacgtccggcccggcgcgatgaccgacggccagaggaaggcgttccactgggagacgacggtgatgagcgtcagggcggccaggatcggacggttcatcgggagcacgatcgaacgcagcgtgcgccagtggcccgccccgtc

SEQ ID NO: 494 - DNA, 4000 bp, Escherichia coli
  misc_feature (2)..(9): n is a, c, g, or t
  misc_feature (11)..(14): n is a, c, g, or t
  misc_feature (16)..(17): n is a, c, g, or t
  misc_feature (20)..(20): n is a, c, g, or t
  misc_feature (22)..(22): n is a, c, g, or t
  misc_feature (24)..(24): n is a, c, g, or t
  misc_feature (28)..(29): n is a, c, g, or t
  misc_feature (31)..(37): n is a, c, g, or t
  misc_feature (39)..(39): n is a, c, g, or t
  misc_feature (41)..(41): n is a, c, g, or t
  misc_feature (44)..(48): n is a, c, g, or t
  misc_feature (50)..(50): n is a, c, g, or t
  misc_feature (52)..(53): n is a, c, g, or t
  misc_feature (56)..(56): n is a, c, g, or t
  misc_feature (58)..(62): n is a, c, g, or t
  misc_feature (64)..(66): n is a, c, g, or t
  misc_feature (68)..(74): n is a, c, g, or t
  misc_feature (77)..(84): n is a, c, g, or t
  misc_feature (86)..(89): n is a, c, g, or t
  misc_feature (91)..(98): n is a, c, g, or t
  misc_feature (100)..(101): n is a, c, g, or t
  misc_feature (103)..(104): n is a, c, g, or t
  misc_feature (106)..(113): n is a, c, g, or t
  misc_feature (115)..(123): n is a, c, g, or t
  misc_feature (125)..(125): n is a, c, g, or t
  misc_feature (127)..(127): n is a, c, g, or t
  misc_feature (129)..(129): n is a, c, g, or t
  misc_feature (131)..(131): n is a, c, g, or t
  misc_feature (134)..(134): n is a, c, g, or t
  misc_feature (136)..(139): n is a, c, g, or t
  misc_feature (141)..(143): n is a, c, g, or t
  misc_feature (146)..(146): n is a, c, g, or t
  misc_feature (148)..(153): n is a, c, g, or t
  misc_feature (155)..(155): n is a, c, g, or t
  misc_feature (157)..(157): n is a, c, g, or t
  misc_feature (159)..(161): n is a, c, g, or t
  misc_feature (163)..(167): n is a, c, g, or t
  misc_feature (172)..(173): n is a, c, g, or t
  misc_feature (175)..(176): n is a, c, g, or t
  misc_feature (178)..(179): n is a, c, g, or t
  misc_feature (181)..(183): n is a, c, g, or t
  misc_feature (185)..(187): n is a, c, g, or t
  misc_feature (189)..(190): n is a, c, g, or t
  misc_feature (193)..(200): n is a, c, g, or t
  misc_feature (202)..(203): n is a, c, g, or t
  misc_feature (205)..(207): n is a, c, g, or t
  misc_feature (210)..(210): n is a, c, g, or t
  misc_feature (213)..(226): n is a, c, g, or t
  misc_feature (229)..(230): n is a, c, g, or t
  misc_feature (232)..(234): n is a, c, g, or t
  misc_feature (240)..(240): n is a, c, g, or t
  misc_feature (242)..(245): n is a, c, g, or t
  misc_feature (247)..(247): n is a, c, g, or t
  misc_feature (249)..(249): n is a, c, g, or t
  misc_feature (251)..(254): n is a, c, g, or t
  misc_feature (256)..(258): n is a, c, g, or t
  misc_feature (260)..(260): n is a, c, g, or t
  misc_feature (262)..(262): n is a, c, g, or t
  misc_feature (266)..(266): n is a, c, g, or t
  misc_feature (268)..(269): n is a, c, g, or t
  misc_feature (271)..(271): n is a, c, g, or t
  misc_feature (274)..(276): n is a, c, g, or t
  misc_feature (278)..(279): n is a, c, g, or t
  misc_feature (281)..(284): n is a, c, g, or t
  misc_feature (286)..(287): n is a, c, g, or t
  misc_feature (289)..(290): n is a, c, g, or t
  misc_feature (292)..(293): n is a, c, g, or t
  misc_feature (296)..(296): n is a, c, g, or t
  misc_feature (298)..(298): n is a, c, g, or t
  misc_feature (300)..(303): n is a, c, g, or t
  misc_feature (310)..(311): n is a, c, g, or t
  misc_feature (314)..(317): n is a, c, g, or t
  misc_feature (319)..(319): n is a, c, g, or t
  misc_feature (322)..(326): n is a, c, g, or t
  misc_feature (329)..(329): n is a, c, g, or t
  misc_feature (331)..(331): n is a, c, g, or t
  misc_feature (333)..(335): n is a, c, g, or t
  misc_feature (337)..(338): n is a, c, g, or t
  misc_feature (340)..(340): n is a, c, g, or t
  misc_feature (343)..(344): n is a, c, g, or t
  misc_feature (346)..(347): n is a, c, g, or t
  misc_feature (349)..(350): n is a, c, g, or t
  misc_feature (355)..(360): n is a, c, g, or t
  misc_feature (362)..(362): n is a, c, g, or t
  misc_feature (365)..(365): n is a, c, g, or t
  misc_feature (367)..(370): n is a, c, g, or t
  misc_feature (372)..(376): n is a, c, g, or t
  misc_feature (379)..(379): n is a, c, g, or t
  misc_feature (383)..(383): n is a, c, g, or t
  misc_feature (386)..(386): n is a, c, g, or t
  misc_feature (389)..(390): n is a, c, g, or t
  misc_feature (394)..(399): n is a, c, g, or t
  misc_feature (401)..(401): n is a, c, g, or t
  misc_feature (403)..(403): n is a, c, g, or t
  misc_feature (406)..(407): n is a, c, g, or t
  misc_feature (409)..(410): n is a, c, g, or t
  misc_feature (412)..(412): n is a, c, g, or t
  misc_feature (416)..(417): n is a, c, g, or t
  misc_feature (419)..(427): n is a, c, g, or t
  misc_feature (429)..(431): n is a, c, g, or t
  misc_feature (433)..(435): n is a, c, g, or t
  misc_feature (437)..(437): n is a, c, g, or t
  misc_feature (440)..(440): n is a, c, g, or t
  misc_feature (442)..(443): n is a, c, g, or t
  misc_feature (445)..(445): n is a, c, g, or t
  misc_feature (447)..(454): n is a, c, g, or t
  misc_feature (456)..(458): n is a, c, g, or t
  misc_feature (460)..(460): n is a, c, g, or t
  misc_feature (463)..(465): n is a, c, g, or t
  misc_feature (468)..(470): n is a, c, g, or t
  misc_feature (475)..(480): n is a, c, g, or t
  misc_feature (482)..(485): n is a, c, g, or t
  misc_feature (488)..(491): n is a, c, g, or t
  misc_feature (497)..(498): n is a, c, g, or t
  misc_feature (500)..(504): n is a, c, g, or t
  misc_feature (507)..(509): n is a, c, g, or t
  misc_feature (512)..(516): n is a, c, g, or t
  misc_feature (518)..(518): n is a, c, g, or t
  misc_feature (520)..(531): n is a, c, g, or t
  misc_feature (533)..(537): n is a, c, g, or t
  misc_feature (541)..(542): n is a, c, g, or t
  misc_feature (544)..(551): n is a, c, g, or t
  misc_feature (553)..(553): n is a, c, g, or t
  misc_feature (555)..(558): n is a, c, g, or t
  misc_feature (560)..(563): n is a, c, g, or t
  misc_feature (565)..(567): n is a, c, g, or t
  misc_feature (569)..(572): n is a, c, g, or t
  misc_feature (575)..(575): n is a, c, g, or t
  misc_feature (577)..(577): n is a, c, g, or t
  misc_feature (579)..(579): n is a, c, g, or t
  misc_feature (581)..(583): n is a, c, g, or t
  misc_feature (587)..(588): n is a, c, g, or t
  misc_feature (591)..(591): n is a, c, g, or t
  misc_feature (593)..(599): n is a, c, g, or t
  misc_feature (601)..(602): n is a, c, g, or t
  misc_feature (607)..(607): n is a, c, g, or t
  misc_feature (610)..(611): n is a, c, g, or t
  misc_feature (613)..(614): n is a, c, g, or t
  misc_feature (616)..(619): n is a, c, g, or t
  misc_feature (621)..(621): n is a, c, g, or t
  misc_feature (623)..(624): n is a, c, g, or t
  misc_feature (626)..(627): n is a, c, g, or t
  misc_feature (636)..(636): n is a, c, g, or t
  misc_feature (638)..(638): n is a, c, g, or t
  misc_feature (640)..(641): n is a, c, g, or t
  misc_feature (643)..(644): n is a, c, g, or t
  misc_feature (646)..(650): n is a, c, g, or t
  misc_feature (652)..(652): n is a, c, g, or t
  misc_feature (654)..(654): n is a, c, g, or t
  misc_feature (656)..(657): n is a, c, g, or t
  misc_feature (659)..(660): n is a, c, g, or t
  misc_feature (664)..(664): n is a, c, g, or t
  misc_feature (666)..(666): n is a, c, g, or t
  misc_feature (669)..(669): n is a, c, g, or t
  misc_feature (672)..(674): n is a, c, g, or t
  misc_feature (676)..(678): n is a, c, g, or t
  misc_feature (680)..(681): n is a, c, g, or t
  misc_feature (683)..(686): n is a, c, g, or t
  misc_feature (688)..(690): n is a, c, g, or t
  misc_feature (692)..(692): n is a, c, g, or t
  misc_feature (694)..(695): n is a, c, g, or t
  misc_feature (697)..(697): n is a, c, g, or t
  misc_feature (699)..(700): n is a, c, g, or t
  misc_feature (702)..(704): n is a, c, g, or t
  misc_feature (708)..(708): n is a, c, g, or t
  misc_feature (710)..(713): n is a, c, g, or t
  misc_feature (715)..(717): n is a, c, g, or t
  misc_feature (721)..(726): n is a, c, g, or t
  misc_feature (730)..(731): n is a, c, g, or t
  misc_feature (733)..(733): n is a, c, g, or t
  misc_feature (735)..(735): n is a, c, g, or t
  misc_feature (737)..(739): n is a, c, g, or t
  misc_feature (742)..(742): n is a, c, g, or t
  misc_feature (745)..(746): n is a, c, g, or t
  misc_feature (748)..(752): n is a, c, g, or t
  misc_feature (756)..(760): n is a, c, g, or t
  misc_feature (763)..(764): n is a, c, g, or t
  misc_feature (769)..(770): n is a, c, g, or t
  misc_feature (775)..(777): n is a, c, g, or t
  misc_feature (779)..(779): n is a, c, g, or t
  misc_feature (781)..(781): n is a, c, g, or t
  misc_feature (947)..(947): n is a, c, g, or t
  misc_feature (1626)..(1626): n is a, c, g, or t
  misc_feature (1955)..(1955): n is a, c, g, or t
  misc_feature (1970)..(1970): n is a, c, g, or t
  misc_feature (1992)..(1992): n is a, c, g, or t
  misc_feature (2840)..(2840): n is a, c, g, or t
  misc_feature (3275)..(3275): n is a, c, g, or t
  misc_feature (3323)..(3323): n is a, c, g, or t
  misc_feature (3341)..(3341): n is a, c, g, or t
  misc_feature (3403)..(3403): n is a, c, g, or t
  misc_feature (3590)..(3590): n is a, c, g, or t
  misc_feature (3626)..(3626): n is a, c, g, or t
tnnnnnnnngnnnncnncgncntnctgnngnnnnnnngngncgnnnnnancnncgncnnnnngnnngnnnnnnncgnnnnnnnngnnnngnnnnnnnngnngnngnnnnnnnngnnnnnnnnncngntngncgncnnnntnnncgncnnnnnngncncnnngnnnnnctacnncnncnncnnngnnncnncgnnnnnnnngnncnnngtngtnnnnnnnnnnnnnnggnngnnnggcgangnnnncnangnnnncnnncngngcgncnncnacnnngnngnnnngnngnngnngcngntnnnngccgccnncannnncnacnnnnnccngncnnncnncnccnncnncnnccgcnnnnnngnggngnnnntnnnnnacnacgncgncgnnatgnnnnnngncnacnncnncnacgnngnnnnnnnnngnnngnnngncgncnncnannnnnnnnannncntcnnnggnnnggccnnnnnncnnnncannnnggcggnngnnnnncgnnngannnnngncnnnnnnnnnnnngnnnnnccgnncnnnnnnnncnannnnannnnannngnnnngcngnangnnngccnnccngnnnnnnngnngaccnccnncnncnnnncncnncnnctgaagaanancnncnncnnnnngntncnncnnctgncngcngcnnngnnngnnannnngnnnancnncncnncnnngggngnnnngnnngccnnnnnngtcnncncnannnccntcnncnnnnngaannnnnccnncccgnngtcgnnngncnccccgaccctcccccgcaagcgggggagggagatgcagcgcgggttagaattcagatatcccaaagagtgacatcctgcgggtgcggcggcgggaggcggccgccgacacggccttcgccaacgtgctccgggaggcggtcgaggccgtcgagaaggccggatacnccttcctggtcctgggtgggctcgcctcctcgctggttgggcgaccgcggtggacgcacgacatcgacctcatggtgcggcccgacgatgccaaggatgtcctggaagcgctgcgaatcgccggctttaccaccgaggagacggacccggtatggatctataaggcattcaaagatgatgtcctggtcgacatcatcttcatggtgatgggcgggatctatctcgacccggagatgctcagccactccatcgagcgcagctatgagggcttgcatctgcgaattccaagtccggaagaccagatcgtgatcaagggcgtcgtccatcgcgaggagacctcgcgccactggttcgatgcgctcgccatcatcgggcggtccgatctcgactgggagtatctgctccgtcgcgctcgtgtcggcgcccgccgggtgctggccctgctgatctacgctcaatcgagcgatgtcctggtgccgcattgggtgattcggcgcctctacgaggagatttacacgcaatgagcgagcgtcgcgccgactaccttcccgaacacatccgcgagtccctcatccacgacccaagagtcgccgaacaggacctcaaggtcgatgtcaaggagcatcgagtgatgctgggcggcaacgtcgccaccccgcagctgcgggaaaccatcacnaacgtggcgcgcgagctgcttccgggctacgagatcgtgaacgagacaacggttgtccccgcgaccgagccggatggcgaggagcctgtggcgtgatccggatcgcggccgtcggcgatcttcactacggcgccggctcccaggacatcctccgaccgagcctgctgcacctccccgaccgggccgatctcctcctgctggccggcgacctgacgcgctgcggtggaacggaagaggtccgggttctggccgacgacctgcgcggcttgccgattccgatggttgccgtgcttggcaaccacgactaccacgccgaccgcgaagaggangtccggcgggtcctngaaggcgttggcgtgatcgtantggaaggtgaggcggtaacgctggacatcgacggcgcccggatcgggatcgcgggcaccaagggtttcgggggtggctttcggggagcccatgccagcgatttcggcgagccggagatgaaggcgttcgtcgctcacacgaaaatgctgtcggaccggctggagcgggccctgacggacctggaagccgacctgcgcattgccttgcttcattactcgcccatcgagacgaccctggagggcgagcgactcgagatctatccgtttctcggcagctatctcctggcagaggcggtcgacaatgccggggcggacctgatcctgcatggccatgcgcaccacgggacggagaagggtcgaaccccggctggcattccggttcgcaatgtcgcccagcccgtgatccgacatgcgtacaacgtctatacgctcgacgccagccggcaggtcatggccgccgccggcggcgttacctaaacgggcggaatggtgttctctcgaatatgaaagctatctggaacggcgcaacgctcgcgcagagcgacaggacgatcgttgtcgaagggaaccactattttccgcctgaagctgtcaaccgcgagctcttccaacggagcgagactcacacgatctgtccgtggaaaggtgaggcgagttactactccgtcgcggtcgacggccggactaaccgcgatgcggcctggttctacccgtcaccaaagccggcggccgctgagatcaaggattacgtcgcgttctggcgcggcgtgcaggtcgagccctaacccccacctggtcccactcgctccgtcctatcgcgaggagccttactggtggcgcgacgccgcnccgatccgtttgccgcaggcagccctgccgacggaggcggatgtggtgatcatcggcggcggctacaccggcatgatggcggcagcgcgactcgcatggcgcggccgatcggtgacggtcctcgaacaaaatgagttgggctggggcgcgagcagccgcaacggcggcatggttctcccgggattcaagagcgatccgggctcactgctcaggcgatacggcgaccacggccgtcagctctaccaggcgacgctggacgccatggcgctggtcgaggaaacgatccgcgccaaccagatcgattgccagtatgcgcagaccggccagctgtacctggcgcacaagccagcgcttgtgcgacatctcgatgatgaggcgcacattctcagccagcagttcggattggcggctcgggtcattccgcgggtggagctngcttccgaaatcggctcatcccgctattacggcggcttgctggtcgancggagcggcggcctgcanccggcaaaatattttgccggccttgcgcggctggcccgtgatcgcggcgcgcacctctacgnccacaccccggccaccgccatcgaacgacggcaccgtgggggctttgcggtgagcacgccgcgcggccgcatcagcgcgggcaacgtcctgctggcaacgaatggctacagcgactcgatcgtgccgtcagtccgccggcgcgtgattccgatcgggagttacatcatcgccaccgagcccctgacntccgagctggcgcagagtgccattccgaatcgccgnatgctgatcgactcgaagaatttcctctattactggcggctcagcgctgacaaccgcatgctgttcggcggccgagcaagctttgcgccgaccaccatccccaaggcccgcgactggctctacgcggcgatgacccgagtccatccacaacttcgcggcgtcagggtcgagcacgcctggagcgggctggtcggcttcacctttgaccggatgccgcacatcggccgcatcaacggggtgacgtatgcgctgggctattgcggcaccggcgtcgcgatgtcaacgtatttcggccagcttgcagcggattggatcgccggcgatgcgctgccaccgttctggcagcgcccattcccctcgatgccgctctaccg

SEQ ID NO: 495 - DNA, 4000 bp, Escherichia coli
  misc_feature (1965)..(1967): n is a, c, g, or t
  misc_feature (1972)..(1972): n is a, c, g, or t
  misc_feature (1976)..(1978): n is a, c, g, or t
  misc_feature (1982)..(1982): n is a, c, g, or t
  misc_feature (1989)..(1989): n is a, c, g, or t
  misc_feature (2000)..(2000): n is a, c, g, or t
  misc_feature (2007)..(2007): n is a, c, g, or t
  misc_feature (2011)..(2011): n is a, c, g, or t
  misc_feature (2014)..(2016): n is a, c, g, or t
  misc_feature (2025)..(2025): n is a, c, g, or t
  misc_feature (2028)..(2028): n is a, c, g, or t
  misc_feature (2030)..(2030): n is a, c, g, or t
  misc_feature (3085)..(3085): n is a, c, g, or t
  misc_feature (3127)..(3128): n is a, c, g, or t
  misc_feature (3130)..(3132): n is a, c, g, or t
  misc_feature (3135)..(3135): n is a, c, g, or t
  misc_feature (3138)..(3142): n is a, c, g, or t
  misc_feature (3144)..(3149): n is a, c, g, or t
  misc_feature (3151)..(3154): n is a, c, g, or t
  misc_feature (3156)..(3156): n is a, c, g, or t
  misc_feature (3158)..(3163): n is a, c, g, or t
  misc_feature (3165)..(3167): n is a, c, g, or t
  misc_feature (3169)..(3169): n is a, c, g, or t
  misc_feature (3174)..(3174): n is a, c, g, or t
  misc_feature (3176)..(3184): n is a, c, g, or t
  misc_feature (3188)..(3190): n is a, c, g, or t
  misc_feature (3192)..(3201): n is a, c, g, or t
  misc_feature (3203)..(3209): n is a, c, g, or t
  misc_feature (3212)..(3215): n is a, c, g, or t
  misc_feature (3217)..(3219): n is a, c, g, or t
  misc_feature (3221)..(3222): n is a, c, g, or t
  misc_feature (3224)..(3232): n is a, c, g, or t
  misc_feature (3234)..(3234): n is a, c, g, or t
  misc_feature (3237)..(3242): n is a, c, g, or t
  misc_feature (3244)..(3244): n is a, c, g, or t
  misc_feature (3246)..(3249): n is a, c, g, or t
  misc_feature (3252)..(3253): n is a, c, g, or t
  misc_feature (3255)..(3255): n is a, c, g, or t
  misc_feature (3258)..(3263): n is a, c, g, or t
  misc_feature (3265)..(3268): n is a, c, g, or t
  misc_feature (3272)..(3277): n is a, c, g, or t
  misc_feature (3279)..(3283): n is a, c, g, or t
  misc_feature (3285)..(3286): n is a, c, g, or t
  misc_feature (3288)..(3292): n is a, c, g, or t
  misc_feature (3295)..(3299): n is a, c, g, or t
  misc_feature (3301)..(3301): n is a, c, g, or t
  misc_feature (3304)..(3304): n is a, c, g, or t
  misc_feature (3306)..(3309): n is a, c, g, or t
  misc_feature (3311)..(3311): n is a, c, g, or t
  misc_feature (3313)..(3316): n is a, c, g, or t
  misc_feature (3318)..(3320): n is a, c, g, or t
  misc_feature (3322)..(3328): n is a, c, g, or t
  misc_feature (3330)..(3337): n is a, c, g, or t
  misc_feature (3339)..(3341): n is a, c, g, or t
  misc_feature (3343)..(3343): n is a, c, g, or t
  misc_feature (3347)..(3351): n is a, c, g, or t
  misc_feature (3354)..(3358): n is a, c, g, or t
  misc_feature (3361)..(3366): n is a, c, g, or t
  misc_feature (3369)..(3369): n is a, c, g, or t
  misc_feature (3371)..(3371): n is a, c, g, or t
  misc_feature (3373)..(3373): n is a, c, g, or t
  misc_feature (3375)..(3378): n is a, c, g, or t
  misc_feature (3380)..(3394): n is a, c, g, or t
  misc_feature (3396)..(3400): n is a, c, g, or t
  misc_feature (3403)..(3404): n is a, c, g, or t
  misc_feature (3409)..(3411): n is a, c, g, or t
  misc_feature (3414)..(3414): n is a, c, g, or t
  misc_feature (3416)..(3417): n is a, c, g, or t
  misc_feature (3419)..(3423): n is a, c, g, or t
  misc_feature (3425)..(3425): n is a, c, g, or t
  misc_feature (3427)..(3428): n is a, c, g, or t
  misc_feature (3431)..(3440): n is a, c, g, or t
  misc_feature (3442)..(3443): n is a, c, g, or t
  misc_feature (3445)..(3450): n is a, c, g, or t
  misc_feature (3452)..(3452): n is a, c, g, or t
  misc_feature (3454)..(3457): n is a, c, g, or t
  misc_feature (3459)..(3462): n is a, c, g, or t
  misc_feature (3464)..(3465): n is a, c, g, or t
  misc_feature (3468)..(3470): n is a, c, g, or t
  misc_feature (3472)..(3478): n is a, c, g, or t
  misc_feature (3484)..(3485): n is a, c, g, or t
  misc_feature (3487)..(3488): n is a, c, g, or t
  misc_feature (3490)..(3507): n is a, c, g, or t
  misc_feature (3509)..(3509): n is a, c, g, or t
  misc_feature (3511)..(3517): n is a, c, g, or t
  misc_feature (3521)..(3523): n is a, c, g, or t
  misc_feature (3526)..(3532): n is a, c, g, or t
  misc_feature (3534)..(3534): n is a, c, g, or t
  misc_feature (3536)..(3536): n is a, c, g, or t
  misc_feature (3538)..(3538): n is a, c, g, or t
  misc_feature (3541)..(3546): n is a, c, g, or t
  misc_feature (3548)..(3548): n is a, c, g, or t
  misc_feature (3550)..(3550): n is a, c, g, or t
  misc_feature (3552)..(3554): n is a, c, g, or t
  misc_feature (3556)..(3557): n is a, c, g, or t
  misc_feature (3559)..(3560): n is a, c, g, or t
  misc_feature (3562)..(3563): n is a, c, g, or t
  misc_feature (3565)..(3570): n is a, c, g, or t
  misc_feature (3572)..(3572): n is a, c, g, or t
  misc_feature (3574)..(3579): n is a, c, g, or t
  misc_feature (3581)..(3581): n is a, c, g, or t
  misc_feature (3583)..(3586): n is a, c, g, or t
  misc_feature (3588)..(3588): n is a, c, g, or t
  misc_feature (3590)..(3595): n is a, c, g, or t
  misc_feature (3597)..(3599): n is a, c, g, or t
  misc_feature (3601)..(3606): n is a, c, g, or t
  misc_feature (3610)..(3610): n is a, c, g, or t
  misc_feature (3612)..(3613): n is a, c, g, or t
  misc_feature (3615)..(3615): n is a, c, g, or t
  misc_feature (3618)..(3618): n is a, c, g, or t
  misc_feature (3621)..(3623): n is a, c, g, or t
  misc_feature (3625)..(3627): n is a, c, g, or t
  misc_feature (3629)..(3631): n is a, c, g, or t
  misc_feature (3633)..(3633): n is a, c, g, or t
  misc_feature (3635)..(3636): n is a, c, g, or t
  misc_feature (3640)..(3656): n is a, c, g, or t
  misc_feature (3658)..(3658): n is a, c, g, or t
  misc_feature (3661)..(3661): n is a, c, g, or t
  misc_feature (3663)..(3668): n is a, c, g, or t
  misc_feature (3670)..(3674): n is a, c, g, or t
  misc_feature (3676)..(3680): n is a, c, g, or t
  misc_feature (3682)..(3684): n is a, c, g, or t
  misc_feature (3686)..(3688): n is a, c, g, or t
  misc_feature (3690)..(3691): n is a, c, g, or t
  misc_feature (3696)..(3700): n is a, c, g, or t
  misc_feature (3705)..(3706): n is a, c, g, or t
  misc_feature (3711)..(3716): n is a, c, g, or t
  misc_feature (3718)..(3718): n is a, c, g, or t
  misc_feature (3720)..(3721): n is a, c, g, or t
  misc_feature (3724)..(3724): n is a, c, g, or t
  misc_feature (3727)..(3729): n is a, c, g, or t
  misc_feature (3733)..(3735): n is a, c, g, or t
  misc_feature (3737)..(3751): n is a, c, g, or t
  misc_feature (3753)..(3753): n is a, c, g, or t
  misc_feature (3755)..(3756): n is a, c, g, or t
  misc_feature (3758)..(3759): n is a, c, g, or t
  misc_feature (3761)..(3765): n is a, c, g, or t
  misc_feature (3767)..(3770): n is a, c, g, or t
  misc_feature (3772)..(3785): n is a, c, g, or t
  misc_feature (3787)..(3787): n is a, c, g, or t
  misc_feature (3789)..(3790): n is a, c, g, or t
  misc_feature (3792)..(3793): n is a, c, g, or t
  misc_feature (3795)..(3795): n is a, c, g, or t
  misc_feature (3798)..(3800): n is a, c, g, or t
  misc_feature (3802)..(3805): n is a, c, g, or t
  misc_feature (3807)..(3808): n is a, c, g, or t
  misc_feature (3810)..(3813): n is a, c, g, or t
  misc_feature (3815)..(3820): n is a, c, g, or t
  misc_feature (3822)..(3831): n is a, c, g, or t
  misc_feature (3833)..(3844): n is a, c, g, or t
  misc_feature (3846)..(3847): n is a, c, g, or t
  misc_feature (3849)..(3850): n is a, c, g, or t
  misc_feature (3852)..(3855): n is a, c, g, or t
  misc_feature (3857)..(3858): n is a, c, g, or t
  misc_feature (3860)..(3863): n is a, c, g, or t
  misc_feature (3865)..(3865): n is a, c, g, or t
  misc_feature (3867)..(3870): n is a, c, g, or t
  misc_feature (3874)..(3874): n is a, c, g, or t
  misc_feature (3876)..(3888): n is a, c, g, or t
  misc_feature (3890)..(3891): n is a, c, g, or t
  misc_feature (3893)..(3896): n is a, c, g, or t
  misc_feature (3898)..(3898): n is a, c, g, or t
  misc_feature (3900)..(3902): n is a, c, g, or t
  misc_feature (3905)..(3907): n is a, c, g, or t
  misc_feature (3909)..(3915): n is a, c, g, or t
  misc_feature (3917)..(3918): n is a, c, g, or t
  misc_feature (3920)..(3920): n is a, c, g, or t
  misc_feature (3922)..(3922): n is a, c, g, or t
  misc_feature (3924)..(3926): n is a, c, g, or t
  misc_feature (3930)..(3930): n is a, c, g, or t
  misc_feature (3933)..(3933): n is a, c, g, or t
  misc_feature (3935)..(3953): n is a, c, g, or t
  misc_feature (3955)..(3961): n is a, c, g, or t
  misc_feature (3963)..(3969): n is a, c, g, or t
  misc_feature (3973)..(3973): n is a, c, g, or t
  misc_feature (3975)..(3975): n is a, c, g, or t
  misc_feature (3977)..(3982): n is a, c, g, or t
  misc_feature (3984)..(3992): n is a, c, g, or t
  misc_feature (3994)..(3998): n is a, c, g, or t
  misc_feature (4000)..(4000): n is a, c, g, or t
gttcgcaagccccgccgcacaaaaaccgaggattaccaggccgccgggcagacatacgccccggcaccgaaaaagccgacgcggaacgtgaagccggcaacgcccgtcccggcaaccccgacggcgtacgccccggcgcccgcccacgacgaaacggtacacgcagaaccctcacacgaccaaacggcatatgacccaacgtcatcgccgcgccggaagctgaaaaccaagccccaaccccacccagacatccccgatttcagcaagatgtcgaacgaaggtttcgactggtcggcatttatgaaattcgacgaaggcacggcatggggacgcgacgagaatggcaaaggcaagggcaaagcgaccaaaagcgtacgcaagcccccgaaaaaaacggtcacagccgcccaacgggtcgctgccaaaggcaagaaacggaaataggaaacaatagaattgaaataatcgcaataaaaaagacccggttttgggtcttttttattctcaatctctcttagcctgtttaatagcctattacaacggggcaaatttcgctctatcccttttgatttagataagaaagtaggtcttaacatgctggatgataaagtataatacctgtttgcgatgcatgttgtcttttaagatagattaactgctttaagtctatcctattctctattaccataattatatcttgataatccatcaggattatatttgagttttctcttcttatacattcgtctgcaaaccctgaaatagatataaacaagccaagtgttgttgttaatttatctttaactttaccactaaacgcatgcaatgctgattttggcatggctttagcctcccattttgcctcaattagataatcttggttatcatgagtaaacgcaccgtcaatttgctctccactaattttataggaacatttcgggtctaaatcaaataaattaaataaggagttcaggaattgttcaaattcatatccgcgtttttgtggacttgccgatgacgcagacattcgattaaagtctatttttaatttttctaattctgattgaaaaaattgagctttctgtattttattttggtatgttatcttccgggtttctgcttccttttgttcttcaataatagcaaaataaccttttgtatgtagtcttagcgcttcaacactttcctgggctttttttatctttttatctgcgtcttcccatttctttaaatgcgaaaaatcagacatatcggatactgctttaagtaataataacaaatcttcttcatatatgtccaatcgatttgacattctatttacaatgtcatttgctatttctcgtttatatttggtcatgtctaaagtagatacaaacgatttattattgattgtatgattaacaaacattttaagatcgttttttatccaataaatattagttaatgcctctttgagggctattaatgcagaaccggatattttatgagaattagccattagaaaatcttttgacaaaaatatataaaatctaatattccatcaatctaaaatgcaagaagttatttacattttacgatttatcattttttttatatctttgctcctgcgaacattattttcaaaaaaccttttcactggattctcaatacgggaaaccacgaaaaaagtatgcgcagagccgttggggagcaatcccgcgaacggcacctgtattgagcccgtaaaaaggtgaagatagtgttcgcagctgcgcacacttttttttgtattatgcgaacactatcttccgtccgtaccccggtacagacacgccgcaaggccagccgcaagcggtttccgccgtgcaacctcccgatccgtctccatttccacccgcccgattagcaaacgactgctaaccaaacctttattctctttgttgtgccccgttgcacgataaggacagccctttttatgcccatcgnnnccgcngccnnnggcngcggccnggccgaagccncccccgncggnggnnngcaaacacnctncncatgttttcaaaccccgcaggcttcgtctgcaatcttaaaatcaaacaaaatggaaccgaatcaaaaccccgcgcaggaacagcctgtgcaacccatagtcccccaaaccacgcgggccgcgcaacagccggacatcgaacagatcgtcgctcccgccatggaaccggcacagcccgccgcgcaatctgccgcgcaacccgcaccgcaaccgcaaccgcaacccgggcgccccgacgaactgctctacgaccccaacgaagcggcgcagatgatccgccacctgacggacggctatttcgacccggaatacgtcctgcttttcggaaagctggccggcggcacgccccacagcgatgccgtggcctacgacctgctgatggtcgtgcgcgaaacgccggaatacgactggattcgggcaaaacgcatcctgcggtacaggatgccgtaccgctaccggaaggtcacctacatcaatccctatatcctgccgttgaactatgtcgaatcgcatcggacgccgttcctctactttgcccatgccgagggcgaactattgcattgcagcgaccactatcggtttcgccgcccgaagcacccgattgactttgccaaagcctatgccgacgccaaattccatttcgacacgttccgcacgctcggcaacgacctgctcgaacaggcgcaggatgcgtttgccgggggccgcaacgtgcggctggcggcacagttctcggcgcaggcgatcgtctatttctaccacacgctctactatgtctatcacggtatggaattcgacatccatgatccggtcgtgatgcacgaccggatgcggacgctttcgacaaagctgatgctggtattcgacgacaaccatatcgaaaacattttcacgctgccatggctgaaacaaattttgatgaaaacgccgtatagcgccgaattctacatggctccgcaggaattggaaatgcacatggggcgtgttcaaaaggctgccgaaataatcgaaaactactgcggcctgcggctggaactctataaagaactgggcacncaataggccaccccgacacctgaataagacaagaggggctgnnannnccnctnnnnntnnnnnntnnnnanannnnnngnnnanagagngnnnnnnnnncccnnngnnnnnnnnnncnnnnnnnttnnnnannncnncnnnnnnnnncnctnnnnnntntnnnnggnnanaannnnnncnnnntttnnnnnntnnnnnanntnnnnnccnnnnntnttncnnnngngnnnngnnngnnnnnnnannnnnnnnannntntttnnnnnttnnnnnaannnnnnatntntntnnnnannnnnnnnnnnnnnncnnnnnttnncacannntanannannnnnananngcnnnnnnnnnngnngnnnnnncncnnnncnnnnanntcnnnannnnnnncgcgcnnanngnnnnnnnnnnnnnnnnnngngnnnnnnnacannntcnnnnnnngngngngcnnnnnncncncnnngnncnngnnannnnnngngnnnnnnanannnncncnnnnnngnnncnnnnnncgcncnngngcnccnnngnnnannncncnncgcnnnnnnnnnnnnnnnnncnccncnnnnnngnnnnngnnnnntnnncnnngnnttttnnnnnttttnncacannnnnnananntcncannncgcnnngnnnnnnnnnnnnnnncncnnanncnnnnncnnnncnnnnnnnnnnnnnncncnngnncncgnnncnnnnanntnnnncnnnnnnannnnnnnnnncnnnnnnnnnnnncnncnnannnngnncnnnncncnnnnaaanannnnnnnnnnnnngnncnnnnanannnccnnngnnnnnnntnncncncnnngcgnganannnnnnnnnnnnnnnnnnnannnnnnnannnnnnnctcncncnnnnnnannnnnnnnncnnnnngn

SEQ ID NO: 496 - DNA, 4000 bp, Escherichia coli
  misc_feature (794)..(794): n is a, c, g, or t
  misc_feature (798)..(798): n is a, c, g, or t
  misc_feature (803)..(803): n is a, c, g, or t
  misc_feature (1989)..(1989): n is a, c, g, or t
  misc_feature (2893)..(2893): n is a, c, g, or t
  misc_feature (3323)..(3323): n is a, c, g, or t
  misc_feature (3700)..(3700): n is a, c, g, or t
  misc_feature (3703)..(3703): n is a, c, g, or t
  misc_feature (3723)..(3723): n is a, c, g, or t
  misc_feature (3729)..(3729): n is a, c, g, or t
  misc_feature (3736)..(3736): n is a, c, g, or t
  misc_feature (3739)..(3740): n is a, c, g, or t
  misc_feature (3745)..(3745): n is a, c, g, or t
  misc_feature (3749)..(3750): n is a, c, g, or t
  misc_feature (3755)..(3755): n is a, c, g, or t
  misc_feature (3764)..(3765): n is a, c, g, or t
  misc_feature (3778)..(3779): n is a, c, g, or t
  misc_feature (3783)..(3783): n is a, c, g, or t
  misc_feature (3789)..(3789): n is a, c, g, or t
  misc_feature (3841)..(3841): n is a, c, g, or t
  misc_feature (3850)..(3850): n is a, c, g, or t
  misc_feature (3855)..(3855): n is a, c, g, or t
  misc_feature (3857)..(3857): n is a, c, g, or t
  misc_feature (3863)..(3863): n is a, c, g, or t
  misc_feature (3866)..(3866): n is a, c, g, or t
  misc_feature (3870)..(3870): n is a, c, g, or t
  misc_feature (3874)..(3874): n is a, c, g, or t
  misc_feature (3876)..(3877): n is a, c, g, or t
  misc_feature (3880)..(3883): n is a, c, g, or t
  misc_feature (3885)..(3888): n is a, c, g, or t
  misc_feature (3891)..(3892): n is a, c, g, or t
  misc_feature (3896)..(3896): n is a, c, g, or t
  misc_feature (3905)..(3905): n is a, c, g, or t
  misc_feature (3909)..(3909): n is a, c, g, or t
  misc_feature (3915)..(3915): n is a, c, g, or t
  misc_feature (3919)..(3919): n is a, c, g, or t
  misc_feature (3921)..(3921): n is a, c, g, or t
  misc_feature (3923)..(3924): n is a, c, g, or t
  misc_feature (3927)..(3927): n is a, c, g, or t
  misc_feature (3930)..(3931): n is a, c, g, or t
  misc_feature (3937)..(3938): n is a, c, g, or t
  misc_feature (3944)..(3946): n is a, c, g, or t
  misc_feature (3952)..(3952): n is a, c, g, or t
  misc_feature (3960)..(3961): n is a, c, g, or t
  misc_feature (3963)..(3963): n is a, c, g, or t
  misc_feature (3965)..(3966): n is a, c, g, or t
  misc_feature (3975)..(3975): n is a, c, g, or t
  misc_feature (3977)..(3977): n is a, c, g, or t
  misc_feature (3979)..(3979): n is a, c, g, or t
  misc_feature (3982)..(3982): n is a, c, g, or t
  misc_feature (3984)..(3984): n is a, c, g, or t
  misc_feature (3987)..(3988): n is a, c, g, or t
  misc_feature (3990)..(3990): n is a, c, g, or t
  misc_feature (3992)..(3992): n is a, c, g, or t
  misc_feature (3994)..(3995): n is a, c, g, or t
  misc_feature (3998)..(3999): n is a, c, g, or t
tattttataggctttctataacattttttactatattatctacggttaaaccattttcttccattaattcttctactttatatctatcgtagaattttttacttattccatagttttgtacttttaagcctatatttcctaggaagcttgctacagtttgaccgtatccaccttccactataccatcttcaattgttacaactaacttatgattttcttctaaagaatttaataattctttatccaaacctgttaagaactttggatttaccagtgttgcttctatattatgtttagatttcagttgttctacaacttttttggctaagccataaaagtttccaactccaaatatcgcaacctgtttcccagctttaactactttattcttgtttaaaatagaataatctgttgtatcttcttcgccagtttctacaacacttcctacagggactctaatagctactggatgtttatcttgattaattgcccaatctaacattgctaaatgttcttctttattagtcggggctaggtaaacaaagtttggtatatgagatataaatggtatgtcaaaaaatcctaaatgactttcatcatttattgagtttattgaagcaccgtagactaatactacccctgcttgattatttaatgccatatcatgagaaagttgatcatatgctctttgtaagaatgtagaaaatactgaccaaataggttttgctccatttttagctaggcctgttgtcatagttgctgcttgttgttctgcaataccaacatctacaaantganttctnaatttttctcttaattccctgtcgaaaactattcttggtgtccctgcatttacaacaacagctagtggatcttcttctaattttttagctaaatattgagatgtaataccattgtatgtttgagaagaggccccttgatttttatattctccagtttctaaactaaacggtcccccagcatggaatttttcatggtctttttctgccggttcaaatcctttacctttttctgtgtaaatgtgtaatactaccggatgatctatatcttttacttctttaaataatgaaattagttcttctaagttattaccatcttctaagtagcgataatcatatcctaatgctttaaaaatattgtttgttacctgacctttattttcacgtagctctcttaatgcagtatatataccgcctttaggatttttagcaatagattggtcattatcatttattataattattgcattagttcccaatgtagctattgtgtttagcccttcataggccattccacctgacaaagaaccatctccaataattgccacaacattacctttttctttctttaaatctcttgcgtgcagtataccacttgctaaagataaagaagttgatgtatgaccaattgtaaataaatcatgctcactttcttttggattagtatatcctgagacatcatcataatgtttaggatccgtaaatgccttttgacgtcctgttaacattttatggatataagtctgatgcgaaacatcaaaaactattttatcaactggcgagtcaaatacatggtgtaaggcaactgtcatctccaccattcctaaatttggtccactatgtccaccatgaacacttattttttctaataatgctgttcttgtttcatctacaagagtatgcaattcttcaattatcaatcctttaagatcttttggtcctgaaatattttctaaaatcatcttgaatcctcctaattccatcgatgtataaatattattataacataaattaatctaattcaattattcatttttattatagcatctgtaaatatactaatcattctctataaaccattatatctttttcgcaaacaaatgtaaatataattagggataagtaatgtaacttttaaaaatattttagataaatgaaagctttcacatcacgtttaaatcaactccgnccaaaaaaaattttaatataagttaacttatcgtatcgctttttatttgaaaaaatttattttttagtttatcattatctaagtagaattttctacataactttatgactattaaaaaaactaaatgtataatttatatttgaggtgaaatttatgaaaacagcatttgtatgtgattcagcattacaaattaatcaagaattcgaaaaaaataatccaatcttaactgtaattccagttgaggttcgtctagacgatgaactttatatagataatgtaactattactcctgaggtattttacgaaaaagtaaatgctggtatgaaacctagcactagccaaccatcagttggaagaatcttagaagtatatgaaaaactaaaaagtgaaggttatgaaagaatagtagcttttagtgtatcttcaaaattatctggtacttattcatcattcttacaagcaaaagatcttatcgaaggactagaaattaaagtaatcgatactgaacaagtagctagaatggtaggttgtgcaattgaaaaaatcgttaaagattttacagcaggaacacttgcttatgaagatatagaaagtaaatacaaagaacttttagaaaaacaaaatgttctagtaacagttgaaactatggacttcctttatgctggtggacgcttaactaaagctcagttcttattatcaaacttattaagtattctacctattatcacagttaaagatggtttattaactgtttccggaaagcatagaggtatgaataaagttcttacgaaaatgtgtgaagaaattaaagaaaaaaatccaaaatcactattcatactatatacaagtgatgatttactagctaaagcacaagatacaataaaaaaagtatttggagatatcnaaactgaaattgaagttgtttctccagttattggatgccatgcagggcctcgtgctcttgctattgggtatcttggatacgataaatagaagaaaaaagatgcaatatttttatattgcatctttttttctatagagctcttattttttcattcatttgttttcttaacttagaaaaatcttctttaactacgacagtatcagcaatataatcatgcaatccttttttcttaggcagtatacctactaaaagataaggaatatagaatagtactgttgttagtattcttcccacaccctcacgataaattacatcagaccacgatagtttttcacctttatttgtttctacctttatcttcattattactttacctaatgtttgagaaaagaaatatgtcataaggataaagtaagtaaataatactatnacaaagcttaaagtaaattctccaattaaagaaagtttaatccctacatttaaatagtttaatgttgctgtattgaacaatcctgtaattgatgcaactactattaaatctattatataagccataaatctctgccagaaacctgcataaaagttttctgatagttttacataatcttcaaatgttgttggtaatgaaaaatctacactacgactataattattataattataattttgattatttgtttgattagcttgctgagttaaattctcagattttacagattgttcattattatgattttcttttgattcactactttgatagtcagactgcaacatctcattactttcattattagtagttgactcatnatnttgaaaattagtttggatantatttnatgttangtnnccagnttgnngtttnacttgtganntttcactattttnnttanggtttnattcattacctagataatcagggtttgtattttcattataattattagtcantataactanccccnancctaantancttntttntnnacnnnncnnnnaannttcnctattaaantctnaaatanttgntntnnttntannttttannaatctnnntaaaanactttctnntnanntatcttttntnanttnantannantngnnttnnt

SEQ ID NO: 497 - DNA, 4000 bp, Escherichia coli
  misc_feature (16)..(16): n is a, c, g, or t
  misc_feature (19)..(19): n is a, c, g, or t
  misc_feature (22)..(23): n is a, c, g, or t
  misc_feature (30)..(31): n is a, c, g, or t
  misc_feature (34)..(36): n is a, c, g, or t
  misc_feature (38)..(39): n is a, c, g, or t
  misc_feature (43)..(43): n is a, c, g, or t
  misc_feature (48)..(48): n is a, c, g, or t
  misc_feature (59)..(59): n is a, c, g, or t
  misc_feature (63)..(63): n is a, c, g, or t
  misc_feature (69)..(70): n is a, c, g, or t
  misc_feature (76)..(76): n is a, c, g, or t
  misc_feature (87)..(87): n is a, c, g, or t
  misc_feature (104)..(104): n is a, c, g, or t
  misc_feature (110)..(110): n is a, c, g, or t
  misc_feature (118)..(118): n is a, c, g, or t
  misc_feature (125)..(125): n is a, c, g, or t
  misc_feature (129)..(129): n is a, c, g, or t
  misc_feature (131)..(131): n is a, c, g, or t
  misc_feature (141)..(141): n is a, c, g, or t
  misc_feature (152)..(153): n is a, c, g, or t
  misc_feature (157)..(157): n is a, c, g, or t
  misc_feature (159)..(159): n is a, c, g, or t
  misc_feature (164)..(164): n is a, c, g, or t
  misc_feature (173)..(173): n is a, c, g, or t
  misc_feature (175)..(175): n is a, c, g, or t
  misc_feature (192)..(192): n is a, c, g, or t
  misc_feature (204)..(204): n is a, c, g, or t
  misc_feature (208)..(208): n is a, c, g, or t
  misc_feature (222)..(222): n is a, c, g, or t
  misc_feature (224)..(224): n is a, c, g, or t
  misc_feature (228)..(228): n is a, c, g, or t
  misc_feature (233)..(233): n is a, c, g, or t
  misc_feature (238)..(238): n is a, c, g, or t
  misc_feature (244)..(244): n is a, c, g, or t
  misc_feature (253)..(253): n is a, c, g, or t
  misc_feature (255)..(256): n is a, c, g, or t
  misc_feature (259)..(259): n is a, c, g, or t
  misc_feature (272)..(272): n is a, c, g, or t
  misc_feature (276)..(278): n is a, c, g, or t
  misc_feature (286)..(286): n is a, c, g, or t
  misc_feature (298)..(300): n is a, c, g, or t
  misc_feature (318)..(318): n is a, c, g, or t
  misc_feature (325)..(327): n is a, c, g, or t
  misc_feature (344)..(345): n is a, c, g, or t
  misc_feature (351)..(351): n is a, c, g, or t
  misc_feature (363)..(363): n is a, c, g, or t
  misc_feature (370)..(371): n is a, c, g, or t
  misc_feature (373)..(374): n is a, c, g, or t
  misc_feature (381)..(381): n is a, c, g, or t
  misc_feature (393)..(394): n is a, c, g, or t
  misc_feature (403)..(403): n is a, c, g, or t
  misc_feature (408)..(408): n is a, c, g, or t
  misc_feature (431)..(431): n is a, c, g, or t
  misc_feature (437)..(438): n is a, c, g, or t
  misc_feature (440)..(440): n is a, c, g, or t
  misc_feature (453)..(453): n is a, c, g, or t
  misc_feature (456)..(458): n is a, c, g, or t
  misc_feature (464)..(465): n is a, c, g, or t
  misc_feature (470)..(470): n is a, c, g, or t
  misc_feature (474)..(474): n is a, c, g, or t
  misc_feature (477)..(478): n is a, c, g, or t
  misc_feature (483)..(483): n is a, c, g, or t
  misc_feature (485)..(485): n is a, c, g, or t
  misc_feature (488)..(488): n is a, c, g, or t
  misc_feature (501)..(501): n is a, c, g, or t
  misc_feature (515)..(515): n is a, c, g, or t
  misc_feature (528)..(528): n is a, c, g, or t
  misc_feature (534)..(534): n is a, c, g, or t
  misc_feature (541)..(543): n is a, c, g, or t
  misc_feature (561)..(561): n is a, c, g, or t
  misc_feature (568)..(568): n is a, c, g, or t
  misc_feature (575)..(575): n is a, c, g, or t
  misc_feature (581)..(583): n is a, c, g, or t
  misc_feature (586)..(586): n is a, c, g, or t
  misc_feature (588)..(588): n is a, c, g, or t
  misc_feature (594)..(594): n is a, c, g, or t
  misc_feature (613)..(613): n is a, c, g, or t
  misc_feature (620)..(620): n is a, c, g, or t
  misc_feature (623)..(624): n is a, c, g, or t
  misc_feature (632)..(632): n is a, c, g, or t
  misc_feature (639)..(639): n is a, c, g, or t
  misc_feature (647)..(648): n is a, c, g, or t
  misc_feature (653)..(653): n is a, c, g, or t
  misc_feature (657)..(657): n is a, c, g, or t
  misc_feature (661)..(662): n is a, c, g, or t
  misc_feature (675)..(677): n is a, c, g, or t
  misc_feature (679)..(679): n is a, c, g, or t
  misc_feature (689)..(689): n is a, c, g, or t
  misc_feature (696)..(696): n is a, c, g, or t
  misc_feature (699)..(699): n is a, c, g, or t
  misc_feature (701)..(701): n is a, c, g, or t
  misc_feature (705)..(706): n is a, c, g, or t
  misc_feature (710)..(710): n is a, c, g, or t
  misc_feature (739)..(740): n is a, c, g, or t
  misc_feature (753)..(753): n is a, c, g, or t
  misc_feature (769)..(769): n is a, c, g, or t
  misc_feature (772)..(772): n is a, c, g, or t
  misc_feature (776)..(776): n is a, c, g, or t
  misc_feature (778)..(778): n is a, c, g, or t
  misc_feature (793)..(793): n is a, c, g, or t
  misc_feature (815)..(815): n is a, c, g, or t
  misc_feature (818)..(819): n is a, c, g, or t
  misc_feature (842)..(842): n is a, c, g, or t
  misc_feature (848)..(849): n is a, c, g, or t
  misc_feature (859)..(859): n is a, c, g, or t
  misc_feature (866)..(867): n is a, c, g, or t
  misc_feature (892)..(892): n is a, c, g, or t
  misc_feature (910)..(910): n is a, c, g, or t
  misc_feature (919)..(919): n is a, c, g, or t
  misc_feature (923)..(923): n is a, c, g, or t
  misc_feature (931)..(931): n is a, c, g, or t
  misc_feature (937)..(937): n is a, c, g, or t
  misc_feature (939)..(942): n is a, c, g, or t
  misc_feature (945)..(945): n is a, c, g, or t
  misc_feature (948)..(948): n is a, c, g, or t
  misc_feature (952)..(953): n is a, c, g, or t
  misc_feature (960)..(960): n is a, c, g, or t
  misc_feature (962)..(963): n is a, c, g, or t
  misc_feature (966)..(968): n is a, c, g, or t
  misc_feature (972)..(974): n is a, c, g, or t
  misc_feature (976)..(978): n is a, c, g, or t
  misc_feature (983)..(984): n is a, c, g, or t
  misc_feature (986)..(986): n is a, c, g, or t
  misc_feature (991)..(991): n is a, c, g, or t
  misc_feature (997)..(997): n is a, c, g, or t
  misc_feature (999)..(999): n is a, c, g, or t
  misc_feature (1002)..(1003): n is a, c, g, or t
  misc_feature (1009)..(1009): n is a, c, g, or t
  misc_feature (1011)..(1011): n is a, c, g, or t
  misc_feature (1016)..(1016): n is a, c, g, or t
  misc_feature (1018)..(1018): n is a, c, g, or t
  misc_feature (1020)..(1020): n is a, c, g, or t
  misc_feature (1023)..(1025): n is a, c, g, or t
  misc_feature (1028)..(1028): n is a, c, g, or t
  misc_feature (1030)..(1031): n is a, c, g, or t
  misc_feature (1033)..(1036): n is a, c, g, or t
  misc_feature (1038)..(1040): n is a, c, g, or t
  misc_feature (1042)..(1043): n is a, c, g, or t
  misc_feature (1045)..(1045): n is a, c, g, or t
  misc_feature (1059)..(1059): n is a, c, g, or t
  misc_feature (1061)..(1063): n is a, c, g, or t
  misc_feature (1069)..(1070): n is a, c, g, or t
  misc_feature (1073)..(1073): n is a, c, g, or t
  misc_feature (1075)..(1077): n is a, c, g, or t
  misc_feature (1080)..(1080): n is a, c, g, or t
  misc_feature (1082)..(1082): n is a, c, g, or t
  misc_feature (1085)..(1085): n is a, c, g, or t
  misc_feature (1089)..(1089): n is a, c, g, or t
  misc_feature (1091)..(1092): n is a, c, g, or t
  misc_feature (1094)..(1095): n is a, c, g, or t
  misc_feature (1097)..(1098): n is a, c, g, or t
  misc_feature (1102)..(1103): n is a, c, g, or t
  misc_feature (1105)..(1105): n is a, c, g, or t
  misc_feature (1108)..(1108): n is a, c, g, or t
  misc_feature (1112)..(1113): n is a, c, g, or t
  misc_feature (1115)..(1115): n is a, c, g, or t
  misc_feature (1119)..(1119): n is a, c, g, or t
  misc_feature (1126)..(1126): n is a, c, g, or t
  misc_feature (1134)..(1138): n is a, c, g, or t
  misc_feature (1142)..(1142): n is a, c, g, or t
  misc_feature (1145)..(1145): n is a, c, g, or t
  misc_feature (1147)..(1150): n is a, c, g, or t
  misc_feature (1152)..(1152): n is a, c, g, or t
  misc_feature (1155)..(1156): n is a, c, g, or t
  misc_feature (1159)..(1159): n is a, c, g, or t
  misc_feature (1162)..(1163): n is a, c, g, or t
  misc_feature (1165)..(1165): n is a, c, g, or t
  misc_feature (1174)..(1174): n is a, c, g, or t
  misc_feature (1182)..(1182): n is a, c, g, or t
  misc_feature (1185)..(1187): n is a, c, g, or t
  misc_feature (1189)..(1189): n is a, c, g, or t
  misc_feature (1191)..(1191): n is a, c, g, or t
  misc_feature (1193)..(1193): n is a, c, g, or t
  misc_feature (1196)..(1196): n is a, c, g, or t
  misc_feature (1199)..(1200): n is a, c, g, or t
  misc_feature (1203)..(1204): n is a, c, g, or t
  misc_feature (1206)..(1206): n is a, c, g, or t
  misc_feature (1209)..(1212): n is a, c, g, or t
  misc_feature (1216)..(1228): n is a, c, g, or t
  misc_feature (1233)..(1233): n is a, c, g, or t
  misc_feature (1235)..(1236): n is a, c, g, or t
  misc_feature (1238)..(1238): n is a, c, g, or t
  misc_feature (1240)..(1240): n is a, c, g, or t
  misc_feature (1242)..(1242): n is a, c, g, or t
  misc_feature (1244)..(1244): n is a, c, g, or t
  misc_feature (1246)..(1247): n is a, c, g, or t
  misc_feature (1249)..(1249): n is a, c, g, or t
  misc_feature (1251)..(1251): n is a, c, g, or t
  misc_feature (1253)..(1254): n is a, c, g, or t
  misc_feature (1256)..(1257): n is a, c, g, or t
  misc_feature (1259)..(1259): n is a, c, g, or t
  misc_feature (1261)..(1262): n is a, c, g, or t
  misc_feature (1265)..(1265): n is a, c, g, or t
  misc_feature (1275)..(1279): n is a, c, g, or t
  misc_feature (1288)..(1290): n is a, c, g, or t
  misc_feature (1295)..(1295): n is a, c, g, or t
  misc_feature (1297)..(1298): n is a, c, g, or t
  misc_feature (1304)..(1304): n is a, c, g, or t
  misc_feature (1306)..(1306): n is a, c, g, or t
  misc_feature (1311)..(1311): n is a, c, g, or t
  misc_feature (1316)..(1316): n is a, c, g, or t
  misc_feature (1319)..(1319): n is a, c, g, or t
  misc_feature (1321)..(1321): n is a, c, g, or t
  misc_feature (1325)..(1327): n is a, c, g, or t
  misc_feature (1330)..(1330): n is a, c, g, or t
  misc_feature (1333)..(1335): n is a, c, g, or t
  misc_feature (1337)..(1341): n is a, c, g, or t
  misc_feature (1343)..(1347): n is a, c, g, or t
  misc_feature (1349)..(1349): n is a, c, g, or t
  misc_feature (1352)..(1355): n is a, c, g, or t
  misc_feature (1357)..(1357): n is a, c, g, or t
  misc_feature (1359)..(1359): n is a, c, g, or t
  misc_feature (1361)..(1362): n is a, c, g, or t
  misc_feature (1364)..(1365): n is a, c, g, or t
  misc_feature (1367)..(1367): n is a, c, g, or t
  misc_feature (1373)..(1373): n is a, c, g, or t
  misc_feature (1379)..(1380): n is a, c, g, or t
  misc_feature (1382)..(1383): n is a, c, g, or t
  misc_feature (1386)..(1386): n is a, c, g, or t
  misc_feature (1390)..(1391): n is a, c, g, or t
  misc_feature (1394)..(1394): n is a, c, g, or t
  misc_feature (1399)..(1400): n is a, c, g, or t
  misc_feature (1402)..(1403): n is a, c, g, or t
  misc_feature (1405)..(1408): n is a, c, g, or t
  misc_feature (1410)..(1411): n is a, c, g, or t
  misc_feature (1415)..(1415): n is a, c, g, or t
  misc_feature (1419)..(1421): n is a, c, g, or t
  misc_feature (1424)..(1424): n is a, c, g, or t
  misc_feature (1426)..(1426): n is a, c, g, or t
  misc_feature (1428)..(1428): n is a, c, g, or t
  misc_feature (1439)..(1439): n is a, c, g, or t
  misc_feature (1445)..(1445): n is a, c, g, or t
  misc_feature (1456)..(1459): n is a, c, g, or t
  misc_feature (1461)..(1462): n is a, c, g, or t
  misc_feature (1464)..(1465): n is a, c, g, or t
  misc_feature (1468)..(1470): n is a, c, g, or t
  misc_feature (1493)..(1493): n is a, c, g, or t
  misc_feature (1496)..(1497): n is a, c, g, or t
  misc_feature (1499)..(1500): n is a, c, g, or t
  misc_feature (1504)..(1505): n is a, c, g, or t
  misc_feature (1510)..(1511): n is a, c, g, or t
  misc_feature (1513)..(1513): n is a, c, g, or t
  misc_feature (1521)..(1522): n is a, c, g, or t
  misc_feature (1525)..(1526): n is a, c, g, or t
  misc_feature (1539)..(1540): n is a, c, g, or t
  misc_feature (1568)..(1574): n is a, c, g, or t
  misc_feature (1577)..(1577): n is a, c, g, or t
  misc_feature (1580)..(1582): n is a, c, g, or t
  misc_feature (1584)..(1584): n is a, c, g, or t
  misc_feature (1586)..(1589): n is a, c, g, or t
  misc_feature (1591)..(1591): n is a, c, g, or t
  misc_feature (1593)..(1593): n is a, c, g, or t
  misc_feature (1628)..(1628): n is a, c, g, or t
  misc_feature (1634)..(1634): n is a, c, g, or t
  misc_feature (1990)..(1990): n is a, c, g, or t
  misc_feature (3930)..(3930): n is a, c, g, or t
  misc_feature (3939)..(3939): n is a, c, g, or t
  misc_feature (3941)..(3941): n is a, c, g, or t
  misc_feature (3954)..(3954): n is a, c, g, or t
  misc_feature (3956)..(3960): n is a, c, g, or t
  misc_feature (3964)..(3964): n is a, c, g, or t
  misc_feature (3967)..(3972): n is a, c, g, or t
  misc_feature (3974)..(3975): n is a, c, g, or t
  misc_feature (3977)..(3981): n is a, c, g, or t
  misc_feature (3983)..(3984): n is a, c, g, or t
  misc_feature (3986)..(3987): n is a, c, g, or t
  misc_feature (3989)..(3991): n is a, c, g, or t
  misc_feature (3993)..(3998): n is a, c, g, or t
  misc_feature (4000)..(4000): n is a, c, g, or t
agttctcctctcctcnttnaannctgtgtnnttnnngnntttntagangatgatgattnaatnctctcnntctatnagcataaagtnggggtataaagtgtgangacaanagtagtgntttcaantatntntttttggtgnctttcatcagnntttntntgaangtgttgtgntngagaacgcaatacatangatttaaaggtngtangttcgcaaaatgtncnaaanatcancgagntattcncatatatananntantagtagttacaancgtnnnatattatnattaatctatcnnntctcgtcatttcctcttngctgttnnncttcgtctttttctttnnaacacntgcccttctcgnctcgtcnncnncgaatanaacaacagtaanngcacaaaanagtanggaaagtaaatcaagaacaaggntaaacnncntctgcgatagatntcnnntaatannggaancatngtnntcatnangtnactggaatatccnactcccatccatcnaatattcgtctcntctttncgtaaannntttctcaacaagacgtanaacatcngcagttncaccannnctncncaaacnataaaacttttcaaccacntcggttnttnnagcatgangaagtcntcgttttnnttgangtgnaacnncagcaactgtcgnnngnaagacgggangtatttnttngnaacnntcgnttgagagtcgatcaaaatcgtcgccggcnngtgcgtcgcgaantacgcgatgtacactntgngcangnagtcgttcatcatcntcctttttttctattattcaantcnntcttctccttacatacataaaanagagcnnctttcaacanaatcgcnntcttctgctcctcctcctgctgatntctttctctttcttcttnttctccttnaaantcttctcntcgtcncnnnntcntcnttanngtcgtcntnntannngtcnnnannnttttnntnaagtnttgtgngnttnnttcttntnttttntntnaannntcncnncnnnnannntnntnacatcttcccttancnnnaagaannaancnnnatnantcnccantnntnncnngccnnanganaagnnanaaantcaaaanacacaacnnnnnccanaantnnnngnggnnaanaannancaaaaaaanaaaaaaanttnnntncntnttnttnnaannanaannnnttannnnnnnnnnnnnttttntnntntntncntnncncncnntnntncnncgncgtcgtcgtnnnnngaagaagannnaaganannagaggngnggaangaagnagnanaatnnnggngannnannnnntnnnnnanaannnncncnannannangaagangaggannannagnagannaanaacannannannnnannagcngcgnnnagnantnatcatcatcancatcancagcagcagcnnnngnngnngannnataataataataataataataanaannannacgnngtcgnngnggcgctgnngcnnccaccaccacaannacaacaacaacagcagcagcagcagcannnnnnncancannncncnnnncnancacaacaacaacaacaacaacaacaacaacaacancatcancatcatcaacaacaacaacaacaacaacaacagcagcaaatgatgatgtatactaatcctcaccagccagcgcggcacggaacgtatcagcagcagcagcagcagcaacaaccaaaccaccttcatcaaggaaatctaggagaagctcttcctcaagcacctgcggctggacttcaccggggaaatattggtactggagggaggcacgaaaacaacatggaatacacggcggcgcaacagttgtcgcagttacaaaacatccacccgaacgcgatcgacgcgcaatcgttgctagcgttggcaatacaaaaccaagaggtagagtcgaacctcgtcaggcgtcagacgcaaagacncccatcagggtggaggaaatcggccaactgcgtcaagtgctcgaaaccggcgccggttggttttcggtacaaagtcaaagactctcctgggaatttttactgcaaaacgtgttacaacgcgcaaaatacaaagatgaagagagacacgtgcacgtcctgtcacgtcacgaaagattctttgacgtggtttaagtcgaaaaagacgcccgggggggcgacgttgtgtcaaaagtgctacacctcggagatgaacgcgcgagcgattacgtgcagtaactgtcaaagtgataaaacgacgaacgcgtgggttcgctcgaagacagataagaggaaatacttgtgtcagcagtgctatcgcaaagagaaaggaaagaaaacggtatcgaaatgtggagagtgtaattgcgatgtcgaggttggtgggtgtaggaaatccaagttgcagaaaatgaagcacttgtgtggcgcgtgcttcgagaacgagcaatctctcattaagcagaagccatgcacggcttgcgatgggaaattggacccggacaatttgaggaaatctaaggtggataaatcaaattatttgtgcaataagtgttatctgaaagaattaaattcgatggtgaataaacagtgcgggaagtgcggcacgaaagagtcgcctgggagttggagcaaatctcgaacaaatcaaggagtggattactgttcgcagtgtttttccaaggagagagcagagttaaagaaagcccaaaagcaagaggaagtaaataaagcagcggcggcggcggcgaacaatgccacggatgcgatgcaagtaggagttgaggcgggcgcgagtactcccaatcgcagcatcgagcaggcggagaatagcacccccccctcgacgcggggcggaaggaatgcacgcaacaagaagtgatcattagagagcaaaaaagctaacaaacgcatatacaatttagaatctcaatattggaaaatacggatttatatacgcgcttaatttttactactcgtacactgttttggctgcgatttctaaatcttcacgctactttctcaacactcgaatgcattctccttcgtcggcgtctaaatttgaagcaattattctaaacttattaccaatgagttcttgatccattcgcgcgacttgaacaggttgcgttttccactcgtcggcgtgacttttgtcggagaagaaaaataccacgtgattcgccgtaatctcgagcccagcatccacgtcaatacgtagcttcttcttgttgtcttcttctccttcttcttccttttcttcttcttctctcttcttctcatctgcatcatcaacgaatagctcgcatgatttccacagaaatatggtttgctcttcctcaatcgtggaatatcgatgaccaagttcatctaacaaatcacatttgaacgattgatagcaatatcccgggctattactttccactgacttcgcacacaggagaacgtttgcttttgtcaaatttaagccgcagacgttatcacctaaaggcgctcgcgagctccagaactcggatatatttgccagagctatatgaagccatatcttcttctctctgcacgtctcttgctttgtttctatcaaagtttccttctgttttttcatcgtcatctccttcttcttctccttttccttatccccacaaccagaaaccttcacatcgaatgccaaacaatcgtctgctattcttgcctctacttgtatcggtatttcttctgacgcagataatggaatcgggcattctagaggcgcaattacttggcgccaatgtctacgataactttgcgcggggaaagtattcaatctaaaggctcctgagccatccaaatcgcactcccaaaacattgcgacggcgttaatctcgagacctaacgatcgaagactactactactactactactnctgctgctncnacaacaacaacancnnnnnactnctnnnnnncnncnnnnntnntnntnnntnnnnnnan

SEQ ID NO: 498 - DNA, 4000 bp, Escherichia coli
  misc_feature (1)..(4): n is a, c, g, or t
  misc_feature (6)..(8): n is a, c, g, or t
  misc_feature (10)..(10): n is a, c, g, or t
  misc_feature (12)..(13): n is a, c, g, or t
  misc_feature (15)..(28): n is a, c, g, or t
  misc_feature (30)..(31): n is a, c, g, or t
  misc_feature (33)..(35): n is a, c, g, or t
  misc_feature (37)..(38): n is a, c, g, or t
  misc_feature (41)..(45): n is a, c, g, or t
  misc_feature (47)..(49): n is a, c, g, or t
  misc_feature (51)..(51): n is a, c, g, or t
  misc_feature (53)..(56): n is a, c, g, or t
  misc_feature (58)..(59): n is a, c, g, or t
  misc_feature (61)..(63): n is a, c, g, or t
  misc_feature (65)..(65): n is a, c, g, or t
  misc_feature (67)..(74): n is a, c, g, or t
  misc_feature (76)..(76): n is a, c, g, or t
  misc_feature (78)..(78): n is a, c, g, or t
  misc_feature (80)..(81): n is a, c, g, or t
  misc_feature (83)..(84): n is a, c, g, or t
  misc_feature (87)..(89): n is a, c, g, or t
  misc_feature (91)..(101): n is a, c, g, or t
  misc_feature (103)..(115): n is a, c, g, or t
  misc_feature (118)..(120): n is a, c, g, or t
  misc_feature (122)..(126): n is a, c, g, or t
  misc_feature (128)..(128): n is a, c, g, or t
  misc_feature (131)..(137): n is a, c, g, or t
  misc_feature (140)..(141): n is a, c, g, or t
  misc_feature (144)..(146): n is a, c, g, or t
  misc_feature (148)..(151): n is a, c, g, or t
  misc_feature (153)..(156): n is a, c, g, or t
  misc_feature (158)..(161): n is a, c, g, or t
  misc_feature (163)..(166): n is a, c, g, or t
  misc_feature (168)..(169): n is a, c, g, or t
  misc_feature (171)..(179): n is a, c, g, or t
  misc_feature (181)..(181): n is a, c, g, or t
  misc_feature (183)..(184): n is a, c, g, or t
  misc_feature (186)..(188): n is a, c, g, or t
  misc_feature (190)..(198): n is a, c, g, or t
  misc_feature (202)..(202): n is a, c, g, or t
  misc_feature (205)..(206): n is a, c, g, or t
  misc_feature (210)..(212): n is a, c, g, or t
  misc_feature (215)..(216): n is a, c, g, or t
  misc_feature (218)..(218): n is a, c, g, or t
  misc_feature (222)..(222): n is a, c, g, or t
  misc_feature (225)..(227): n is a, c, g, or t
  misc_feature (229)..(229): n is a, c, g, or t
  misc_feature (235)..(235): n is a, c, g, or t
  misc_feature (237)..(238): n is a, c, g, or t
  misc_feature (240)..(240): n is a, c, g, or t
  misc_feature (244)..(245): n is a, c, g, or t
  misc_feature (248)..(251): n is a, c, g, or t
  misc_feature (253)..(253): n is a, c, g, or t
  misc_feature (256)..(258): n is a, c, g, or t
  misc_feature (262)..(263): n is a, c, g, or t
  misc_feature (265)..(267): n is a, c, g, or t
  misc_feature (269)..(269): n is a, c, g, or t
  misc_feature (271)..(273): n is a, c, g, or t
  misc_feature (891)..(891): n is a, c, g, or t
  misc_feature (921)..(921): n is a, c, g, or t
  misc_feature (1992)..(1992): n is a, c, g, or t
  misc_feature (2004)..(2004): n is a, c, g, or t
  misc_feature (2013)..(2013): n is a, c, g, or t
  misc_feature (2283)..(2283): n is a, c, g, or t
  misc_feature (2298)..(2298): n is a, c, g, or t
  misc_feature (2593)..(2593): n is a, c, g, or t
  misc_feature (2861)..(2861): n is a, c, g, or t
  misc_feature (2908)..(2908): n is a, c, g, or t
  misc_feature (2944)..(2945): n is a, c, g, or t
  misc_feature (2967)..(2967): n is a, c, g, or t
  misc_feature (2972)..(2972): n is a, c, g, or t
  misc_feature (2975)..(2977): n is a, c, g, or t
  misc_feature (2981)..(2982): n is a, c, g, or t
  misc_feature (2986)..(2986): n is a, c, g, or t
  misc_feature (2992)..(2992): n is a, c, g, or t
  misc_feature (2995)..(2996): n is a, c, g, or t
  misc_feature (2999)..(2999): n is a, c, g, or t
  misc_feature (3002)..(3003): n is a, c, g, or t
  misc_feature (3008)..(3010): n is a, c, g, or t
  misc_feature (3013)..(3013): n is a, c, g, or t
  misc_feature (3016)..(3018): n is a, c, g, or t
  misc_feature (3021)..(3031): n is a, c, g, or t
  misc_feature (3034)..(3036): n is a, c, g, or t
  misc_feature (3039)..(3040): n is a, c, g, or t
  misc_feature (3044)..(3046): n is a, c, g, or t
  misc_feature (3052)..(3063): n is a, c, g, or t
  misc_feature (3066)..(3073): n is a, c, g, or t
  misc_feature (3078)..(3080): n is a, c, g, or t
  misc_feature (3085)..(3088): n is a, c, g, or t
  misc_feature (3091)..(3091): n is a, c, g, or t
  misc_feature (3094)..(3103): n is a, c, g, or t
  misc_feature (3106)..(3111): n is a, c, g, or t
  misc_feature (3115)..(3127): n is a, c, g, or t
  misc_feature (3131)..(3134): n is a, c, g, or t
  misc_feature (3137)..(3138): n is a, c, g, or t
  misc_feature (3144)..(3147): n is a, c, g, or t
  misc_feature (3150)..(3153): n is a, c, g, or t
  misc_feature (3156)..(3156): n is a, c, g, or t
  misc_feature (3160)..(3161): n is a, c, g, or t
  misc_feature (3164)..(3167): n is a, c, g, or t
  misc_feature (3174)..(3175): n is a, c, g, or t
  misc_feature (3179)..(3179): n is a, c, g, or t
  misc_feature (3182)..(3182): n is a, c, g, or t
  misc_feature (3189)..(3198): n is a, c, g, or t
  misc_feature (3201)..(3201): n is a, c, g, or t
  misc_feature (3206)..(3222): n is a, c, g, or t
  misc_feature (3225)..(3225): n is a, c, g, or t
  misc_feature (3228)..(3238): n is a, c, g, or t
  misc_feature (3242)..(3242): n is a, c, g, or t
  misc_feature (3245)..(3250): n is a, c, g, or t
  misc_feature (3254)..(3255): n is a, c, g, or t
  misc_feature (3258)..(3261): n is a, c, g, or t
  misc_feature (3264)..(3268): n is a, c, g, or t
  misc_feature (3271)..(3275): n is a, c, g, or t
  misc_feature (3279)..(3279): n is a, c, g, or t
  misc_feature (3283)..(3284): n is a, c, g, or t
  misc_feature (3287)..(3304): n is a, c, g, or t
  misc_feature (3307)..(3310): n is a, c, g, or t
  misc_feature (3315)..(3325): n is a, c, g, or t
  misc_feature (3328)..(3329): n is a, c, g, or t
  misc_feature (3332)..(3335): n is a, c, g, or t
  misc_feature (3338)..(3345): n is a, c, g, or t
  misc_feature (3348)..(3353): n is a, c, g, or t
  misc_feature (3356)..(3359): n is a, c, g, or t
  misc_feature (3363)..(3369): n is a, c, g, or t
  misc_feature (3371)..(3371): n is a, c, g, or t
  misc_feature (3376)..(3378): n is a, c, g, or t
  misc_feature (3382)..(3384): n is a, c, g, or t
  misc_feature (3386)..(3395): n is a, c, g, or t
  misc_feature (3399)..(3400): n is a, c, g, or t
  misc_feature (3402)..(3403): n is a, c, g, or t
  misc_feature (3405)..(3409): n is a, c, g, or t
  misc_feature (3411)..(3416): n is a, c, g, or t
  misc_feature (3418)..(3422): n is a, c, g, or t
  misc_feature (3425)..(3425): n is a, c, g, or t
  misc_feature (3427)..(3428): n is a, c, g, or t
  misc_feature (3431)..(3435): n is a, c, g, or t
  misc_feature (3437)..(3441): n is a, c, g, or t
  misc_feature (3444)..(3447): n is a, c, g, or t
  misc_feature (3451)..(3451): n is a, c, g, or t
  misc_feature (3454)..(3460): n is a, c, g, or t
  misc_feature (3462)..(3465): n is a, c, g, or t
  misc_feature (3467)..(3467): n is a, c, g, or t
  misc_feature (3470)..(3471): n is a, c, g, or t
  misc_feature (3475)..(3475): n is a, c, g, or t
  misc_feature (3477)..(3485): n is a, c, g, or t
  misc_feature (3489)..(3489): n is a, c, g, or t
  misc_feature (3491)..(3491): n is a, c, g, or t
  misc_feature (3493)..(3496): n is a, c, g, or t
  misc_feature (3499)..(3500): n is a, c, g, or t
  misc_feature (3502)..(3514): n is a, c, g, or t
  misc_feature (3516)..(3516): n is a, c, g, or t
  misc_feature (3518)..(3525): n is a, c, g, or t
  misc_feature (3529)..(3529): n is a, c, g, or t
  misc_feature (3532)..(3532): n is a, c, g, or t
  misc_feature (3543)..(3544): n is a, c, g, or t
  misc_feature (3547)..(3547): n is a, c, g, or t
  misc_feature (3550)..(3550): n is a, c, g, or t
  misc_feature (3555)..(3556): n is a, c, g, or t
  misc_feature (3561)..(3561): n is a, c, g, or t
  misc_feature (3564)..(3566): n is a, c, g, or t
  misc_feature (3570)..(3570): n is a, c, g, or t
  misc_feature (3575)..(3575): n is a, c, g, or t
  misc_feature (3578)..(3578): n is a, c, g, or t
  misc_feature (3582)..(3582): n is a, c, g, or t
  misc_feature (3590)..(3590): n is a, c, g, or t
  misc_feature (3592)..(3593): n is a, c, g, or t
  misc_feature (3596)..(3596): n is a, c, g, or t
  misc_feature (3606)..(3607): n is a, c, g, or t
  misc_feature (3611)..(3613): n is a, c, g, or t
  misc_feature (3616)..(3618): n is a, c, g, or t
  misc_feature (3620)..(3625): n is a, c, g, or t
  misc_feature (3629)..(3632): n is a, c, g, or t
  misc_feature (3635)..(3637): n is a, c, g, or t
  misc_feature (3639)..(3641): n is a, c, g, or t
  misc_feature (3645)..(3645): n is a, c, g, or t
  misc_feature (3647)..(3647): n is a, c, g, or t
  misc_feature (3652)..(3654): n is a, c, g, or t
  misc_feature (3658)..(3661): n is a, c, g, or t
  misc_feature (3666)..(3670): n is a, c, g, or t
  misc_feature (3673)..(3673): n is a, c, g, or t
  misc_feature (3676)..(3677): n is a, c, g, or t
  misc_feature (3679)..(3679): n is a, c, g, or t
  misc_feature (3681)..(3681): n is a, c, g, or t
  misc_feature (3686)..(3688): n is a, c, g, or t
  misc_feature (3690)..(3691): n is a, c, g, or t
  misc_feature (3694)..(3695): n is a, c, g, or t
  misc_feature (3697)..(3706): n is a, c, g, or t
  misc_feature (3708)..(3710): n is a, c, g, or t
  misc_feature (3712)..(3713): n is a, c, g, or t
  misc_feature (3715)..(3721): n is a, c, g, or t
  misc_feature (3725)..(3729): n is a, c, g, or t
  misc_feature (3731)..(3732): n is a, c, g, or t
  misc_feature (3735)..(3742): n is a, c, g, or t
  misc_feature (3744)..(3751): n is a, c, g, or t
  misc_feature (3754)..(3754): n is a, c, g, or t
  misc_feature (3756)..(3757): n is a, c, g, or t
  misc_feature (3760)..(3760): n is a, c, g, or t
  misc_feature (3763)..(3763): n is a, c, g, or t
  misc_feature (3770)..(3771): n is a, c, g, or t
  misc_feature (3773)..(3774): n is a, c, g, or t
  misc_feature (3776)..(3778): n is a, c, g, or t
  misc_feature (3780)..(3784): n is a, c, g, or t
  misc_feature (3787)..(3789): n is a, c, g, or t
  misc_feature (3793)..(3793): n is a, c, g, or t
  misc_feature (3795)..(3799): n is a, c, g, or t
  misc_feature (3803)..(3803): n is a, c, g, or t
  misc_feature (3805)..(3808): n is a, c, g, or t
  misc_feature (3810)..(3811): n is a, c, g, or t
  misc_feature (3817)..(3817): n is a, c, g, or t
  misc_feature (3820)..(3820): n is a, c, g, or t
  misc_feature (3822)..(3825): n is a, c, g, or t
  misc_feature (3827)..(3827): n is a, c, g, or t
  misc_feature (3832)..(3832): n is a, c, g, or t
  misc_feature (3834)..(3834): n is a, c, g, or t
  misc_feature (3836)..(3836): n is a, c, g, or t
  misc_feature (3840)..(3841): n is a, c, g, or t
  misc_feature (3844)..(3848): n is a, c, g, or t
  misc_feature (3852)..(3852): n is a, c, g, or t
  misc_feature (3856)..(3858): n is a, c, g, or t
  misc_feature (3862)..(3868): n is a, c, g, or t
  misc_feature (3870)..(3870): n is a, c, g, or t
  misc_feature (3874)..(3875): n is a, c, g, or t
  misc_feature (3878)..(3878): n is a, c, g, or t
  misc_feature (3884)..(3884): n is a, c, g, or t
  misc_feature (3886)..(3888): n is a, c, g, or t
  misc_feature (3890)..(3891): n is a, c, g, or t
  misc_feature (3893)..(3896): n is a, c, g, or t
  misc_feature (3898)..(3904): n is a, c, g, or t
  misc_feature (3908)..(3912): n is a, c, g, or t
  misc_feature (3914)..(3914): n is a, c, g, or t
  misc_feature (3916)..(3917): n is a, c, g, or t
  misc_feature (3921)..(3923): n is a, c, g, or t
  misc_feature (3927)..(3927): n is a, c, g, or t
  misc_feature (3932)..(3939): n is a, c, g, or t
  misc_feature (3942)..(3942): n is a, c, g, or t
  misc_feature (3947)..(3947): n is a, c, g, or t
  misc_feature (3951)..(3953): n is a, c, g, or t
  misc_feature (3957)..(3958): n is a, c, g, or t
  misc_feature (3961)..(3961): n is a, c, g, or t
  misc_feature (3963)..(3963): n is a, c, g, or t
  misc_feature (3975)..(3975): n is a, c, g, or t
  misc_feature (3980)..(3981): n is a, c, g, or t
  misc_feature (3988)..(3988): n is a, c, g, or t
  misc_feature (3990)..(3990): n is a, c, g, or t
  misc_feature (3992)..(3992): n is a, c, g, or t
nnnngnnntngnngnnnnnnnnnnnnnncnncnnngnnggnnnnngnnncngnnnngnngnnnangnnnnnnnngncnannannaannngnnnnnnnnnnngnnnnnnnnnnnnngannntnnnnnanccnnnnnnnccnnaannngnnnntnnnntnnnngnnnntnncnnnnnnnnngnanngnnngnnnnnnnnntttnttnngggnnnacnngncccncgnnncntttttntnntnattnntcnnnntnaannnttcnncnnngntnnnaattggacgtccgctcatcctctccgcagcttgcccgccttgttcatctcgcgcatcctctccgaaattctcgcagcctccctcatccctgacaggaacgcgccgtgcatggtcgccgggtgccgccgcatggttgcctcccccgcaaagtacagcccgtcgccaaccggctcggccaaggcgtcgtaatcctcccccgtcgcgcccacgctgatgttcgaataggacccgtacgcaaactcatcggatccccagcacgcgcacttggagtctatcgggtccgggatcgtcacgccctgcctctcgtagatatccttgagcacctgcatggtatcctccaccgcgcttgcgtggccgtctctctcaaactccatcgcggcttcgcccgataccagcgcgatgagcaccgccccgccgctcaggttgtgttcgtccgtcttggcgtagttgtagaacatgaagtacctgccacgtcgctgtctgtcccccttggcgacgtacccgaacgtgtccacgctcgtgtcccaaaacggcttggggaagagcaggatcaccttgtcgaggacgccaaagcccagcgctccaatcgcccgggtctttcgctcgggaagcggtggntcgaaactgacgctccccttcttgagcacnccgagcgggacggtgacgagcgccgcgtccgcgcgaaactcccgaccgttcttgcacgtcaccaccacgccgtcgtgccgcccctcagttttattctggtactcgacgttggtcaccgcgtgcccgtaaaatattggcagctcacgcgccatggcggacaccagccggacgttaccccccgggagccacacgtggtctccgtcgaaatcgtacgggtcgtcctggtcccactgcccgagcgagaggacctcgaggcgatcggcgttggcgaactcgaggttggccaggtgccagttgaagagatccgtctcaatctgcggcttgttctcttccctcgccttctgcgcccacgtccattccagctccttaccgagagagaggtgatcggcaccgtgctcgttcgtctccgtgagctcgttccttttctctccaacctcgttcatgcagtcctcaaactcccgaaacaccctcttgtccacctcggcgtccaccggctctccaccctccaaatacagcgggcacttgtccctgatcttccagaagggcagcgccatctgcttggcgatgaccgcgacggggttaccgtcggcgccggtcagcacgctaccgcccatctcgcacgcggcgaccaccttctcgtcggtctccgggtcgacgccctcgagccgctccgtccacaccctcccgccggccctgtccctggcctctatgacgacgcacctgtgcccgaggttttgcagctgcctcgccgcggctaaacccgcgaacccggctccgatgacaaccacggtcccgcgggactcgcccggcgcggggtagttccccgtgaaacccacgccgaagttgatgtacccctgcacagtcaggaacctgtgcgcgcagtgcacgacggcgcggtgcttgggcatgaaccaggagcacgcctgctccacggacacgaacacgttggggttggccctccaccggcacaacacgttgttccgaacggtgatgtacacgccgaggtcggcgccggggaagagaaagttgagctcgaacggttcgatggagtcgtaaagtccgagcgtgtgngcaatctttctntcatccgcntcgtccatgttgtacgcggcgttggccctcgtcttgtccaggttaaggtggaccgtgggcgggggtaccccgaggcccacgtcgaggttgacctgctcccccggtccgcccgggatcttcccctgcatcctgctccacttagcggaccactcgcggttattcgcgatggcgtccttcaccagccccaagctgcggccgtgctgggcgaactcgtactccagcaggcacctctcgtagttctgacgcatctggtaccccgcgctggtctgnccggagaggtcgtgncccagcgtggcgcagacctctttccatcgccgcgcatcgcacacttccttgtacccgcccctggcgacaacctccctgtagacgtgcccgaggtcgagcggattcctgcaaaacctgggcaccaccagggctcgcccgtccagcttctcctggaaaaacatccggagctcgaccacgaacgggtcgtcgtcgccgtgctgtccattctgcggcccatcgtccagcctcgggcgcttgtcgttgggggatgattccagcagtttctgcgatggctggcgtaccctccgggaacctnccggatccgcgacgtcgtcgtcgaccgcctggggcgtgatacgcctcggcgccttcgcgactaattctccgttgacccccgcattcaccggaatggtcatatcgccgccgtgcccccgcccgagcctcgcccctgctctgcgacgaaaaagcaacgagatttctgttgtggcgatgtggcgatttgaaaagttcagatgggtaacgaagcgtcaaagccactcttcaggacgcgacaagcgccccgctcgacggtctaagtacagtcngtcgatcgagtcaccccagggacgtttctttacgatcgagagtcganacggtgagtccccgagcgccttcctgctacgcttannccgccgccatcgccagatcccnggccnttnnntttnncccncccggnttnnttnttnnttccnnnccnccnnnccnnnnnnnnnnnaannnccnncccnnntttccnnnnnnnnnnnnaannnnnnnnttccnnnttttnnnnggnggnnnnnnnnnnaannnnnntttnnnnnnnnnnnnncccnnnnggnnttcccnnnnggnnnnccncccnnccnnnnggttttnncccnccnccaaccnnnnnnnnnnggnggggnnnnnnnnnnnnnnnnnaanaannnnnnnnnnncccnccnnnnnncccnnttnnnnccnnnnnggnnnnnaaancccnnaannnnnnnnnnnnnnnnnnggnnnnggccnnnnnnnnnnnggnnaannnnaannnnnnnnaannnnnnccnnnngggnnnnnnncnaaccnnntggnnncnnnnnnnnnntttnntnnannnnngnnnnnngnnnnnggntnnggnnnnngnnnnnggnnnngggnccnnnnnnnannnngnggnngggncnnnnnnnnngggnanannnnggnngnnnnnnnnnnnnngnannnnnnnntttnggnccgaacagggnnggnatngggcnnccggnggnnnccancacanagntttnggagttancnnttngagaaaaaannctcnnnttnnnannnnnnctcnnnnccnnntnnncacnangggannngggnnnnccgcnnnnncanctnntngngggcnnngnncgnngnnnnnnnnnncnnngnngnnnnnnngggnnnnngnncgnnnnnnnncnnnnnnnnggngnnccnaangcggggnncnncnnngnnnnnccnnngggngnnnnncccngnnnncnncggccnccncnnnntnctccncncncccnntgnnnnncctncccnnnaagnnnnnnncncccnnggnggaaangnnntnntnnnntnnnnnnngggnnnnntncnncacnnngggnttctnnnnnnnnatnaaccncggnnnaganncgncnaccaccgccgangcgannaattcgncncncgccttct

SEQ ID NO: 499 - DNA, 4000 bp, Escherichia coli
  misc_feature (87)..(90): n is a, c, g, or t
  misc_feature (92)..(94): n is a, c, g, or t
  misc_feature (98)..(98): n is a, c, g, or t
  misc_feature (101)..(106): n is a, c, g, or t
  misc_feature (110)..(114): n is a, c, g, or t
  misc_feature (116)..(121): n is a, c, g, or t
  misc_feature (124)..(131): n is a, c, g, or t
  misc_feature (133)..(134): n is a, c, g, or t
  misc_feature (136)..(142): n is a, c, g, or t
  misc_feature (146)..(147): n is a, c, g, or t
  misc_feature (150)..(150): n is a, c, g, or t
  misc_feature (152)..(153): n is a, c, g, or t
  misc_feature (155)..(155): n is a, c, g, or t
  misc_feature (158)..(164): n is a, c, g, or t
  misc_feature (166)..(166): n is a, c, g, or t
  misc_feature (169)..(169): n is a, c, g, or t
  misc_feature (171)..(175): n is a, c, g, or t
  misc_feature (177)..(177): n is a, c, g, or t
  misc_feature (179)..(182): n is a, c, g, or t
  misc_feature (184)..(187): n is a, c, g, or t
  misc_feature (189)..(191): n is a, c, g, or t
  misc_feature (193)..(194): n is a, c, g, or t
  misc_feature (196)..(198): n is a, c, g, or t
  misc_feature (202)..(202): n is a, c, g, or t
  misc_feature (204)..(210): n is a, c, g, or t
  misc_feature (212)..(214): n is a, c, g, or t
  misc_feature (216)..(217): n is a, c, g, or t
  misc_feature (221)..(222): n is a, c, g, or t
  misc_feature (224)..(225): n is a, c, g, or t
  misc_feature (227)..(230): n is a, c, g, or t
  misc_feature (232)..(233): n is a, c, g, or t
  misc_feature (235)..(241): n is a, c, g, or t
  misc_feature (246)..(247): n is a, c, g, or t
  misc_feature (250)..(251): n is a, c, g, or t
  misc_feature (253)..(253): n is a, c, g, or t
  misc_feature (255)..(255): n is a, c, g, or t
  misc_feature (257)..(257): n is a, c, g, or t
  misc_feature (259)..(259): n is a, c, g, or t
  misc_feature (261)..(267): n is a, c, g, or t
  misc_feature (269)..(271): n is a, c, g, or t
  misc_feature (273)..(275): n is a, c, g, or t
  misc_feature (278)..(279): n is a, c, g, or t
  misc_feature (281)..(282): n is a, c, g, or t
  misc_feature (284)..(286): n is a, c, g, or t
  misc_feature (289)..(292): n is a, c, g, or t
  misc_feature (294)..(303): n is a, c, g, or t
  misc_feature (305)..(305): n is a, c, g, or t
  misc_feature (307)..(307): n is a, c, g, or t
  misc_feature (309)..(314): n is a, c, g, or t
  misc_feature (319)..(329): n is a, c, g, or t
  misc_feature (331)..(335): n is a, c, g, or t
  misc_feature (339)..(340): n is a, c, g, or t
  misc_feature (342)..(343): n is a, c, g, or t
  misc_feature (345)..(346): n is a, c, g, or t
  misc_feature (348)..(350): n is a, c, g, or t
  misc_feature (352)..(360): n is a, c, g, or t
  misc_feature (362)..(363): n is a, c, g, or t
  misc_feature (365)..(367): n is a, c, g, or t
  misc_feature (369)..(369): n is a, c, g, or t
  misc_feature (371)..(373): n is a, c, g, or t
  misc_feature (375)..(376): n is a, c, g, or t
  misc_feature (379)..(383): n is a, c, g, or t
  misc_feature (387)..(387): n is a, c, g, or t
  misc_feature (389)..(389): n is a, c, g, or t
  misc_feature (391)..(393): n is a, c, g, or t
  misc_feature (396)..(399): n is a, c, g, or t
  misc_feature (401)..(402): n is a, c, g, or t
  misc_feature (404)..(407): n is a, c, g, or t
  misc_feature (409)..(414): n is a, c, g, or t
  misc_feature (416)..(433): n is a, c, g, or t
  misc_feature (436)..(439): n is a, c, g, or t
  misc_feature (441)..(442): n is a, c, g, or t
  misc_feature (447)..(447): n is a, c, g, or t
  misc_feature (449)..(455): n is a, c, g, or t
  misc_feature (457)..(460): n is a, c, g, or t
  misc_feature (462)..(471): n is a, c, g, or t
  misc_feature (474)..(481): n is a, c, g, or t
  misc_feature (483)..(486): n is a, c, g, or t
  misc_feature (488)..(488): n is a, c, g, or t
  misc_feature (491)..(491): n is a, c, g, or t
  misc_feature (494)..(494): n is a, c, g, or t
  misc_feature (496)..(496): n is a, c, g, or t
  misc_feature (499)..(503): n is a, c, g, or t
  misc_feature (505)..(506): n is a, c, g, or t
  misc_feature (510)..(510): n is a, c, g, or t
  misc_feature (512)..(513): n is a, c, g, or t
  misc_feature (515)..(516): n is a, c, g, or t
  misc_feature (518)..(518): n is a, c, g, or t
  misc_feature (520)..(525): n is a, c, g, or t
  misc_feature (527)..(539): n is a, c, g, or t
  misc_feature (541)..(541): n is a, c, g, or t
  misc_feature (543)..(545): n is a, c, g, or t
  misc_feature (547)..(547): n is a, c, g, or t
  misc_feature (549)..(557): n is a, c, g, or t
  misc_feature (559)..(559): n is a, c, g, or t
  misc_feature (561)..(562): n is a, c, g, or t
  misc_feature (565)..(565): n is a, c, g, or t
  misc_feature (567)..(568): n is a, c, g, or t
  misc_feature (570)..(571): n is a, c, g, or t
  misc_feature (573)..(575): n is a, c, g, or t
  misc_feature (577)..(582): n is a, c, g, or t
  misc_feature (584)..(586): n is a, c, g, or t
  misc_feature (588)..(588): n is a, c, g, or t
  misc_feature (590)..(590): n is a, c, g, or t
  misc_feature (593)..(593): n is a, c, g, or t
  misc_feature (596)..(596): n is a, c, g, or t
  misc_feature (598)..(598): n is a, c, g, or t
  misc_feature (600)..(601): n is a, c, g, or t
  misc_feature (603)..(603): n is a, c, g, or t
  misc_feature (606)..(607): n is a, c, g, or t
  misc_feature (609)..(612): n is a, c, g, or t
  misc_feature (615)..(623): n is a, c, g, or t
  misc_feature (625)..(627): n is a, c, g, or t
  misc_feature (629)..(632): n is a, c, g, or t
  misc_feature (634)..(643): n is a, c, g, or t
  misc_feature (646)..(646): n is a, c, g, or t
  misc_feature (648)..(649): n is a, c, g, or t
  misc_feature (651)..(656): n is a, c, g, or t
  misc_feature (658)..(658): n is a, c, g, or t
  misc_feature (666)..(668): n is a, c, g, or t
  misc_feature (680)..(680): n is a, c, g, or t
  misc_feature (1483)..(1483): n is a, c, g, or t
  misc_feature (1921)..(1921): n is a, c, g, or t
  misc_feature (1925)..(1926): n is a, c, g, or t
  misc_feature (1934)..(1935): n is a, c, g, or t
  misc_feature (1952)..(1953): n is a, c, g, or t
  misc_feature (1959)..(1959): n is a, c, g, or t
  misc_feature (1967)..(1967): n is a, c, g, or t
  misc_feature (1982)..(1983): n is a, c, g, or t
  misc_feature (1988)..(1989): n is a, c, g, or t
  misc_feature (1991)..(1991): n is a, c, g, or t
  misc_feature (1994)..(1994): n is a, c, g, or t
  misc_feature (2006)..(2006): n is a, c, g, or t
  misc_feature (2012)..(2012): n is a, c, g, or t
  misc_feature (2015)..(2015): n is a, c, g, or t
  misc_feature (2018)..(2019): n is a, c, g, or t
  misc_feature (3304)..(3304): n is a, c, g, or t
gggggcgaggtcaataataaaaataatatattagcacttgacaaagaatagggattgattattttttgcattgatacttagatgaannnnannnaaanaannnnnnaaannnnntnnnnnngannnnnnnnannannnnnnntatnntcntnntnatnnnnnnnantancnnnnntntnnnngnnnntnnngnntnnngtgnannnnnnntnnntnnaatnncnngnnnncnntnnnnnnntttanncgnntnangngnannnnnnntnnntnnnatnncnngnnnacnnnntnnnnnnnnnngngnannnnnngaatnnnnnnnnnnngnnnnnacanntnngnnannncnnnnnnnnntnncnnntntnnnanntgnnnnnagtngngnnngtnnnntnngnnnnannnnnncnnnnnnnnnnnnnnnnnnttnnnntnnttatngnnnnnnnannnnannnnnnnnnnaannnnnnnnannnnanatnttnantannnnnannaatncnncnnanannnnnnannnnnnnnnnnnngntnnngnannnnnnnnnancnntantnncnntnnntnnnnnnannngntnganatnantnntnttnntnnnnttnnnnnnnnnannngnnnnannnnnnnnnntgntnntnnnnnngnaggaaatnnngaaattcctctnataacagggattgacagtatttatcctaatccttttaatcctggcacctggctaagttattctcttgccgaagaaagtaaggcgatactggaaatatttaatctgaaaggtcagattgtgtggaataaagtaatccctaaccaatcagcaggtcgttacaaatacttttgggacgggaaaaatcaaaatggcattacttgcaccagtggactttactttttccgcttaacaactaacaaaacaaactatatcgccaaaatgatactaatgaaataaggagaacaaaaatgaaacaaattctgattactattttagccgtatttttctggggaatacttttttccgcggctccaactgttagtaatgtatccgtaacaactcatacaggatatgttactatttcttatgatctttctgctgatgaaaactgccaagtgattatgttggtttccaataatggtggcttaagctacacattttcaccaactcatacctcaggtgctattggtaatagtgttagtgcaggaacaggaaaacagataacctggtatccagtacaagatggaatgagtaccggcactaattacaagattaaattaattgcccgcgataatccctctccaagcactcaaccggtagggtttattacagtaacaggaggaacctttaataacggcacttcagatgtaaccattagcacattttatcttgataaaaatgaaattactcaaggtgaatatcaagcagtaatgggaacaaatccctctaattttaccggtgatcttagtaggcctgtggagagngtaacttggttcaatgccattgaatattgtaaccggagaagtatgcaggaaaatcttactccctgttacagttatcaaaattatggcaccaatcccagtaactggccctccggctggaatacaaatagtgaaaatcatactaatgtcagttgtaactggactgctaatggctatcgtttaccaactgaaatggaatggatgtttgctgcccggggtggaaactcaactcataattatacctatagcgggagtaatactgtaggagatgttgcctggtataccggcaattccggtagcactactcatcctgtagggggtaaacaagctaatgagttacaaatttttgatatgagtggaaatgtttgggaatggtgttgggatatttatggaagttatccttcagaacctcaaaccaatccaaccggatcaacaagcggnaccnnccgtgtgnnacgtggcggcagctggnncaacantgccagcnattgcactgtttcgnntcggnncnacnatagtgctactnacagcnatnacnncattggcttccgtgtttgtagggtttcccttgattgatttttgcttttttacctttttgccttttgccaagtaagaaccaaaatgaaagaattaagaagagaagaattgatagggggtgcagggggatatatccccctgctgaaatttttttttcaaatgaaaacatatcctgataacatagaaaagttaataataagatgcttatttatatcattttaagattgaaaagcactttatcattcataagaaagcaggaatccataatagttttactaaaataactgcagtttcaatatggaaactatattagaagtagctttaaccaaaaaatagaatttgtaggtgaaagttgcaaagaagagattaagtataaatgtttaaattgatgttagtaagatttgacagagacaaaggagtttttgaagatcagggattcaatcaattttgtcagaataataatataattcgcgtagaaaaagaatttatcaataacgaagggaatatctattattctttttttatagagtatttaccaagaaaggggagtcattttatacctgatatggaaagtttaagtgaattggaacaagctcaatatgaaaaattaagggattggcgtaatgaattagctgccaatgagggctttcctgcttatattattatgtataattcccagatttatgagattgtgaaaaaacaacccaaaactattagtgatttttcttctataaaagggatgaagagtaaagcggaaaagtatggggaacagataatcaaattattacaagaggcggtattagaaattgaaaaatgactatcctttatatataaaatggatggatatatctatctggatatttgggagaacggaaagatttccgaaaaatttgagatattcattagctcaaaaaatggacaacctttgtttagagatattggaattaattgttcaaacgatttacagttcgtcaaaaagggaatatttgataaagataaacataaagttggatgtattaagaacattaatccagatggcttataagatgaaattattagctgaaaatcaatatcaatacattagcaaggaattactggaaagtggtaaaatggtggggggttggttaaaaagtgcctaaacgggttggatatctttgggaaaaattaacctcctggcagaatctgtatttagcttataaaaatgcttgtaagcataaaaagagtaagtatgaaacagcagaatggatgttttattgtgagaaaaatttatgggaattacaaaagganttaattaatggaaactatcgtcctcaaccctatagatactttactattaaggaacctaaggaacgtttgattagcgttgctgtttttagagacagattagtgcatcattctctaataaatgttatagaaccttattttgaaagcatttttattaaggattcttatgccactcgtaaaggtaagggtttgcatttagctgtattagcagttcaaaaatattcccggcagtacccttggtttttgaaactggatattgagaagttctttaacaacatagatcataatattttattgaaattaatatctagtaaaattaaagatcctatgataattaatctatgttctattatccttaaaaatcagaacctaagtatgaatcataatgaggaaattggattaccagtgggtaatttaacttcccaattttttgccaatatttaccttaatcagcttgatcattatattaagcaaaatcttggatataagggatatgtaagatatatggatgattttattctattttcggagaacaaagataagcttaaaagtgatcttcttttaataaaatattttttatctaatatcctaaaattgaaaataaaagacaagtcaatacaaatgaataaagttaaccaaggtattccttttttaggttaccgtgtttttccaaaattgataagagttagtaatataaat

SEQ ID NO: 500 - DNA, 4000 bp, Escherichia coli
  misc_feature (109)..(109): n is a, c, g, or t
  misc_feature (343)..(343): n is a, c, g, or t
  misc_feature (916)..(916): n is a, c, g, or t
  misc_feature (1040)..(1040): n is a, c, g, or t
  misc_feature (1086)..(1086): n is a, c, g, or t
  misc_feature (1951)..(1951): n is a, c, g, or t
  misc_feature (1974)..(1974): n is a, c, g, or t
  misc_feature (2008)..(2008): n is a, c, g, or t
  misc_feature (2010)..(2010): n is a, c, g, or t
  misc_feature (2079)..(2079): n is a, c, g, or t
  misc_feature (2707)..(2707): n is a, c, g, or t
  misc_feature (3007)..(3007): n is a, c, g, or t
  misc_feature (3418)..(3419): n is a, c, g, or t
  misc_feature (3422)..(3423): n is a, c, g, or t
  misc_feature (3426)..(3426): n is a, c, g, or t
  misc_feature (3428)..(3432): n is a, c, g, or t
  misc_feature (3435)..(3435): n is a, c, g, or t
  misc_feature (3438)..(3444): n is a, c, g, or t
  misc_feature (3446)..(3448): n is a, c, g, or t
  misc_feature (3450)..(3452): n is a, c, g, or t
  misc_feature (3454)..(3455): n is a, c, g, or t
  misc_feature (3457)..(3457): n is a, c, g, or t
  misc_feature (3459)..(3463): n is a, c, g, or t
  misc_feature (3466)..(3469): n is a, c, g, or t
  misc_feature (3473)..(3473): n is a, c, g, or t
  misc_feature (3475)..(3479): n is a, c, g, or t
  misc_feature (3483)..(3483): n is a, c, g, or t
  misc_feature (3488)..(3489): n is a, c, g, or t
  misc_feature (3493)..(3494): n is a, c, g, or t
  misc_feature (3497)..(3498): n is a, c, g, or t
  misc_feature (3500)..(3501): n is a, c, g, or t
  misc_feature (3504)..(3507): n is a, c, g, or t
  misc_feature (3510)..(3511): n is a, c, g, or t
  misc_feature (3513)..(3513): n is a, c, g, or t
  misc_feature (3515)..(3523): n is a, c, g, or t
  misc_feature (3525)..(3533): n is a, c, g, or t
  misc_feature (3535)..(3538): n is a, c, g, or t
  misc_feature (3540)..(3546): n is a, c, g, or t
  misc_feature (3550)..(3552): n is a, c, g, or t
  misc_feature (3554)..(3558): n is a, c, g, or t
  misc_feature (3560)..(3565): n is a, c, g, or t
  misc_feature (3568)..(3570): n is a, c, g, or t
  misc_feature (3572)..(3575): n is a, c, g, or t
  misc_feature (3577)..(3578): n is a, c, g, or t
  misc_feature (3580)..(3581): n is a, c, g, or t
  misc_feature (3583)..(3584): n is a, c, g, or t
  misc_feature (3588)..(3588): n is a, c, g, or t
  misc_feature (3591)..(3593): n is a, c, g, or t
  misc_feature (3596)..(3603): n is a, c, g, or t
  misc_feature (3605)..(3606): n is a, c, g, or t
  misc_feature (3610)..(3616): n is a, c, g, or t
  misc_feature (3619)..(3619): n is a, c, g, or t
  misc_feature (3621)..(3626): n is a, c, g, or t
  misc_feature (3629)..(3629): n is a, c, g, or t
  misc_feature (3631)..(3634): n is a, c, g, or t
  misc_feature (3636)..(3638): n is a, c, g, or t
  misc_feature (3643)..(3644): n is a, c, g, or t
  misc_feature (3646)..(3648): n is a, c, g, or t
  misc_feature (3651)..(3652): n is a, c, g, or t
  misc_feature (3654)..(3657): n is a, c, g, or t
  misc_feature (3662)..(3662): n is a, c, g, or t
  misc_feature (3667)..(3679): n is a, c, g, or t
  misc_feature (3683)..(3683): n is a, c, g, or t
  misc_feature (3688)..(3688): n is a, c, g, or t
  misc_feature (3690)..(3692): n is a, c, g, or t
  misc_feature (3694)..(3696): n is a, c, g, or t
  misc_feature (3698)..(3715): n is a, c, g, or t
  misc_feature (3718)..(3718): n is a, c, g, or t
  misc_feature (3722)..(3723): n is a, c, g, or t
  misc_feature (3727)..(3730): n is a, c, g, or t
  misc_feature (3733)..(3733): n is a, c, g, or t
  misc_feature (3735)..(3740): n is a, c, g, or t
  misc_feature (3742)..(3743): n is a, c, g, or t
  misc_feature (3745)..(3746): n is a, c, g, or t
  misc_feature (3750)..(3750): n is a, c, g, or t
  misc_feature (3752)..(3756): n is a, c, g, or t
  misc_feature (3758)..(3760): n is a, c, g, or t
  misc_feature (3764)..(3767): n is a, c, g, or t
  misc_feature (3769)..(3769): n is a, c, g, or t
  misc_feature (3773)..(3778): n is a, c, g, or t
  misc_feature (3780)..(3782): n is a, c, g, or t
  misc_feature (3784)..(3784): n is a, c, g, or t
  misc_feature (3786)..(3789): n is a, c, g, or t
  misc_feature (3792)..(3792): n is a, c, g, or t
  misc_feature (3794)..(3796): n is a, c, g, or t
  misc_feature (3800)..(3802): n is a, c, g, or t
  misc_feature (3805)..(3806): n is a, c, g, or t
  misc_feature (3809)..(3810): n is a, c, g, or t
  misc_feature (3812)..(3819): n is a, c, g, or t
  misc_feature (3821)..(3822): n is a, c, g, or t
  misc_feature (3824)..(3825): n is a, c, g, or t
  misc_feature (3827)..(3828): n is a, c, g, or t
  misc_feature (3830)..(3830): n is a, c, g, or t
  misc_feature (3832)..(3832): n is a, c, g, or t
  misc_feature (3834)..(3837): n is a, c, g, or t
  misc_feature (3839)..(3840): n is a, c, g, or t
  misc_feature (3842)..(3846): n is a, c, g, or t
  misc_feature (3848)..(3848): n is a, c, g, or t
  misc_feature (3851)..(3858): n is a, c, g, or t
  misc_feature (3861)..(3861): n is a, c, g, or t
  misc_feature (3863)..(3864): n is a, c, g, or t
  misc_feature (3866)..(3869): n is a, c, g, or t
  misc_feature (3871)..(3871): n is a, c, g, or t
  misc_feature (3874)..(3876): n is a, c, g, or t
  misc_feature (3878)..(3879): n is a, c, g, or t
  misc_feature (3881)..(3883): n is a, c, g, or t
  misc_feature (3885)..(3892): n is a, c, g, or t
  misc_feature (3894)..(3899): n is a, c, g, or t
  misc_feature (3901)..(3906): n is a, c, g, or t
  misc_feature (3909)..(3912): n is a, c, g, or t
  misc_feature (3914)..(3923): n is a, c, g, or t
  misc_feature (3925)..(3925): n is a, c, g, or t
  misc_feature (3927)..(3941): n is a, c, g, or t
  misc_feature (3943)..(3947): n is a, c, g, or t
  misc_feature (3949)..(3981): n is a, c, g, or t
  misc_feature (3984)..(3992): n is a, c, g, or t
  misc_feature (3994)..(3997): n is a, c, g, or t
  misc_feature (3999)..(4000): n is a, c, g, or t
aaagacagaccttgagcaccgtattgagacctatggccttgagcgtgctgttgttgatattcagattcctactgaggaagttactgaggtcaaggacggcggcaagcgngagaccaaagagtccaaggttttcccaggttacgttcttgttcgcatggagctggatgacaatacttgggctgttgttcgcaacaccccaggcgtaactggttttgttggcattgacggcaagccagttcctctgcgtcgtgatgagttcgataagatcatgcgtcgcggcggtatgaagacgggtagccctgtacctaagcgtacagcaaccaatattgaggtcggtcaggcnattcacgttctttctggtcctctcgctgacttcgacggaactgtttctgaggtcaacgcagagtccggcaagatcaaggttatgctcaccatctttggtcgcgagactccggttgagctcaccatggatcagatttccctgatagactagtaactaacggcttatcccgcacttctcgtcccttgtggattgcttctcgggagtgcgcgagaatagactcaaacgtattcaaacaggaggcttaacatgcccgcaaagaaggttgttaactttattaagctgcagattcctgcaggccaggcaaacccagctcctccagtaggaccagctctgggtgctgcacaggtcaacattatgcagttctgccaggcattcaacgctgcaactcaggacaaggctggcgacatcatcccagtcgagatttctgtttacgaggatcgttcctttgacttcgtaaccaagactcctccagcagctcagctcatcaagaaggagcttcacctcaagggtggttccggtgttcctcagcgcgataaggttggccagctctcccaggagcagctcaccaagatngctgagatcaagatgcctgacctcaacgcaaacgacattgaggctgcaaagaagatcgtcgctggtaccgctcgttccatgggtgtaaccatcgccgagtagtgtttactcccgtcagccattngtgtggctgacggttgttttgtcagagcatccgacgttagtgcacntagttgggtttctcgccaagagggcgtaactatggacggaagatgcaggagtgggagggcagacgcccgctaaccacaggaggtacataatgcctaagcacggaaagaactacaagaatgcagttgccaaggtagacggtgcaaacctctacagcccaaaagaggcagtaaccctgtctaaggagcttgcaactgctaagtttgacgagaccattgaggtagcaattcgccttggtgtcgatactcgtaaggctgaccagaacgttcgcggttccatctctctgcctcacggcactggtaagtccgttcgcgttgcagtcttcgcagagggcgagaaggcccgcgaggctgaggcagctggcgctgacatcgtcggtggcgacgagctcatcgcagaggtcgagaagggcatgcttgactttgacgcagcaatcgcaacccctcagatgatgggtaaggttggtcgtcttggtcgcgttcttggtcctcgtggccttatgcctaaccctaagctcggcaccgttaccatggatgttgcaaagatggttaacgagctcaaggctggtcgtgttgagtatcgtgcagaccgttttggtatctgccacgttgcaatcggcaaggcttcttttgaggtccagcagcttgttgagaactatggcgcacttctctctgagattattcgcgtcaagccatccagcgctaagggtaagtacgtcaagaccgttgctatttcctctactatgggccctggcatcaaggttgatccaaccaaggttcgtaacctcatggaggactaagctttacgcttagaagtacctagcacgtttaatccggtatctgcttgcaggtaccggatttttcttgnagcgtgcatgcggtgtaggcgtngactcggcttgcggcacgcgtgcggctgatgtgngnggctgagttgtgcgtagctgcttagccgcccttctcgtcaaatttttgtgaagagaaagaaattgtgcnctcaaccttgacttggatagttttttgctgcacaatatccaacgcaagacagacgtcttgtagttgcacgttcgctgccaaagacagccggcgccttgaatccaaggcttaatgggaattcccgcctgccgaggtggtcttgagattagtacatccagaccccgctttggttgccaaagtggggtcttttcatgtgagggccgcacctgttggcgctcgtgcccgagacatgataaaggaggtgtactacatgccagctcagtctaaacttgatttgctcgagaaggtttccgcttctctcgacaactccaagggcctgtttgttatcgactatcgtggtctctccgtaaaggagactcaggagcttcgccgcgcacttaccgcagcaggcgctcacatgaaggtctataagaacaacatcgtcaagattgctcttaagaacgctggtatgccagagattgacgagatgctcgccggtacctgcgcatacgttttctatgagaatgatcctgtcgaggccgctaaggtcatcaaggatcaggccaagaagctcaagaaagttgagttcattggtggtatcgctgatggtcaggcacttaccgctgacgaggcaaaggcttacgcagancttccttctcgcgaggagctcattgcaaagcttgtcttcgttgttgcaagcccacttaccggtattgcacaggtttgcgctggtccagctcgtggactcgcaaccgctctttctgcagtcgcagatcagaagaacgctgcataagcaacgttttgttgtacccgcgcattggcgcaaaccgcgtgagagtgtagacgcacttaaacgcacacatacaagccgggcttttgcccagatgcagtacaaaggctgcatcgtttaaaaaggagaattgacatggctgtcactaaagatgagatnattgaggcccttaaagagatgccagcactcgagctttctgagctcgttcacgagcttgaggacgtctttggcgtttccgctgctgctcctgtagctgtcgctgctgctcctgcagctggtggcgctgctgaggaggcagaggagaagaccaactttgacgttgtcctcgagggcttcggcgacaacaagatcggcgtcatcaaggttgtccgtgctcttaccaaccttggtctcaaggaggcaaaggaggtcgtcgagggtgctcctaaggcagtcctcgagggcgctaagaaggaggacgctgaggctgctaaggctcagctcgaggaggctggcgctaccgtcacccttaagtaagtccatcctacattgcttactggagaggtcagacttcggtctggcctctttttnnttnnccngnnnnnaanccnnnnnnntnnnannncnngnannnnnggnnnntttncnnnnncccnaaaanngcannaanntnnggnnnnttnncngnnnnnnnnnannnnnnnnnannnntnnnnnnntttnnntnnnnntnnnnnngtnnntnnnntnngnntnntttnccnnnttnnnnnnnnanntctnnnnnnnttncnnnnnnttntnnnntnnnttaanncnnnttnntnnnncttgntttcnnnnnnnnnnnnntaanttttncnnnannntnnnnnnnnnnnnnnnnnnttncctnntttnnnnaangnnnnnntnncnnaaanannnnntnnntttnnnntnaaannnnnnannnanannnngantnnnctgnnnttnnaanngnnnnnnnngnncnnanncngngnnnntnnannnnncngtnnnnnnnngcngnngnnnngngcnnntnncnnnannnnnnnncnnnnnncnnnnnnctnnnncnnnnnnnnnncntnnnnnnnnnnnnnnngnnnnncnnnnnnnnnnnnnnnnnnnnnnnnnnnnnnnnntgnnnnnnnnnannnngnn

SEQ ID NO: 501 - DNA, 4000 bp, Escherichia coli
  misc_feature (1981)..(1982): n is a, c, g, or t
  misc_feature (1988)..(1988): n is a, c, g, or t
  misc_feature (1991)..(1991): n is a, c, g, or t
  misc_feature (2005)..(2006): n is a, c, g, or t
  misc_feature (2008)..(2008): n is a, c, g, or t
  misc_feature (2012)..(2012): n is a, c, g, or t
  misc_feature (2014)..(2014): n is a, c, g, or t
  misc_feature (2020)..(2020): n is a, c, g, or t
  misc_feature (2036)..(2036): n is a, c, g, or t
  misc_feature (2041)..(2041): n is a, c, g, or t
  misc_feature (2048)..(2048): n is a, c, g, or t
  misc_feature (2050)..(2051): n is a, c, g, or t
  misc_feature (2054)..(2054): n is a, c, g, or t
tacgatgccagcaccgcggccttgatctcgtcgagcgtcggccggcggtcgaattccgcctcctcgtaagtggccatgccgtcctgctcctcgatgtcccagcggactctccatttatccttgcgcggattgacgcactcgatgggcgccacgcccgcactgccttgaattctcatgtaaatacgtatttggtcttgttcttgccgaactgctccgccttgatggtcgtctcgaaagggaagccgtccggcatttcgcgtatctgctgaaggatgttcttcatctcttcagaattagtgaagaatttccgcatctcgccgttcatttcgatctgaacgagacaccggtcttcaccctgttcggttttgattccggtttcgaaatcatgcaccacgatgggaagattgaccagttcgcggatggagatcgtcgcgcctttgaagcgcttcttgccatcggccggcgtgtacgtaacgcctaaatccttgaagtttttcatatcaatacctgttagtttggagaaaagccttctgcaatcggcgtgtttggccatcccgtagaaggatgccgtcagttcacgcctgcgtcgtctgctctcgacctcgctcatcttccgggcgaaggtctgcttgttgcgcttgcgcagccgcacatggtcgggatagatcacgtagccgaggaagtcgataccctcctcgacgggagtgatccggtcgttgggtttcacttccagcccgatggcttcgacgcatcgatgcaccgcatcgcgcacggcccacaactccgctttcgaggcggccagcacgcggccgtcgtcgcagtagcgatagtagtagcggacgccgaggcgatccttgagttcgtggtcgaggtagatcgagaggattaagttggccaacccttgcgaggagcgcagccccatgctcaacccgtgcggcatcatgtggatgaagccgtcgagtatcgtcagcagccgttcgtctttgaacacccgccggacggcggcaatggcgacctgctgatcgacgctttcgtagaatttacggatgtcgaaggtatagcagtaacgggttccgtcggggtcttgagcgatatcgcgccggatatactccatcaggtcgtgcatcccgcggttgcggatcgatgctgcggtcgtccggatgaaccgccggtgcagatgctcgtccacgactcgcataaccgcatttacggcgatgcgatccttcaatgggatcacctgtatcgtccggcgttttcccgcctccatgacgatcatctcccgataaccgcccacacggtacgagccgtcggctatccgctgctgcagctccgcgatcacctcgtcctcatgcgcgagcaggtaacgtccgacccgactgcgtttgcggtctgtaccgcgcaacacggatcggaacgatgccttcatgttgtccgtagcgacaatctcctcgatgatgtacccatccctgcgcatgttaccttcaattctgcgggcctgacctcttcgagaatccctgcggaaacctaccaagctccacccaacgctgtatgtttcgcctttccggccataggccgctgctggcgaggctcctccccctcggcgctgcggtgggaacacgttcccggtgcagtaggccgacatgcattcttgcgttctcctcattgtttgcgagccgagagccgatgttcgcgttcgtgttcgacgaatcgttgttcgtgttcgcgtacgacacgccgccattcgcgttcgcattgttgttcgaccgatagaccacccggcttatgggggattccgcctttcgaggtacaaaaatataaaattcatcgcgaaaaaacctaatttcgtcattctcaaaatattttcgagtggcttacgccactttcaatacccagcgtcattcgacgctgggtaacgctttatactcgctgacgctcgtcgctttgacgacttttccgcggaaggcgagccgagagccgatgnncgcgtncgngtacgacgaatcgnngntcgngntcgcgnacgacacgccgccatncgcgntcgcatngnngtncgaccgatagaccacccggcgcgtagagctggacacgttttgccagtcgcagtaatgggaggtttccgaaccgccgccgcgggcgacgatcaagtccatatggcgaccgaagaccatattggctggccaatattccgcaaatgcggcgataccctgcacttcgcgcggggcgcgcccgggcgtctcgatactccagcggccgtcggccttctccttgttaagcgttacgccttccagccattcgcatttgtcgccctgccagcattcgtagcccagcacgttcgtcgaataggcatctttcagcgtctcaccctcgtagtaataggcgccggtggtcttaccctcggggttgatcgtatcccgcatgccgagcatattcgtcagaccgctgcgcttgttatacgaactctgaccgtagccgcactgcccttgcgaatcgcgcgtgccgtattttgcgtagaacaggttcgcgacggcgcagtgcatgtcccagtcgatgagctggaaccccgggccggagttcgcggcgtagactttcagatcggcctgcgagaccgtgccggtgctgatctcgcccgagatggacttcatgaagtcgtcctgcagcagcgcctcgtagacggcgcacaggaactcgtcgtcctccacccagtccggctcgatggcctcgatcttatcgctcgtagtcagcagcacgtagtcgaaatccgctgccgtgacgatggtgaaagcgagccgctcggcgccttccggaaccgtggcgaacaggtacatgccattcaggatacccgcgctcgaagtcgcgcgcaggcgcccgaggatcgtccccgcggcatccagccacacagcgccgtaggccgccgaagccatcgacgggaagcgcacctgacggtagccggccaccggaaccgtgcagtaggagttcgcggcgatggtcgtcacagcctcgtccagcgtcgtgtactcctcggcgatgcggatggccttgcccgcgaccacctcgacctgctccttcgtgagtttcacgtacacgccgtccacggccgggcattcggcatccgaactgaaaaaggcgtatttcttctggttcagcaggtcgttgacacccttgcaccagtagtgcggctcgtacatccacacgttgccgtcgcggcccgtcagtaccgccggcgtggccagcgatacgtcatccgcatcggcgtagtagttcgagttcccgtcgtgcagcgggaagatcgtaacctctcctgcggcggtcttcttgcccagacagcgatggcgctgcgcgaggatgcgagcaatatgtccgctcggaacgtacggcgtatcgaaccggtagcccgtccggttgtcgaggttcgagatgttcgcaggatcggagaccgcatcgtcgaactcgatgcacgtccacgccggctgttcgatcgtcaactccgggaagtgcgtctgcatggccgcaagctcctcctcgtccatgtactgcgtcaggcggcagcggcccacaagccggcacgtcggcgtattgccgccctgctcgtccacgccgcccatcgatgcgaggctccgaagcagcgatccgtcgtcctcgatgtcgacgcccgtcacgcgcaggtactgcactgccgggcagcgggccagcagctcctgccagtcgatcagagcacagccgtcgatcaccagacgcgcgatcgatgccgtgccctgaagcgtcagccccgtattcgggaggctgttcaggccgaccagttccagcgactgcaacgtcgccggaagcgtcgctgtcgtaagcggagcacccgcagcgaaggcgacgctccgcagcgaggtgttacgcgccacgagcgactctaatttcaggttgttcgacaggtcgagcgacgtgaagctgctcgatttcagtcccgaaacgttcagcgtccgcaggtgcaggcagttcgtgacgatga

SEQ ID NO: 502 - DNA, 4000 bp, Escherichia coli
  misc_feature (465)..(465): n is a, c, g, or t
  misc_feature (733)..(733): n is a, c, g, or t
  misc_feature (766)..(766): n is a, c, g, or t
  misc_feature (1968)..(1968): n is a, c, g, or t
  misc_feature (2000)..(2000): n is a, c, g, or t
  misc_feature (2685)..(2685): n is a, c, g, or t
  misc_feature (3009)..(3009): n is a, c, g, or t
  misc_feature (3056)..(3056): n is a, c, g, or t
  misc_feature (3341)..(3341): n is a, c, g, or t
tgagatgtacggaaaccatcgaagaagttgatgaaaggaactgatgattcaagtgtagccaggtgtggaactgctgaaaggtccattacctcttgtactgaaccagagcagaacatcgcaaaacctgtctggcgacatgccattacatcttggtgatcaccaaagatacaaagcgcatgagaagccagtgtacgtgctgaaacattaaacacacaagggagcaattcacctgcaatcttgtacatgtttggaatcatcagcaacaaaccctgtgatgcagtgtaagttgatgtgagggcacctgcctgcaaagaaccatgaacagcacctgcagcaccagcctcagattccatttcttggatagaaacagtctgaccaaacaggttcttacgacctttagcagcccattcatctacatgctctgccataggagatgacggagtgatagggtagattgctgcaacntctgtaaacatatagcttacatgagcggcagctgtgttaccatcacaagtgataaactttttttctttagccattttatgtctgataaatattaatgaatgtttttgtatatatgttatatttcttttctcgttttgaaagacttaatgtcttgtttgtgcttcaactttgttgctattccctttaatacaggaaacctaacagccaaagagggatgagattatcttttcctacttccgtattatagcgtgcatagatggtgtcaggnttacatcgttgcttgtgttcgcttaatgcatcngtaatcttaaacttacgatttccatcaatagtaaagtaatgatcctttgaagcttgattgacttgatgatctttccacaatgaattgacgaagaatgtctccataacctcttgctcgtttacttgaatcgggtagatggcatacatcaaattggagttgtgcatcattactttgctcggctttttaggaaattcatgtccgacgggataaatgatattaatgagtcgagcgtctgcaagatacttgatatagttcattactgttgcacgacttgtttgtatttcatgcgccaaattactgatgttcggagcttttgggccttcaactgccaataaataaaagagctttttaatcttggtcagatactttaagtctatttgtttgatgagcagaatgtcgacttctgtcatcatgttcattgtcttcagtaagttttcggagaagtttgcgtgttctaagaagaatggataaaagccgtgatgaatgtaatcagagaagtatttcatcggactaatcaatgggaggatatctttaataatgtgctcgtgattatgtaaaatctcatctaaggtgtaagcatggaagttatttcctgtcattaaattaagatattctcgaaaggaaaacccacgaagattatagctttcaactatgctatggagttcaggattctcttctttgagtctcataacgctactacccgtgaagacaatctttagatttggataagagtcatagcatttacgaagttctgtactccaattaggttgtttgaacacttggtcaatcaaaagaacttttccaccattgttgacaaagtctccggcaaaatctgcaatacctttaccctgaaaataaaagttattcatattgacatagagacatctcttgtcgtgtgcaccaaacttttctttcgcgtattgcaataagaaagtagtctttccaacaccacgcgtgcctttaatgccaatcatacgatcgtcccaattaatctcatccattagggtgcgacgtacaggtgcgtttgtatgttcaacaagataagcgtgtgtacgaaagaaagcttccattatctatgagttatattatatataaatacaatgcaaagataatacttatttccttatttgcaaactgtagattgcaaaaaatgggatttttttcatattttagcacattatcaaatatcacaaacagaaatnggaattgtgcagagctttgtcgtcggtgtttnttttgttggatacgataagttttgtttaatcatcaaaatcatcgtcatcatcgaaaccaaacatgagcggatcaacaaaagaatcaatagcgcgacgatcctttttggtgggtcttcctgttcctcgtgcacgatcaacaaaaccactgatacgactcatttcaagcaactcatattgctttggagaagtaacattttcataaacttcgggaattaatttcgctccaacacgttgttcgatacattttaacaccttataagaataggtgataggtggcttcttaacgttaactacttcgcctaccttaatgaggtggctgggtttgacgtttactccgccctttgttacacgcccattcttacatgcatctgcagcaatagagcgtgtcttgaatatgcgagcggcccaaagccatttatctattcttgcggtttcctgcatatttatttcttcccgagtttattaaattggttcattgtgatatcaattccagctaaagcaaagcttttaatgatatcgcatgcaatattgatgctgggttgcagtatggtcttgtcattgtcatcgtatttccccaagacccaatcaacctggcctcctttggggtaatcatttccgattcccattcgtaaacgggcgtagtttgtgccaattagttgttgaatatgccccaatccattgtgncctccattattaccatttgccttaaggcggaatgctccaagaggtaaagcgatatcatcgctaatgacaagaagccgactttggtcaatgttttctttgttaagccaataccttacagcgttaccgcttagattcatgaatgttgttggcttcaataaaatcaatttacgacctttgagagtggtttctgcaatgaatccatatcgcttgtcttcaaaatgaatattggacgcttttgcaaaagcgtccaataccatgaatcctgtattgtggcgggtttcttgatattcatcaccaggattccctaaaccacaaattagaaanttatccattgtaattattcagcagcagatgaatcttcagcacttgcngctgcagcttgttgtgcttgtcttgtcatcttaacagaacatacaacaacatctttgctggttgttatctcaagaccttcgaaagaaagctctccaaccttaatactcttaccaatcttcaatgcagtaacatcgatgtcaagatgctcaggaatctgctgataaggtgcagttacgttaatcttacgaatagaaaggttcatacgtccaccatcacgaacaccttgtgcaagaccagtcagcttgacagggataccaatattgattggtttttgatcgtttacntcatagaaatcaacgtgaagaggtgcgtctgttactgggtgaaattgaatctctttcaagattgctgtgtgatgctcaccttcaatattcaaattgataacgtagatgtggggagtatagatgattttacgaagctcgctgaatgcaattgtgaatgcgtgtgcttcaggcttaccatcagcgtttttcttctctccataaaggttacaaggaataaaaccttgtttacgaagttctttagaagcttttttaccaaggtctgttcgcttctgacctgcaacattaatctctttcataatttgtgttactctaaattaaattgttatgaattaattcgccatcacacgagattgctctcggaaaagcgttgcaaaggtagtctatttttgggttctatgcaaatttcttctaaaaaatattgaaaataagagctttgatttgcatattcagttgaaatcatctacttttgtggctaatataatcaacgatataggaatccataaattattagagaatgattaatagggaacttataaggatcaaggtagttcagttaacctatgcatactatcaaaacggtaacaaaaatattgatactgctgaaaaggaattgtttttcagtctttcaaaagcgtatgacttatataatacgttgcttt

SEQ ID NO: 503 - DNA, 4000 bp, Escherichia coli
  misc_feature (1420)..(1420): n is a, c, g, or t
  misc_feature (1989)..(1990): n is a, c, g, or t
  misc_feature (1992)..(1992): n is a, c, g, or t
  misc_feature (2148)..(2148): n is a, c, g, or t
  misc_feature (2211)..(2211): n is a, c, g, or t
  misc_feature (2220)..(2220): n is a, c, g, or t
  misc_feature (2222)..(2222): n is a, c, g, or t
  misc_feature (2229)..(2229): n is a, c, g, or t
  misc_feature (2247)..(2247): n is a, c, g, or t
  misc_feature (2304)..(2304): n is a, c, g, or t
  misc_feature (2316)..(2316): n is a, c, g, or t
  misc_feature (2318)..(2318): n is a, c, g, or t
  misc_feature (2420)..(2420): n is a, c, g, or t
  misc_feature (2432)..(2432): n is a, c, g, or t
  misc_feature (2447)..(2447): n is a, c, g, or t
  misc_feature (2462)..(2462): n is a, c, g, or t
  misc_feature (2510)..(2510): n is a, c, g, or t
  misc_feature (2546)..(2546): n is a, c, g, or t
  misc_feature (2585)..(2585): n is a, c, g, or t
  misc_feature (2591)..(2591): n is a, c, g, or t
  misc_feature (2717)..(2717): n is a, c, g, or t
  misc_feature (2720)..(2720): n is a, c, g, or t
  misc_feature (2813)..(2813): n is a, c, g, or t
  misc_feature (2831)..(2831): n is a, c, g, or t
  misc_feature (2858)..(2858): n is a, c, g, or t
  misc_feature (2864)..(2864): n is a, c, g, or t
  misc_feature (2879)..(2879): n is a, c, g, or t
  misc_feature (2911)..(2911): n is a, c, g, or t
  misc_feature (2963)..(2965): n is a, c, g, or t
  misc_feature (2969)..(2969): n is a, c, g, or t
  misc_feature (2971)..(2972): n is a, c, g, or t
  misc_feature (2975)..(2976): n is a, c, g, or t
  misc_feature (2980)..(2980): n is a, c, g, or t
  misc_feature (2982)..(2982): n is a, c, g, or t
  misc_feature (2984)..(2988): n is a, c, g, or t
  misc_feature (2991)..(2991): n is a, c, g, or t
  misc_feature (2994)..(2995): n is a, c, g, or t
  misc_feature (2998)..(3000): n is a, c, g, or t
  misc_feature (3003)..(3004): n is a, c, g, or t
  misc_feature (3009)..(3009): n is a, c, g, or t
  misc_feature (3011)..(3011): n is a, c, g, or t
  misc_feature (3013)..(3017): n is a, c, g, or t
  misc_feature (3021)..(3023): n is a, c, g, or t
  misc_feature (3025)..(3026): n is a, c, g, or t
  misc_feature (3031)..(3032): n is a, c, g, or t
  misc_feature (3035)..(3035): n is a, c, g, or t
  misc_feature (3037)..(3041): n is a, c, g, or t
  misc_feature (3043)..(3045): n is a, c, g, or t
  misc_feature (3047)..(3048): n is a, c, g, or t
  misc_feature (3051)..(3055): n is a, c, g, or t
  misc_feature (3058)..(3060): n is a, c, g, or t
  misc_feature (3063)..(3067): n is a, c, g, or t
  misc_feature (3069)..(3069): n is a, c, g, or t
  misc_feature (3071)..(3071): n is a, c, g, or t
  misc_feature (3073)..(3073): n is a, c, g, or t
  misc_feature (3075)..(3075): n is a, c, g, or t
  misc_feature (3081)..(3081): n is a, c, g, or t
  misc_feature (3083)..(3083): n is a, c, g, or t
  misc_feature (3085)..(3085): n is a, c, g, or t
  misc_feature (3087)..(3087): n is a, c, g, or t
  misc_feature (3090)..(3090): n is a, c, g, or t
  misc_feature (3092)..(3095): n is a, c, g, or t
  misc_feature (3099)..(3099): n is a, c, g, or t
  misc_feature (3101)..(3107): n is a, c, g, or t
  misc_feature (3109)..(3109): n is a, c, g, or t
  misc_feature (3113)..(3118): n is a, c, g, or t
  misc_feature (3120)..(3120): n is a, c, g, or t
  misc_feature (3122)..(3125): n is a, c, g, or t
  misc_feature (3128)..(3132): n is a, c, g, or t
  misc_feature (3135)..(3138): n is a, c, g, or t
  misc_feature (3142)..(3143): n is a, c, g, or t
  misc_feature (3145)..(3145): n is a, c, g, or t
  misc_feature (3147)..(3147): n is a, c, g, or t
  misc_feature (3149)..(3149): n is a, c, g, or t
  misc_feature (3151)..(3151): n is a, c, g, or t
  misc_feature (3153)..(3156): n is a, c, g, or t
  misc_feature (3162)..(3165): n is a, c, g, or t
  misc_feature (3167)..(3171): n is a, c, g, or t
  misc_feature (3174)..(3178): n is a, c, g, or t
  misc_feature (3184)..(3184): n is a, c, g, or t
  misc_feature (3186)..(3188): n is a, c, g, or t
  misc_feature (3190)..(3191): n is a, c, g, or t
  misc_feature (3193)..(3197): n is a, c, g, or t
  misc_feature (3199)..(3200): n is a, c, g, or t
  misc_feature (3203)..(3204): n is a, c, g, or t
  misc_feature (3206)..(3206): n is a, c, g, or t
  misc_feature (3208)..(3208): n is a, c, g, or t
  misc_feature (3210)..(3210): n is a, c, g, or t
  misc_feature (3212)..(3219): n is a, c, g, or t
  misc_feature (3222)..(3222): n is a, c, g, or t
  misc_feature (3224)..(3225): n is a, c, g, or t
  misc_feature (3227)..(3227): n is a, c, g, or t
  misc_feature (3231)..(3231): n is a, c, g, or t
  misc_feature (3233)..(3233): n is a, c, g, or t
  misc_feature (3237)..(3237): n is a, c, g, or t
  misc_feature (3240)..(3240): n is a, c, g, or t
  misc_feature (3242)..(3246): n is a, c, g, or t
  misc_feature (3248)..(3248): n is a, c, g, or t
  misc_feature (3251)..(3251): n is a, c, g, or t
  misc_feature (3255)..(3261): n is a, c, g, or t
  misc_feature (3267)..(3267): n is a, c, g, or t
  misc_feature (3269)..(3270): n is a, c, g, or t
  misc_feature (3272)..(3272): n is a, c, g, or t
  misc_feature (3274)..(3274): n is a, c, g, or t
  misc_feature (3277)..(3277): n is a, c, g, or t
  misc_feature (3279)..(3279): n is a, c, g, or t
  misc_feature (3282)..(3284): n is a, c, g, or t
  misc_feature (3286)..(3287): n is a, c, g, or t
  misc_feature (3290)..(3290): n is a, c, g, or t
  misc_feature (3292)..(3296): n is a, c, g, or t
  misc_feature (3299)..(3299): n is a, c, g, or t
  misc_feature (3301)..(3302): n is a, c, g, or t
  misc_feature (3304)..(3304): n is a, c, g, or t
  misc_feature (3307)..(3307): n is a, c, g, or t
  misc_feature (3309)..(3311): n is a, c, g, or t
  misc_feature (3315)..(3315): n is a, c, g, or t
  misc_feature (3318)..(3318): n is a, c, g, or t
  misc_feature (3322)..(3322): n is a, c, g, or t
  misc_feature (3325)..(3326): n is a, c, g, or t
  misc_feature (3328)..(3330): n is a, c, g, or t
  misc_feature (3332)..(3333): n is a, c, g, or t
  misc_feature (3336)..(3336): n is a, c, g, or t
  misc_feature (3339)..(3339): n is a, c, g, or t
  misc_feature (3341)..(3348): n is a, c, g, or t
  misc_feature (3350)..(3353): n is a, c, g, or t
  misc_feature (3356)..(3360): n is a, c, g, or t
  misc_feature (3363)..(3363): n is a, c, g, or t
  misc_feature (3365)..(3369): n is a, c, g, or t
  misc_feature (3371)..(3373): n is a, c, g, or t
  misc_feature (3376)..(3376): n is a, c, g, or t
  misc_feature (3380)..(3380): n is a, c, g, or t
  misc_feature (3383)..(3383): n is a, c, g, or t
  misc_feature (3385)..(3385): n is a, c, g, or t
  misc_feature (3390)..(3392): n is a, c, g, or t
  misc_feature (3394)..(3394): n is a, c, g, or t
  misc_feature (3398)..(3398): n is a, c, g, or t
  misc_feature (3403)..(3405): n is a, c, g, or t
  misc_feature (3411)..(3411): n is a, c, g, or t
  misc_feature (3413)..(3413): n is a, c, g, or t
  misc_feature (3416)..(3420): n is a, c, g, or t
  misc_feature (3422)..(3423): n is a, c, g, or t
  misc_feature (3425)..(3428): n is a, c, g, or t
  misc_feature (3430)..(3430): n is a, c, g, or t
  misc_feature (3432)..(3434): n is a, c, g, or t
  misc_feature (3436)..(3436): n is a, c, g, or t
  misc_feature (3439)..(3439): n is a, c, g, or t
  misc_feature (3441)..(3441): n is a, c, g, or t
  misc_feature (3446)..(3450): n is a, c, g, or t
  misc_feature (3452)..(3452): n is a, c, g, or t
  misc_feature (3454)..(3455): n is a, c, g, or t
  misc_feature (3461)..(3462): n is a, c, g, or t
  misc_feature (3464)..(3465): n is a, c, g, or t
  misc_feature (3472)..(3476): n is a, c, g, or t
  misc_feature (3481)..(3481): n is a, c, g, or t
  misc_feature (3487)..(3487): n is a, c, g, or t
  misc_feature (3490)..(3490): n is a, c, g, or t
  misc_feature (3492)..(3492): n is a, c, g, or t
  misc_feature (3494)..(3494): n is a, c, g, or t
  misc_feature (3497)..(3498): n is a, c, g, or t
  misc_feature (3501)..(3501): n is a, c, g, or t
  misc_feature (3504)..(3504): n is a, c, g, or t
  misc_feature (3508)..(3513): n is a, c, g, or t
  misc_feature (3515)..(3516): n is a, c, g, or t
  misc_feature (3518)..(3524): n is a, c, g, or t
  misc_feature (3528)..(3534): n is a, c, g, or t
  misc_feature (3536)..(3536): n is a, c, g, or t
  misc_feature (3538)..(3540): n is a, c, g, or t
  misc_feature (3544)..(3546): n is a, c, g, or t
  misc_feature (3549)..(3549): n is a, c, g, or t
  misc_feature (3551)..(3553): n is a, c, g, or t
  misc_feature (3555)..(3555): n is a, c, g, or t
  misc_feature (3557)..(3557): n is a, c, g, or t
  misc_feature (3559)..(3559): n is a, c, g, or t
  misc_feature (3561)..(3562): n is a, c, g, or t
  misc_feature (3636)..(3636): n is a, c, g, or t
  misc_feature (3647)..(3648): n is a, c, g, or t
  misc_feature (3651)..(3651): n is a, c, g, or t
  misc_feature (3653)..(3655): n is a, c, g, or t
  misc_feature (3657)..(3657): n is a, c, g, or t
  misc_feature (3659)..(3660): n is a, c, g, or t
  misc_feature (3662)..(3663): n is a, c, g, or t
  misc_feature (3665)..(3665): n is a, c, g, or t
  misc_feature (3668)..(3668): n is a, c, g, or t
  misc_feature (3673)..(3673): n is a, c, g, or t
  misc_feature (3676)..(3677): n is a, c, g, or t
  misc_feature (3681)..(3681): n is a, c, g, or t
  misc_feature (3684)..(3684): n is a, c, g, or t
  misc_feature (3687)..(3688): n is a, c, g, or t
  misc_feature (3693)..(3694): n is a, c, g, or t
  misc_feature (3696)..(3697): n is a, c, g, or t
  misc_feature (3700)..(3701): n is a, c, g, or t
  misc_feature (3703)..(3703): n is a, c, g, or t
  misc_feature (3706)..(3709): n is a, c, g, or t
  misc_feature (3712)..(3712): n is a, c, g, or t
  misc_feature (3716)..(3716): n is a, c, g, or t
  misc_feature (3720)..(3721): n is a, c, g, or t
  misc_feature (3725)..(3725): n is a, c, g, or t
  misc_feature (3727)..(3729): n is a, c, g, or t
  misc_feature (3738)..(3738): n is a, c, g, or t
  misc_feature (3744)..(3745): n is a, c, g, or t
  misc_feature (3750)..(3750): n is a, c, g, or t
  misc_feature (3761)..(3761): n is a, c, g, or t
  misc_feature (3764)..(3764): n is a, c, g, or t
  misc_feature (3769)..(3769): n is a, c, g, or t
  misc_feature (3771)..(3771): n is a, c, g, or t
  misc_feature (3774)..(3776): n is a, c, g, or t
  misc_feature (3778)..(3778): n is a, c, g, or t
  misc_feature (3780)..(3781): n is a, c, g, or t
  misc_feature (3783)..(3783): n is a, c, g, or t
  misc_feature (3788)..(3788): n is a, c, g, or t
  misc_feature (3797)..(3797): n is a, c, g, or t
  misc_feature (3800)..(3800): n is a, c, g, or t
  misc_feature (3802)..(3802): n is a, c, g, or t
  misc_feature (3805)..(3806): n is a, c, g, or t
  misc_feature (3809)..(3814): n is a, c, g, or t
  misc_feature (3816)..(3816): n is a, c, g, or t
  misc_feature (3818)..(3818): n is a, c, g, or t
  misc_feature (3820)..(3820): n is a, c, g, or t
  misc_feature (3824)..(3824): n is a, c, g, or t
  misc_feature (3832)..(3833): n is a, c, g, or t
  misc_feature (3838)..(3839): n is a, c, g, or t
  misc_feature (3842)..(3842): n is a, c, g, or t
  misc_feature (3844)..(3844): n is a, c, g, or t
  misc_feature (3847)..(3847): n is a, c, g, or t
  misc_feature (3850)..(3851): n is a, c, g, or t
  misc_feature (3854)..(3854): n is a, c, g, or t
  misc_feature (3856)..(3856): n is a, c, g, or t
  misc_feature (3862)..(3862): n is a, c, g, or t
  misc_feature (3864)..(3864): n is a, c, g, or t
  misc_feature (3872)..(3873): n is a, c, g, or t
  misc_feature (3877)..(3877): n is a, c, g, or t
  misc_feature (3879)..(3880): n is a, c, g, or t
  misc_feature (3883)..(3883): n is a, c, g, or t
  misc_feature (3885)..(3887): n is a, c, g, or t
  misc_feature (3890)..(3891): n is a, c, g, or t
  misc_feature (3893)..(3893): n is a, c, g, or t
  misc_feature (3895)..(3895): n is a, c, g, or t
  misc_feature (3897)..(3897): n is a, c, g, or t
  misc_feature (3899)..(3899): n is a, c, g, or t
  misc_feature (3901)..(3902): n is a, c, g, or t
  misc_feature (3905)..(3906): n is a, c, g, or t
  misc_feature (3908)..(3908): n is a, c, g, or t
  misc_feature (3912)..(3912): n is a, c, g, or t
  misc_feature (3922)..(3925): n is a, c, g, or t
  misc_feature (3931)..(3933): n is a, c, g, or t
  misc_feature (3935)..(3937): n is a, c, g, or t
  misc_feature (3940)..(3941): n is a, c, g, or t
  misc_feature (3944)..(3944): n is a, c, g, or t
  misc_feature (3948)..(3948): n is a, c, g, or t
  misc_feature (3951)..(3951): n is a, c, g, or t
  misc_feature (3953)..(3953): n is a, c, g, or t
  misc_feature (3955)..(3955): n is a, c, g, or t
  misc_feature (3957)..(3959): n is a, c, g, or t
  misc_feature (3964)..(3965): n is a, c, g, or t
  misc_feature (3967)..(3968): n is a, c, g, or t
  misc_feature (3972)..(3973): n is a, c, g, or t
  misc_feature (3975)..(3976): n is a, c, g, or t
  misc_feature (3978)..(3979): n is a, c, g, or t
  misc_feature (3982)..(3982): n is a, c, g, or t
  misc_feature (3984)..(3984): n is a, c, g, or t
  misc_feature (3989)..(3989): n is a, c, g, or t
  misc_feature (3992)..(3993): n is a, c, g, or t
  misc_feature (3996)..(3997): n is a, c, g, or t
  misc_feature (3999)..(4000): n is a, c, g, or t
ttcctttccgatgttttcctgctgacgataatccttacttctcaaaagcatatcctcgaaaaatcgaattttattcagcagatgtctttcttctacactcatatcgcacctccgtaaatatgtattctattcataaaagcagttgcgatttatgcgccttccaacgtatcatagtcatctcacatggataatcttcatatccaaaagtctcgcaagtgatcagtccctctataacaccggctattatttccgattcgtattgcttgtatgggtaaatataatctgggagataccgatgtatacatccgcattcggagcattgatacctcggaacattcacccatttgctcacacgacctttcgtccgtacaattcttctaactttgtcatagtatttcaattttccaccgcagtcctggcaggttgatgtattgttactgatcatatacctaaccctttctatcctaggttaaaatataaaaatttagtgtaggagttgacaattcctacactatgatatatgattactaacgataaatcaacaatccaacataaaatctcggttcattatcatgaggagggatttaatatgctgatacaatgcccggagtgcgacttacaggtaagcgataaagcaaatacctgtccgcattgtggatacccgctgaaaccagacgcaaagcccaaatcgtctcgtaaaccaaataagcgcaggcggcttccaaacggtttcggtcaaataagtgagattaaaggtagaaatttaaggaaccctttccgtgcaatggttacggttggaaaggacaagaatggcaaaccaatatgtaagccgttgaaaccggagtcatactttccaacatacaatgatgcatacacagctcttgtggaatttaataagaatccgtatgacctggaaccgtctatcacagtcaaggaactgtacgacaaatggacaccggaatatttcaagactctgaagagcgacgacagcgccagagctactacatcggcttggcaatactgctctgctgtttacgatatgcgagtcatggatgttcgagcaaggcacataaaaggctgcatggaagaaggtgttgctaccgtaagaggccaagagcagacaccaagcgcatcaatgaagaataagataaagacgctcttcaatcagatgctcgactatgctgttgaatacgaacttgtagatcggaactattcgagaacattcaagcttacagacgataccattaaagaaatacagactgtcaagaaagaacacattccattctctgatgatgagatggctcttctgtggaagaatctcggacataaatatgggattgagttcatgattattcaatgctattctggatggagaccccaggagttaggtctgatagaattagcagatgttgatttatcnaactggacatttaaaggtggaattaaaaccgatgctggtgaaaacagagttgtaccgattcatcctcggataagggacttggtttccaaatcatacgaagaggctgatcaacttgggagcaaatatcttttcaattatacagatgaagatcgccgcggtaagaataccaagttgacatacaatcggtatagcaaaatattcaatcgcattcgggacgagcttaaactcaacccggatcatagacctcacgacggcagaaagcatttcgtaaccaaatgcaaagatgctaaagtcgatgaatacgctatcaaatatatggtcggacataagatttcagatatcaccgaaaaggtgtatacagccagagaatttgaatggctcagaactgaaatagaaaaaataaaatgacttgtatttgacgctcaaatataggaatagcggtataggagtagtgcaggaataatgtatgaattacctacattttcccactttttactactcttaaccgcttcataattccttgattttactggattttctcggtataagccacctaacaagtttctatnntngaaacaaactatccagcatttacagtacctagagggttcaaatgtaggaataatcgagaaataaacgacacccacacaaacttaaccacctctatctactgttcaaaaccgtcttcaatcacatcgcccgtagaatccaaaagaaccgagttgcgngctttgcgatagatggtttgtccctgaattgttttaccggaactgtctttgattgggtttccncttgagtcntngatgttntctaagaacacgaactcnttaggatatcctgcgaaagccgttccggtaataattgtaccatctgctttgtgtgcngtatagcccttnancaaagcttcttccgtaacagtatcgccggtaaggtcgatcaaaactttattgccgaatacgactttattcgcagccatttgacaaaacctccttatccgatngtaacagtcttncctccggcagagttntcggtttctacatangggattgccttaactgtaacctgagataagcagttgtactcttcatcnggcatgatcgtctgagcttctttggacggtgttacntccttgctctgtggcttcatatcctcagaaccagacatngcaccntcaacgccaagaatcgtcacaccctcacgaatgttagtagcaataagctttgcctgttcggtggcgtcaatagacaccttaccagagccatcatgatagccttgcggtactgtatattctccagcnacngttgagatgatacccttgacagcgccgttgttcttcatagtacctgtaagcttacttccacgggcgtgcgcagtctttcctacgagaatctcngcgacagccgcagtatcntcggaagtatcgctgtcgaatgtacangtaccngtgatctttgcaccnctcttatcatgagcagtaatacctttgaggancttatctgcactgacggaatcgccagtaagatcgataaggacatcccccccnnnaatnannttnnttanantnnnnnttnccnnaannnttnntcctncntnnnnntttnnntnnttttnnttntnnnnngnnntnntgnnnnnggnnntannnnntncnangntaacancnangnaantnnnnaccncnnnnnnngntccnnnnnncngnnnnccnnnnnggnnnncccnnantncngncnnnncaaaannnnannnnncannnnncggaancnnntnnannnnnanncanntnangntnnnnnnnntcntnntnctcntnctcnttntnnnnntnctncttnnnnnnnaatttntnnancnggngnttnnncnnctncnnnnnaantnncnttncnnnaccnttnccgnccnnannntnntanggntnnnnnnnntnnnntcnnnnnttntnnnnntnnnccngggntananacccnnngncaanatacnnnattccnanatnnnnnanncnnnnangnnncnatncnataannnnntntnnttttanntnnttttgcnnnnntttcntttgcnaanangnccnnagnccngaannnnnnannannnnnnnaaannnnnnnantnnnaccnnnaancnnngntncntnnttttcctccttctttatgtgcaatcatgcagacctatcagaaacaatcagcttcttgttgactattgtgatttncttactaaatnngtntnnntnanncnntnttnaattnttnngttnttntcnngatannannttnnantgnnnnccnatcnaacnncganannnattttcganattgtnntaatncgcttcttcanttncaacntnaannncnanntncttgngttttctangcntngcnntannnnnntncngntttnttcgtttnntgacnntancngtntcnntangngtgtantngatttgcnngaantnntantnnntcnnantntnancnnttnngntttncttacgattnnnntggatnnnannntcnnctnctanttnananannntttcnngnnagtnntnnanntcntntttantgnnatnnann

SEQ ID NO: 504 - DNA, 4000 bp, Escherichia coli
  misc_feature (2)..(2): n is a, c, g, or t
  misc_feature (5)..(8): n is a, c, g, or t
  misc_feature (12)..(15): n is a, c, g, or t
  misc_feature (17)..(23): n is a, c, g, or t
  misc_feature (27)..(35): n is a, c, g, or t
  misc_feature (37)..(43): n is a, c, g, or t
  misc_feature (46)..(49): n is a, c, g, or t
  misc_feature (51)..(52): n is a, c, g, or t
  misc_feature (54)..(55): n is a, c, g, or t
  misc_feature (57)..(58): n is a, c, g, or t
  misc_feature (61)..(64): n is a, c, g, or t
  misc_feature (66)..(66): n is a, c, g, or t
  misc_feature (68)..(69): n is a, c, g, or t
  misc_feature (71)..(80): n is a, c, g, or t
  misc_feature (82)..(83): n is a, c, g, or t
  misc_feature (88)..(90): n is a, c, g, or t
  misc_feature (92)..(92): n is a, c, g, or t
  misc_feature (94)..(96): n is a, c, g, or t
  misc_feature (98)..(101): n is a, c, g, or t
  misc_feature (103)..(103): n is a, c, g, or t
  misc_feature (105)..(105): n is a, c, g, or t
  misc_feature (108)..(109): n is a, c, g, or t
  misc_feature (111)..(113): n is a, c, g, or t
  misc_feature (117)..(117): n is a, c, g, or t
  misc_feature (120)..(120): n is a, c, g, or t
  misc_feature (122)..(127): n is a, c, g, or t
  misc_feature (129)..(129): n is a, c, g, or t
  misc_feature (131)..(137): n is a, c, g, or t
  misc_feature (139)..(141): n is a, c, g, or t
  misc_feature (145)..(148): n is a, c, g, or t
  misc_feature (150)..(151): n is a, c, g, or t
  misc_feature (153)..(155): n is a, c, g, or t
  misc_feature (157)..(164): n is a, c, g, or t
  misc_feature (169)..(170): n is a, c, g, or t
  misc_feature (172)..(174): n is a, c, g, or t
  misc_feature (176)..(177): n is a, c, g, or t
  misc_feature (179)..(179): n is a, c, g, or t
  misc_feature (182)..(183): n is a, c, g, or t
  misc_feature (185)..(186): n is a, c, g, or t
  misc_feature (188)..(190): n is a, c, g, or t
  misc_feature (192)..(195): n is a, c, g, or t
  misc_feature (197)..(198): n is a, c, g, or t
  misc_feature (200)..(200): n is a, c, g, or t
  misc_feature (204)..(205): n is a, c, g, or t
  misc_feature (210)..(211): n is a, c, g, or t
  misc_feature (215)..(215): n is a, c, g, or t
  misc_feature (218)..(221): n is a, c, g, or t
  misc_feature (224)..(229): n is a, c, g, or t
  misc_feature (231)..(237): n is a, c, g, or t
  misc_feature (239)..(239): n is a, c, g, or t
  misc_feature (241)..(244): n is a, c, g, or t
  misc_feature (246)..(246): n is a, c, g, or t
  misc_feature (248)..(249): n is a, c, g, or t
  misc_feature (253)..(258): n is a, c, g, or t
  misc_feature (260)..(267): n is a, c, g, or t
  misc_feature (269)..(275): n is a, c, g, or t
  misc_feature (278)..(288): n is a, c, g, or t
  misc_feature (294)..(294): n is a, c, g, or t
  misc_feature (296)..(307): n is a, c, g, or t
  misc_feature (309)..(310): n is a, c, g, or t
  misc_feature (312)..(312): n is a, c, g, or t
  misc_feature (314)..(318): n is a, c, g, or t
  misc_feature (322)..(325): n is a, c, g, or t
  misc_feature (327)..(327): n is a, c, g, or t
  misc_feature (329)..(333): n is a, c, g, or t
  misc_feature (336)..(337): n is a, c, g, or t
  misc_feature (339)..(341): n is a, c, g, or t
  misc_feature (343)..(344): n is a, c, g, or t
  misc_feature (347)..(347): n is a, c, g, or t
  misc_feature (349)..(352): n is a, c, g, or t
  misc_feature (356)..(357): n is a, c, g, or t
  misc_feature (360)..(362): n is a, c, g, or t
  misc_feature (364)..(364): n is a, c, g, or t
  misc_feature (366)..(366): n is a, c, g, or t
  misc_feature (369)..(369): n is a, c, g, or t
  misc_feature (372)..(372): n is a, c, g, or t
  misc_feature (374)..(374): n is a, c, g, or t
  misc_feature (376)..(377): n is a, c, g, or t
  misc_feature (380)..(382): n is a, c, g, or t
  misc_feature (384)..(387): n is a, c, g, or t
  misc_feature (395)..(397): n is a, c, g, or t
  misc_feature (399)..(399): n is a, c, g, or t
  misc_feature (401)..(402): n is a, c, g, or t
  misc_feature (405)..(408): n is a, c, g, or t
  misc_feature (410)..(410): n is a, c, g, or t
  misc_feature (412)..(413): n is a, c, g, or t
  misc_feature (417)..(417): n is a, c, g, or t
  misc_feature (419)..(419): n is a, c, g, or t
  misc_feature (422)..(422): n is a, c, g, or t
  misc_feature (428)..(428): n is a, c, g, or t
  misc_feature (431)..(432): n is a, c, g, or t
  misc_feature (434)..(438): n is a, c, g, or t
  misc_feature (441)..(441): n is a, c, g, or t
  misc_feature (443)..(443): n is a, c, g, or t
  misc_feature (445)..(445): n is a, c, g, or t
  misc_feature (449)..(455): n is a, c, g, or t
  misc_feature (457)..(457): n is a, c, g, or t
  misc_feature (459)..(460): n is a, c, g, or t
  misc_feature (462)..(463): n is a, c, g, or t
  misc_feature (465)..(467): n is a, c, g, or t
  misc_feature (475)..(475): n is a, c, g, or t
  misc_feature (477)..(477): n is a, c, g, or t
  misc_feature (482)..(484): n is a, c, g, or t
  misc_feature (486)..(486): n is a, c, g, or t
  misc_feature (493)..(493): n is a, c, g, or t
  misc_feature (495)..(498): n is a, c, g, or t
  misc_feature (501)..(501): n is a, c, g, or t
  misc_feature (504)..(507): n is a, c, g, or t
  misc_feature (509)..(510): n is a, c, g, or t
  misc_feature (513)..(513): n is a, c, g, or t
  misc_feature (519)..(522): n is a, c, g, or t
  misc_feature (524)..(525): n is a, c, g, or t
  misc_feature (529)..(529): n is a, c, g, or t
  misc_feature (531)..(531): n is a, c, g, or t
  misc_feature (536)..(536): n is a, c, g, or t
  misc_feature (539)..(540): n is a, c, g, or t
  misc_feature (543)..(543): n is a, c, g, or t
  misc_feature (546)..(548): n is a, c, g, or t
  misc_feature (552)..(552): n is a, c, g, or t
  misc_feature (561)..(563): n is a, c, g, or t
  misc_feature (565)..(568): n is a, c, g, or t
  misc_feature (570)..(570): n is a, c, g, or t
  misc_feature (573)..(576): n is a, c, g, or t
  misc_feature (579)..(581): n is a, c, g, or t
  misc_feature (583)..(584): n is a, c, g, or t
  misc_feature (591)..(591): n is a, c, g, or t
  misc_feature (598)..(599): n is a, c, g, or t
  misc_feature (602)..(602): n is a, c, g, or t
  misc_feature (605)..(605): n is a, c, g, or t
  misc_feature (607)..(608): n is a, c, g, or t
  misc_feature (612)..(612): n is a, c, g, or t
  misc_feature (615)..(615): n is a, c, g, or t
  misc_feature (617)..(618): n is a, c, g, or t
  misc_feature (620)..(621): n is a, c, g, or t
  misc_feature (625)..(626): n is a, c, g, or t
  misc_feature (628)..(628): n is a, c, g, or t
  misc_feature (630)..(630): n is a, c, g, or t
  misc_feature (637)..(640): n is a, c, g, or t
  misc_feature (642)..(642): n is a, c, g, or t
  misc_feature (644)..(645): n is a, c, g, or t
  misc_feature (647)..(647): n is a, c, g, or t
  misc_feature (649)..(649): n is a, c, g, or t
  misc_feature (651)..(651): n is a, c, g, or t
  misc_feature (654)..(654): n is a, c, g, or t
  misc_feature (663)..(666): n is a, c, g, or t
  misc_feature (669)..(670): n is a, c, g, or t
  misc_feature (674)..(674): n is a, c, g, or t
  misc_feature (677)..(680): n is a, c, g, or t
  misc_feature (683)..(683): n is a, c, g, or t
  misc_feature (688)..(689): n is a, c, g, or t
  misc_feature (691)..(693): n is a, c, g, or t
  misc_feature (695)..(697): n is a, c, g, or t
  misc_feature (699)..(701): n is a, c, g, or t
  misc_feature (704)..(705): n is a, c, g, or t
  misc_feature (709)..(709): n is a, c, g, or t
  misc_feature (712)..(714): n is a, c, g, or t
  misc_feature (716)..(719): n is a, c, g, or t
  misc_feature (721)..(721): n is a, c, g, or t
  misc_feature (723)..(724): n is a, c, g, or t
  misc_feature (726)..(726): n is a, c, g, or t
  misc_feature (728)..(728): n is a, c, g, or t
  misc_feature (730)..(730): n is a, c, g, or t
  misc_feature (732)..(732): n is a, c, g, or t
  misc_feature (738)..(739): n is a, c, g, or t
  misc_feature (741)..(742): n is a, c, g, or t
  misc_feature (751)..(757): n is a, c, g, or t
  misc_feature (759)..(761): n is a, c, g, or t
  misc_feature (763)..(763): n is a, c, g, or t
  misc_feature (766)..(781): n is a, c, g, or t
  misc_feature (783)..(784): n is a, c, g, or t
  misc_feature (787)..(793): n is a, c, g, or t
  misc_feature (795)..(799): n is a, c, g, or t
  misc_feature (801)..(803): n is a, c, g, or t
  misc_feature (805)..(809): n is a, c, g, or t
  misc_feature (811)..(814): n is a, c, g, or t
  misc_feature (817)..(818): n is a, c, g, or t
  misc_feature (820)..(820): n is a, c, g, or t
  misc_feature (822)..(822): n is a, c, g, or t
  misc_feature (825)..(831): n is a, c, g, or t
  misc_feature (833)..(839): n is a, c, g, or t
  misc_feature (841)..(843): n is a, c, g, or t
  misc_feature (845)..(845): n is a, c, g, or t
  misc_feature (847)..(851): n is a, c, g, or t
  misc_feature (853)..(854): n is a, c, g, or t
  misc_feature (856)..(859): n is a, c, g, or t
  misc_feature (863)..(865): n is a, c, g, or t
  misc_feature (867)..(867): n is a, c, g, or t
  misc_feature (869)..(871): n is a, c, g, or t
  misc_feature (873)..(875): n is a, c, g, or t
  misc_feature (877)..(879): n is a, c, g, or t
  misc_feature (881)..(882): n is a, c, g, or t
  misc_feature (884)..(885): n is a, c, g, or t
  misc_feature (887)..(887): n is a, c, g, or t
  misc_feature (889)..(906): n is a, c, g, or t
  misc_feature (909)..(910): n is a, c, g, or t
  misc_feature (913)..(916): n is a, c, g, or t
  misc_feature (918)..(931): n is a, c, g, or t
  misc_feature (934)..(934): n is a, c, g, or t
  misc_feature (936)..(944): n is a, c, g, or t
  misc_feature (947)..(949): n is a, c, g, or t
  misc_feature (951)..(963): n is a, c, g, or t
  misc_feature (965)..(968): n is a, c, g, or t
  misc_feature (971)..(976): n is a, c, g, or t
  misc_feature (978)..(980): n is a, c, g, or t
  misc_feature (982)..(982): n is a, c, g, or t
  misc_feature (985)..(987): n is a, c, g, or t
  misc_feature (989)..(992): n is a, c, g, or t
  misc_feature (994)..(999): n is a, c, g, or t
  misc_feature (1002)..(1003): n is a, c, g, or t
  misc_feature (1005)..(1010): n is a, c, g, or t
  misc_feature (1013)..(1014): n is a, c, g, or t
  misc_feature (1016)..(1016): n is a, c, g, or t
  misc_feature (1020)..(1030): n is a, c, g, or t
  misc_feature (1033)..(1034): n is a, c, g, or t
  misc_feature (1036)..(1036): n is a, c, g, or t
  misc_feature (1039)..(1044): n is a, c, g, or t
  misc_feature (1046)..(1056): n is a, c, g, or t
  misc_feature (1058)..(1060): n is a, c, g, or t
  misc_feature (1062)..(1063): n is a, c, g, or t
  misc_feature (1065)..(1073): n is a, c, g, or t
  misc_feature (1075)..(1076): n is a, c, g, or t
  misc_feature (1078)..(1083): n is a, c, g, or t
  misc_feature (1088)..(1089): n is a, c, g, or t
  misc_feature (1091)..(1093): n is a, c, g, or t
  misc_feature (1095)..(1097): n is a, c, g, or t
  misc_feature (1099)..(1101): n is a, c, g, or t
  misc_feature (1103)..(1124): n is a, c, g, or t
  misc_feature (1126)..(1126): n is a, c, g, or t
  misc_feature (1129)..(1129): n is a, c, g, or t
  misc_feature (1131)..(1134): n is a, c, g, or t
  misc_feature (1136)..(1143): n is a, c, g, or t
  misc_feature (1145)..(1153): n is a, c, g, or t
  misc_feature (1155)..(1161): n is a, c, g, or t
  misc_feature (1163)..(1168): n is a, c, g, or t
  misc_feature (1171)..(1171): n is a, c, g, or t
  misc_feature (1176)..(1176): n is a, c, g, or t
  misc_feature (1178)..(1178): n is a, c, g, or t
  misc_feature (1180)..(1181): n is a, c, g, or t
  misc_feature (1184)..(1186): n is a, c, g, or t
  misc_feature (1188)..(1189): n is a, c, g, or t
  misc_feature (1191)..(1192): n is a, c, g, or t
  misc_feature (1194)..(1197): n is a, c, g, or t
  misc_feature (1199)..(1199): n is a, c, g, or t
  misc_feature (1201)..(1203): n is a, c, g, or t
  misc_feature (1205)..(1205): n is a, c, g, or t
  misc_feature (1207)..(1227): n is a, c, g, or t
  misc_feature (1233)..(1234): n is a, c, g, or t
  misc_feature (1238)..(1239): n is a, c, g, or t
  misc_feature (1242)..(1242): n is a, c, g, or t
  misc_feature (1244)..(1245): n is a, c, g, or t
  misc_feature (1247)..(1249): n is a, c, g, or t
  misc_feature (1252)..(1255): n is a, c, g, or t
  misc_feature (1257)..(1259): n is a, c, g, or t
  misc_feature (1261)..(1263): n is a, c, g, or t
  misc_feature (1265)..(1265): n is a, c, g, or t
  misc_feature (1267)..(1269): n is a, c, g, or t
  misc_feature (1271)..(1271): n is a, c, g, or t
  misc_feature (1273)..(1273): n is a, c, g, or t
  misc_feature (1275)..(1276): n is a, c, g, or t
  misc_feature (1278)..(1281): n is a, c, g, or t
  misc_feature (1284)..(1285): n is a, c, g, or t
  misc_feature (1287)..(1291): n is a, c, g, or t
  misc_feature (1293)..(1297): n is a, c, g, or t
  misc_feature (1299)..(1299): n is a, c, g, or t
  misc_feature (1304)..(1307): n is a, c, g, or t
  misc_feature (1310)..(1310): n is a, c, g, or t
  misc_feature (1312)..(1312): n is a, c, g, or t
  misc_feature (1314)..(1318): n is a, c, g, or t
  misc_feature (1320)..(1321): n is a, c, g, or t
  misc_feature (1323)..(1324): n is a, c, g, or t
  misc_feature (1329)..(1329): n is a, c, g, or t
  misc_feature (1331)..(1331): n is a, c, g, or t
  misc_feature (1333)..(1337): n is a, c, g, or t
  misc_feature (1340)..(1341): n is a, c, g, or t
  misc_feature (1343)..(1344): n is a, c, g, or t
  misc_feature (1346)..(1347): n is a, c, g, or t
  misc_feature (1985)..(1985): n is a, c, g, or t
  misc_feature (2016)..(2016): n is a, c, g, or t
  misc_feature (2202)..(2202): n is a, c, g, or t
  misc_feature (2320)..(2320): n is a, c, g, or t
  misc_feature (2371)..(2371): n is a, c, g, or t
  misc_feature (2470)..(2470): n is a, c, g, or t
  misc_feature (2485)..(2485): n is a, c, g, or t
  misc_feature (2705)..(2705): n is a, c, g, or t
  misc_feature (3007)..(3007): n is a, c, g, or t
  misc_feature (3109)..(3109): n is a, c, g, or t
  misc_feature (3718)..(3718): n is a, c, g, or t
  misc_feature (3827)..(3827): n is a, c, g, or t
tnaannnnaaannnnannnnnnnaaannnnnnnnnannnnnnnaannnntnntnntnnctnnnncnanncnnnnnnnnnnannttttnnnantnnnannnngncnttnnannnaaanggnannnnnntngnnnnnnngnnnaaannnnannannngnnnnnnnnttttnntnnngnngnaanntnncnnngnnnnannanaaannaaaannaaanggnnnnctnnnnnntnnnnnnntnannnnangnnaaannnnnnannnnnnnntnnnnnnnttnnnnnnnnnnnaaaaangnnnnnnnnnnnngnntngnnnnntttnnnntngnnnnncgnnannnannaangnnnntttnnaannntncnaancangnannaannntnnnnttaatttnnnancnnaannnnantnngttngnaanaaaaangtnngnnnnnccnancngtcnnnnnnnancnnanntnnnaaaaaaancnaaagnnnanattaaantnnnntgntannnnannggnaaagannnntnncatncnaaaanttnnttnatnnnaaanaaaaaaaannnannnntnatnnnnggnnnannaaatttnacaaaannaanttngnntganttnanntnngaanngnanattaaannnncngnncntncnaanaaaaaggtnnnnacnnaacnaannnnttnttttnncnnntnnngnnnaannaaanacnnnannnntncnntncntnanaaaagnnannaaaataaannnnnnngnnngnaannnnnnnnnnnnnnnntnnaannnnnnntnnnnntnnnannnnntnnnntannancnaannnnnnngnnnnnnntnnncntnnnnngnnannnnaaannngnannngnnnannngnngnnanannnnnnnnnnnnnnnnnnaannaannnnannnnnnnnnnnnnnaancnnnnnnnnnggnnntnnnnnnnnnnnnnannnnttnnnnnngnnngnaannngnnnnannnnnnttnntnnnnnnttnngntttnnnnnnnnnnnaanngnaannnnnngnnnnnnnnnnncnnntnntnnnnnnnnngnntnnnnnnaaaanncnnntnnntnnngnnnnnnnnnnnnnnnnnnnnnntnggntnnnnannnnnnnngnnnnnnnnntnnnnnnngnnnnnnaanttttnantnnaannnannanntnnnntnannngnannnnnnnnnnnnnnnnnnnnnaaaaannaaannttnanncnnnttnnnntnnncnnnantnnncngnanngnnnnaanncnnnnnannnnncnaaaannnnggntnannnnnannannaaaangnannnnnaanncnntnnttttttcttacgcttcgtaatgaaagtcaggttcttttgtttcttcattataatttacggtcaaatcatgaccatcaaagtaccaaaggtcttcatcttctacgaagaatgttaaaccgtcaacttttgtttcaacgccaacgtttttaggagaatctgtgtttacacctaaagaaaaacctttttgaacgttgctgcatccgccgtagcgaacaaaaaagcgaattgtttcgtttccttctagcatcatttcatctttgtaccacgtagctgctgcttctgttactgttaatttcattaattatgctccttccaatactgcggatacatttattatagtagaaaggtagataaattaccaatatatacgaatccagctaggaaggaatgagataaaataaaacgatttaatatagaggtgaaggcttcatttctatattaaatcgtttcattctttcatttgaaatcatattgttttccaatggtttcccagcagtgaacgcagtagcggcttccttctagctgtgaatccattttcttatttcgtttgcaaatagggcattttttcttcacatcattcacctccttattttagtatcagtataactaataaataagaaatgtattcgcttacaaancggttataaaaaaagaaataagaggaagctnctcttatttctttttacctgacaaaaatgtgactttcggttctgttttattaagaattcgggtaatgtttgcgcggtgtctgtaaatgacaaaggctacaattaaaccaataatcataataagcatgtagtcttgcttaaatagcgtgtagataaaggttaataccccggtaaccattgatgacantgatacatacttcgttatgtataagcagataaaaaaacataatagtacgaaagcaaataaaagaggttcataacataaaatcactccggcggacgtggcaacagctttcccgcctttnaatttcgcgaaaacaggaaaaatatgaccaatgacagcaaataaaccaatnaagagaatgttttgattcgtatcaaataaaagcggtaaagaagctgctagggttccttttagaatgtctccaagcgtaacgataattccggcttttacncccaatgtacgaaangagttggtgccgcctaaattgccgcttccatgctctcgtatatcgatgccgtatcctagttttccaacaactagtccaaaaggaatagagcccaagatataggcaagaataggtaataaataattcatgtttgaaagctcctttatttctatatcgtttctattttaccatgagatacttaaaaaaacatagctagttttgggtgagagacaattatttnaaaaaaagaagacgtttacaaaaatagagaaaacgggtactatatgcaggaaatcaactgtaaatcgcgaatgttgttcagtacatattatatagctaagagaggtaatagacatgtccattaaaattccttcccgtcaagagcttggtaaaatattaaaaaaaagcaagcgcattgctgtagtaggtttatcagataaccctcatcgaacgtcttatatggtttcagaagccatgcagcagcaaggttacgagattattccggtgaacccgacaatcaactcagcgctcggcgtaaaagcngtatcttcattaaaagaaattgaagggcatattgatatcgttaatgtatttcgtcgctctgagcatttgcttgaagttgcagaagagtttttagaagtagangcagacgtattttgggcacaatctggtttaattaatgaagaagcatatgacctgctcgctaaaaaagggtatactgtagttatggatcgttgtataaaagttgagcatgctttaacaaagtaagatctataagcagaacaaccaacccatgcacactgcttgcatgggtttcaccatgcgttgaaatagtaagagcgtttccgctacaatagacgttagacagctagctttataatgcttataatccatgaatacacaagatattgcttttataatacggaaatttgtgctaaaatcttgtaagtacgcaaaaatagaaacatacgttctgttgatgcgaacactataaaattaaaagataggatacatgatcatttattcttagacacgaagcgcaaacgtttgtgtttcatacataatgtagtaatgttcgttgtgatgaaaggggtagtatgaatggctcggaaacaacaatttaattataatgaagatgcaattcaagtactagaaggattagatgccgttcgtaaacgtcctggtatgtatattggaagtacggatacacgaggtctgcatcatttagtatatgaaatcgtcgacaactctgtngatgaagctctagcaggctacggagaagaaattattgtaaccattcacaaagataattcaatttctgtacaagataaaggtcgaggtatgccaacgggcatgcataaantaggaaaaccaacgcctgaagttattttaaccatcttgcatgcaggaggtaaattcggacagggtggatataaaacaagcggaggcttacacggagtaggtgcatctgttgtaaatgcgctgtctgaatggttgactgtaaccattcatagagatggatttatttatgaacag

SEQ ID NO: 505 - DNA, 4000 bp, Escherichia coli
  misc_feature (1)..(9): n is a, c, g, or t
  misc_feature (12)..(16): n is a, c, g, or t
  misc_feature (18)..(28): n is a, c, g, or t
  misc_feature (30)..(37): n is a, c, g, or t
  misc_feature (39)..(54): n is a, c, g, or t
  misc_feature (56)..(85): n is a, c, g, or t
  misc_feature (87)..(101): n is a, c, g, or t
  misc_feature (103)..(104): n is a, c, g, or t
  misc_feature (106)..(110): n is a, c, g, or t
  misc_feature (112)..(147): n is a, c, g, or t
  misc_feature (149)..(156): n is a, c, g, or t
  misc_feature (159)..(159): n is a, c, g, or t
  misc_feature (162)..(173): n is a, c, g, or t
  misc_feature (175)..(186): n is a, c, g, or t
  misc_feature (189)..(228): n is a, c, g, or t
  misc_feature (231)..(235): n is a, c, g, or t
  misc_feature (237)..(244): n is a, c, g, or t
  misc_feature (246)..(265): n is a, c, g, or t
  misc_feature (267)..(280): n is a, c, g, or t
  misc_feature (282)..(283): n is a, c, g, or t
  misc_feature (285)..(299): n is a, c, g, or t
  misc_feature (302)..(305): n is a, c, g, or t
  misc_feature (307)..(313): n is a, c, g, or t
  misc_feature (315)..(322): n is a, c, g, or t
  misc_feature (324)..(339): n is a, c, g, or t
  misc_feature (341)..(342): n is a, c, g, or t
  misc_feature (344)..(360): n is a, c, g, or t
  misc_feature (362)..(378): n is a, c, g, or t
  misc_feature (380)..(384): n is a, c, g, or t
  misc_feature (386)..(391): n is a, c, g, or t
  misc_feature (393)..(402): n is a, c, g, or t
  misc_feature (404)..(408): n is a, c, g, or t
  misc_feature (410)..(421): n is a, c, g, or t
  misc_feature (423)..(435): n is a, c, g, or t
  misc_feature (437)..(437): n is a, c, g, or t
  misc_feature (439)..(454): n is a, c, g, or t
  misc_feature (456)..(459): n is a, c, g, or t
  misc_feature (461)..(466): n is a, c, g, or t
  misc_feature (468)..(474): n is a, c, g, or t
  misc_feature (476)..(480): n is a, c, g, or t
  misc_feature (483)..(488): n is a, c, g, or t
  misc_feature (490)..(504): n is a, c, g, or t
  misc_feature (506)..(520): n is a, c, g, or t
  misc_feature (523)..(525): n is a, c, g, or t
  misc_feature (527)..(553): n is a, c, g, or t
  misc_feature (555)..(560): n is a, c, g, or t
  misc_feature (562)..(576): n is a, c, g, or t
  misc_feature (578)..(606): n is a, c, g, or t
  misc_feature (608)..(618): n is a, c, g, or t
  misc_feature (620)..(630): n is a, c, g, or t
  misc_feature (632)..(673): n is a, c, g, or t
  misc_feature (675)..(675): n is a, c, g, or t
  misc_feature (677)..(680): n is a, c, g, or t
  misc_feature (682)..(689): n is a, c, g, or t
  misc_feature (691)..(711): n is a, c, g, or t
  misc_feature (713)..(715): n is a, c, g, or t
  misc_feature (717)..(717): n is a, c, g, or t
  misc_feature (719)..(720): n is a, c, g, or t
  misc_feature (722)..(738): n is a, c, g, or t
  misc_feature (740)..(747): n is a, c, g, or t
  misc_feature (749)..(753): n is a, c, g, or t
  misc_feature (755)..(793): n is a, c, g, or t
  misc_feature (795)..(813): n is a, c, g, or t
  misc_feature (815)..(820): n is a, c, g, or t
  misc_feature (822)..(823): n is a, c, g, or t
  misc_feature (826)..(838): n is a, c, g, or t
  misc_feature (841)..(842): n is a, c, g, or t
  misc_feature (845)..(846): n is a, c, g, or t
  misc_feature (848)..(855): n is a, c, g, or t
  misc_feature (857)..(860): n is a, c, g, or t
  misc_feature (862)..(890): n is a, c, g, or t
  misc_feature (893)..(910): n is a, c, g, or t
  misc_feature (912)..(915): n is a, c, g, or t
  misc_feature (919)..(920): n is a, c, g, or t
  misc_feature (922)..(924): n is a, c, g, or t
  misc_feature (927)..(938): n is a, c, g, or t
  misc_feature (940)..(941): n is a, c, g, or t
  misc_feature (944)..(945): n is a, c, g, or t
  misc_feature (947)..(955): n is a, c, g, or t
  misc_feature (957)..(957): n is a, c, g, or t
  misc_feature (960)..(965): n is a, c, g, or t
  misc_feature (967)..(974): n is a, c, g, or t
  misc_feature (977)..(988): n is a, c, g, or t
  misc_feature (990)..(999): n is a, c, g, or t
  misc_feature (1001)..(1015): n is a, c, g, or t
  misc_feature (1017)..(1022): n is a, c, g, or t
  misc_feature (1025)..(1025): n is a, c, g, or t
  misc_feature (1027)..(1038): n is a, c, g, or t
  misc_feature (1040)..(1049): n is a, c, g, or t
  misc_feature (1051)..(1052): n is a, c, g, or t
  misc_feature (1054)..(1057): n is a, c, g, or t
  misc_feature (1061)..(1066): n is a, c, g, or t
  misc_feature (1068)..(1072): n is a, c, g, or t
  misc_feature (1074)..(1078): n is a, c, g, or t
  misc_feature (1080)..(1080): n is a, c, g, or t
  misc_feature (1082)..(1095): n is a, c, g, or t
  misc_feature (1097)..(1099): n is a, c, g, or t
  misc_feature (1102)..(1105): n is a, c, g, or t
  misc_feature (1107)..(1107): n is a, c, g, or t
  misc_feature (1109)..(1114): n is a, c, g, or t
  misc_feature (1117)..(1129): n is a, c, g, or t
  misc_feature (1131)..(1138): n is a, c, g, or t
  misc_feature (1140)..(1140): n is a, c, g, or t
  misc_feature (1146)..(1149): n is a, c, g, or t
  misc_feature (1151)..(1160): n is a, c, g, or t
  misc_feature (1162)..(1163): n is a, c, g, or t
  misc_feature (1166)..(1170): n is a, c, g, or t
  misc_feature (1172)..(1175): n is a, c, g, or t
  misc_feature (1179)..(1181): n is a, c, g, or t
  misc_feature (1186)..(1190): n is a, c, g, or t
  misc_feature (1192)..(1196): n is a, c, g, or t
  misc_feature (1198)..(1199): n is a, c, g, or t
  misc_feature (1201)..(1202): n is a, c, g, or t
  misc_feature (1205)..(1205): n is a, c, g, or t
  misc_feature (1207)..(1210): n is a, c, g, or t
  misc_feature (1213)..(1222): n is a, c, g, or t
  misc_feature (1228)..(1231): n is a, c, g, or t
  misc_feature (1233)..(1236): n is a, c, g, or t
  misc_feature (1239)..(1246): n is a, c, g, or t
  misc_feature (1248)..(1252): n is a, c, g, or t
  misc_feature (1254)..(1255): n is a, c, g, or t
  misc_feature (1257)..(1257): n is a, c, g, or t
  misc_feature (1259)..(1259): n is a, c, g, or t
  misc_feature (1262)..(1264): n is a, c, g, or t
  misc_feature (1269)..(1271): n is a, c, g, or t
  misc_feature (1274)..(1277): n is a, c, g, or t
  misc_feature (1280)..(1280): n is a, c, g, or t
  misc_feature (1284)..(1284): n is a, c, g, or t
  misc_feature (1287)..(1287): n is a, c, g, or t
  misc_feature (1289)..(1289): n is a, c, g, or t
  misc_feature (1291)..(1292): n is a, c, g, or t
  misc_feature (1295)..(1295): n is a, c, g, or t
  misc_feature (1299)..(1299): n is a, c, g, or t
  misc_feature (1302)..(1304): n is a, c, g, or t
  misc_feature (1311)..(1311): n is a, c, g, or t
  misc_feature (1317)..(1318): n is a, c, g, or t
  misc_feature (1321)..(1321): n is a, c, g, or t
  misc_feature (1323)..(1326): n is a, c, g, or t
  misc_feature (1328)..(1328): n is a, c, g, or t
  misc_feature (1333)..(1333): n is a, c, g, or t
  misc_feature (1341)..(1341): n is a, c, g, or t
  misc_feature (1345)..(1345): n is a, c, g, or t
  misc_feature (1347)..(1347): n is a, c, g, or t
  misc_feature (1350)..(1350): n is a, c, g, or t
  misc_feature (1352)..(1353): n is a, c, g, or t
  misc_feature (1362)..(1362): n is a, c, g, or t
  misc_feature (1374)..(1374): n is a, c, g, or t
  misc_feature (1381)..(1381): n is a, c, g, or t
  misc_feature (1386)..(1386): n is a, c, g, or t
  misc_feature (1393)..(1393): n is a, c, g, or t
  misc_feature (1398)..(1398): n is a, c, g, or t
  misc_feature (1400)..(1400): n is a, c, g, or t
  misc_feature (1402)..(1403): n is a, c, g, or t
  misc_feature (1405)..(1405): n is a, c, g, or t
  misc_feature (1415)..(1415): n is a, c, g, or t
  misc_feature (1424)..(1424): n is a, c, g, or t
  misc_feature (1426)..(1435): n is a, c, g, or t
  misc_feature (1439)..(1439): n is a, c, g, or t
  misc_feature (1442)..(1442): n is a, c, g, or t
  misc_feature (1446)..(1446): n is a, c, g, or t
  misc_feature (1448)..(1449): n is a, c, g, or t
  misc_feature (1451)..(1451): n is a, c, g, or t
  misc_feature (1460)..(1460): n is a, c, g, or t
  misc_feature (1462)..(1462): n is a, c, g, or t
  misc_feature (1464)..(1464): n is a, c, g, or t
  misc_feature (1474)..(1474): n is a, c, g, or t
  misc_feature (1476)..(1476): n is a, c, g, or t
  misc_feature (1480)..(1481): n is a, c, g, or t
  misc_feature (1484)..(1484): n is a, c, g, or t
  misc_feature (1486)..(1490): n is a, c, g, or t
  misc_feature (1492)..(1492): n is a, c, g, or t
  misc_feature (1497)..(1497): n is a, c, g, or t
  misc_feature (1506)..(1506): n is a, c, g, or t
  misc_feature (1508)..(1508): n is a, c, g, or t
  misc_feature (1512)..(1512): n is a, c, g, or t
  misc_feature (1516)..(1516): n is a, c, g, or t
  misc_feature (1556)..(1556): n is a, c, g, or t
  misc_feature (1561)..(1561): n is a, c, g, or t
  misc_feature (1611)..(1611): n is a, c, g, or t
  misc_feature (1619)..(1619): n is a, c, g, or t
  misc_feature (1628)..(1629): n is a, c, g, or t
  misc_feature (1660)..(1660): n is a, c, g, or t
  misc_feature (1761)..(1761): n is a, c, g, or t
  misc_feature (1763)..(1763): n is a, c, g, or t
  misc_feature (1778)..(1778): n is a, c, g, or t
  misc_feature (1782)..(1784): n is a, c, g, or t
  misc_feature (1812)..(1812): n is a, c, g, or t
  misc_feature (1983)..(1983): n is a, c, g, or t
  misc_feature (2003)..(2003): n is a, c, g, or t
  misc_feature (2006)..(2006): n is a, c, g, or t
  misc_feature (2335)..(2336): n is a, c, g, or t
  misc_feature (2339)..(2339): n is a, c, g, or t
  misc_feature (2341)..(2342): n is a, c, g, or t
  misc_feature (2344)..(2345): n is a, c, g, or t
  misc_feature (2347)..(2353): n is a, c, g, or t
  misc_feature (2355)..(2359): n is a, c, g, or t
  misc_feature (2361)..(2363): n is a, c, g, or t
  misc_feature (2366)..(2370): n is a, c, g, or t
  misc_feature (2372)..(2377): n is a, c, g, or t
  misc_feature (2379)..(2381): n is a, c, g, or t
  misc_feature (2383)..(2383): n is a, c, g, or t
  misc_feature (2387)..(2403): n is a, c, g, or t
  misc_feature (2407)..(2407): n is a, c, g, or t
  misc_feature (2409)..(2410): n is a, c, g, or t
  misc_feature (2413)..(2420): n is a, c, g, or t
  misc_feature (2422)..(2432): n is a, c, g, or t
  misc_feature (2434)..(2441): n is a, c, g, or t
  misc_feature (2443)..(2445): n is a, c, g, or t
  misc_feature (2447)..(2451): n is a, c, g, or t
  misc_feature (2453)..(2459): n is a, c, g, or t
  misc_feature (2461)..(2461): n is a, c, g, or t
  misc_feature (2463)..(2477): n is a, c, g, or t
  misc_feature (2479)..(2485): n is a, c, g, or t
  misc_feature (2487)..(2488): n is a, c, g, or t
  misc_feature (2491)..(2493): n is a, c, g, or t
  misc_feature (2495)..(2497): n is a, c, g, or t
  misc_feature (2499)..(2499): n is a, c, g, or t
  misc_feature (2502)..(2507): n is a, c, g, or t
  misc_feature (2509)..(2518): n is a, c, g, or t
  misc_feature (2522)..(2522): n is a, c, g, or t
  misc_feature (2524)..(2524): n is a, c, g, or t
  misc_feature (2526)..(2526): n is a, c, g, or t
  misc_feature (2529)..(2530): n is a, c, g, or t
  misc_feature (2532)..(2535): n is a, c, g, or t
  misc_feature (2538)..(2539): n is a, c, g, or t
  misc_feature (2541)..(2541): n is a, c, g, or t
  misc_feature (2543)..(2546): n is a, c, g, or t
  misc_feature (2548)..(2559): n is a, c, g, or t
  misc_feature (2561)..(2562): n is a, c, g, or t
  misc_feature (2565)..(2575): n is a, c, g, or t
  misc_feature (2577)..(2582): n is a, c, g, or t
  misc_feature (2586)..(2588): n is a, c, g, or t
  misc_feature (2590)..(2593): n is a, c, g, or t
  misc_feature (2595)..(2604): n is a, c, g, or t
  misc_feature (2608)..(2610): n is a, c, g, or t
  misc_feature (2612)..(2616): n is a, c, g, or t
  misc_feature (2618)..(2620): n is a, c, g, or t
  misc_feature (2622)..(2622): n is a, c, g, or t
  misc_feature (2624)..(2625): n is a, c, g, or t
  misc_feature (2627)..(2630): n is a, c, g, or t
  misc_feature (2632)..(2632): n is a, c, g, or t
  misc_feature (2634)..(2634): n is a, c, g, or t
  misc_feature (2636)..(2643): n is a, c, g, or t
  misc_feature (2645)..(2645): n is a, c, g, or t
  misc_feature (2647)..(2649): n is a, c, g, or t
  misc_feature (2651)..(2651): n is a, c, g, or t
  misc_feature (2653)..(2656): n is a, c, g, or t
  misc_feature (2658)..(2658): n is a, c, g, or t
  misc_feature (2660)..(2663): n is a, c, g, or t
  misc_feature (2666)..(2681): n is a, c, g, or t
  misc_feature (2683)..(2687): n is a, c, g, or t
  misc_feature (2689)..(2691): n is a, c, g, or t
  misc_feature (2693)..(2700): n is a, c, g, or t
  misc_feature (2702)..(2707): n is a, c, g, or t
  misc_feature (2709)..(2718): n is a, c, g, or t
  misc_feature (2720)..(2721): n is a, c, g, or t
  misc_feature (2724)..(2725): n is a, c, g, or t
  misc_feature (2727)..(2728): n is a, c, g, or t
  misc_feature (2730)..(2738): n is a, c, g, or t
  misc_feature (2741)..(2744): n is a, c, g, or t
  misc_feature (2746)..(2750): n is a, c, g, or t
  misc_feature (2752)..(2755): n is a, c, g, or t
  misc_feature (2758)..(2759): n is a, c, g, or t
  misc_feature (2761)..(2766): n is a, c, g, or t
  misc_feature (2768)..(2774): n is a, c, g, or t
  misc_feature (2776)..(2781): n is a, c, g, or t
  misc_feature (2783)..(2798): n is a, c, g, or t
  misc_feature (2800)..(2804): n is a, c, g, or t
  misc_feature (2806)..(2810): n is a, c, g, or t
  misc_feature (2813)..(2816): n is a, c, g, or t
  misc_feature (2818)..(2820): n is a, c, g, or t
  misc_feature (2822)..(2828): n is a, c, g, or t
  misc_feature (2830)..(2831): n is a, c, g, or t
  misc_feature (2834)..(2837): n is a, c, g, or t
  misc_feature (2839)..(2841): n is a, c, g, or t
  misc_feature (2843)..(2851): n is a, c, g, or t
  misc_feature (2853)..(2857): n is a, c, g, or t
  misc_feature (2859)..(2859): n is a, c, g, or t
  misc_feature (2861)..(2862): n is a, c, g, or t
  misc_feature (2865)..(2875): n is a, c, g, or t
  misc_feature (2877)..(2880): n is a, c, g, or t
  misc_feature (2882)..(2883): n is a, c, g, or t
  misc_feature (2885)..(2885): n is a, c, g, or t
  misc_feature (2888)..(2890): n is a, c, g, or t
  misc_feature (2894)..(2896): n is a, c, g, or t
  misc_feature (2898)..(2901): n is a, c, g, or t
  misc_feature (2904)..(2904): n is a, c, g, or t
  misc_feature (2906)..(2906): n is a, c, g, or t
  misc_feature (2909)..(2909): n is a, c, g, or t
  misc_feature (2912)..(2915): n is a, c, g, or t
  misc_feature (2917)..(2917): n is a, c, g, or t
  misc_feature (2919)..(2919): n is a, c, g, or t
  misc_feature (2921)..(2931): n is a, c, g, or t
  misc_feature (2933)..(2933): n is a, c, g, or t
  misc_feature (2935)..(2936): n is a, c, g, or t
  misc_feature (2938)..(2942): n is a, c, g, or t
  misc_feature (2944)..(2951): n is a, c, g, or t
  misc_feature (2953)..(2957): n is a, c, g, or t
  misc_feature (2959)..(2963): n is a, c, g, or t
  misc_feature (2965)..(2973): n is a, c, g, or t
  misc_feature (2975)..(2978): n is a, c, g, or t
  misc_feature (2980)..(2980): n is a, c, g, or t
  misc_feature (2982)..(2987): n is a, c, g, or t
  misc_feature (2989)..(2996): n is a, c, g, or t
  misc_feature (2998)..(3004): n is a, c, g, or t
  misc_feature (3006)..(3009): n is a, c, g, or t
  misc_feature (3011)..(3012): n is a, c, g, or t
  misc_feature (3014)..(3015): n is a, c, g, or t
  misc_feature (3017)..(3031): n is a, c, g, or t
  misc_feature (3033)..(3035): n is a, c, g, or t
  misc_feature (3037)..(3039): n is a, c, g, or t
  misc_feature (3041)..(3041): n is a, c, g, or t
  misc_feature (3043)..(3043): n is a, c, g, or t
  misc_feature (3045)..(3047): n is a, c, g, or t
  misc_feature (3049)..(3050): n is a, c, g, or t
  misc_feature (3052)..(3057): n is a, c, g, or t
  misc_feature (3059)..(3062): n is a, c, g, or t
  misc_feature (3064)..(3067): n is a, c, g, or t
  misc_feature (3069)..(3075): n is a, c, g, or t
  misc_feature (3077)..(3081): n is a, c, g, or t
  misc_feature (3083)..(3084): n is a, c, g, or t
  misc_feature (3086)..(3087): n is a, c, g, or t
  misc_feature (3090)..(3090): n is a, c, g, or t
  misc_feature (3092)..(3103): n is a, c, g, or t
  misc_feature (3106)..(3107): n is a, c, g, or t
  misc_feature (3109)..(3109): n is a, c, g, or t
  misc_feature (3111)..(3115): n is a, c, g, or t
  misc_feature (3117)..(3117): n is a, c, g, or t
  misc_feature (3119)..(3127): n is a, c, g, or t
  misc_feature (3129)..(3131): n is a, c, g, or t
  misc_feature (3133)..(3134): n is a, c, g, or t
  misc_feature (3136)..(3143): n is a, c, g, or t
  misc_feature (3145)..(3147): n is a, c, g, or t
  misc_feature (3149)..(3153): n is a, c, g, or t
  misc_feature (3155)..(3155): n is a, c, g, or t
  misc_feature (3157)..(3157): n is a, c, g, or t
  misc_feature (3159)..(3162): n is a, c, g, or t
  misc_feature (3164)..(3168): n is a, c, g, or t
  misc_feature (3170)..(3170): n is a, c, g, or t
  misc_feature (3172)..(3172): n is a, c, g, or t
  misc_feature (3175)..(3180): n is a, c, g, or t
  misc_feature (3183)..(3183): n is a, c, g, or t
  misc_feature (3185)..(3187): n is a, c, g, or t
  misc_feature (3189)..(3191): n is a, c, g, or t
  misc_feature (3193)..(3193): n is a, c, g, or t
  misc_feature (3196)..(3198): n is a, c, g, or t
  misc_feature (3200)..(3204): n is a, c, g, or t
  misc_feature (3206)..(3218): n is a, c, g, or t
  misc_feature (3220)..(3224): n is a, c, g, or t
  misc_feature (3226)..(3237): n is a, c, g, or t
  misc_feature (3239)..(3245): n is a, c, g, or t
  misc_feature (3248)..(3248): n is a, c, g, or t
  misc_feature (3250)..(3256): n is a, c, g, or t
  misc_feature (3259)..(3259): n is a, c, g, or t
  misc_feature (3261)..(3262): n is a, c, g, or t
  misc_feature (3264)..(3266): n is a, c, g, or t
  misc_feature (3268)..(3270): n is a, c, g, or t
  misc_feature (3272)..(3277): n is a, c, g, or t
  misc_feature (3280)..(3282): n is a, c, g, or t
  misc_feature (3284)..(3287): n is a, c, g, or t
  misc_feature (3290)..(3301): n is a, c, g, or t
  misc_feature (3304)..(3314): n is a, c, g, or t
  misc_feature (3316)..(3316): n is a, c, g, or t
  misc_feature (3318)..(3318): n is a, c, g, or t
  misc_feature (3320)..(3322): n is a, c, g, or t
  misc_feature (3324)..(3324): n is a, c, g, or t
  misc_feature (3326)..(3328): n is a, c, g, or t
  misc_feature (3331)..(3339): n is a, c, g, or t
  misc_feature (3342)..(3342): n is a, c, g, or t
  misc_feature (3344)..(3347): n is a, c, g, or t
  misc_feature (3349)..(3354): n is a, c, g, or t
  misc_feature (3356)..(3356): n is a, c, g, or t
  misc_feature (3358)..(3358): n is a, c, g, or t
  misc_feature (3360)..(3370): n is a, c, g, or t
  misc_feature (3373)..(3375): n is a, c, g, or t
  misc_feature (3378)..(3378): n is a, c, g, or t
  misc_feature (3380)..(3385): n is a, c, g, or t
  misc_feature (3388)..(3388): n is a, c, g, or t
  misc_feature (3390)..(3396): n is a, c, g, or t
  misc_feature (3398)..(3401): n is a, c, g, or t
  misc_feature (3404)..(3406): n is a, c, g, or t
  misc_feature (3408)..(3408): n is a, c, g, or t
  misc_feature (3410)..(3411): n is a, c, g, or t
  misc_feature (3413)..(3419): n is a, c, g, or t
  misc_feature (3421)..(3427): n is a, c, g, or t
  misc_feature (3429)..(3429): n is a, c, g, or t
  misc_feature (3431)..(3432): n is a, c, g, or t
  misc_feature (3436)..(3437): n is a, c, g, or t
  misc_feature (3442)..(3448): n is a, c, g, or t
  misc_feature (3450)..(3451): n is a, c, g, or t
  misc_feature (3453)..(3453): n is a, c, g, or t
  misc_feature (3455)..(3456): n is a, c, g, or t
  misc_feature (3458)..(3458): n is a, c, g, or t
  misc_feature (3460)..(3464): n is a, c, g, or t
  misc_feature (3466)..(3469): n is a, c, g, or t
  misc_feature (3471)..(3481): n is a, c, g, or t
  misc_feature (3483)..(3485): n is a, c, g, or t
  misc_feature (3488)..(3494): n is a, c, g, or t
  misc_feature (3496)..(3497): n is a, c, g, or t
  misc_feature (3499)..(3501): n is a, c, g, or t
  misc_feature (3503)..(3509): n is a, c, g, or t
  misc_feature (3511)..(3513): n is a, c, g, or t
  misc_feature (3515)..(3516): n is a, c, g, or t
  misc_feature (3519)..(3521): n is a, c, g, or t
  misc_feature (3523)..(3524): n is a, c, g, or t
  misc_feature (3527)..(3527): n is a, c, g, or t
  misc_feature (3529)..(3533): n is a, c, g, or t
  misc_feature (3536)..(3536): n is a, c, g, or t
  misc_feature (3538)..(3543): n is a, c, g, or t
  misc_feature (3545)..(3546): n is a, c, g, or t
  misc_feature (3548)..(3551): n is a, c, g, or t
  misc_feature (3553)..(3567): n is a, c, g, or t
  misc_feature (3569)..(3569): n is a, c, g, or t
  misc_feature (3571)..(3580): n is a, c, g, or t
  misc_feature (3583)..(3590): n is a, c, g, or t
  misc_feature (3592)..(3593): n is a, c, g, or t
  misc_feature (3595)..(3595): n is a, c, g, or t
  misc_feature (3597)..(3602): n is a, c, g, or t
  misc_feature (3604)..(3611): n is a, c, g, or t
  misc_feature (3613)..(3613): n is a, c, g, or t
  misc_feature (3615)..(3617): n is a, c, g, or t
  misc_feature (3619)..(3627): n is a, c, g, or t
  misc_feature (3629)..(3632): n is a, c, g, or t
  misc_feature (3634)..(3635): n is a, c, g, or t
  misc_feature (3638)..(3648): n is a, c, g, or t
  misc_feature (3650)..(3653): n is a, c, g, or t
  misc_feature (3655)..(3655): n is a, c, g, or t
  misc_feature (3657)..(3659): n is a, c, g, or t
  misc_feature (3661)..(3662): n is a, c, g, or t
  misc_feature (3664)..(3664): n is a, c, g, or t
  misc_feature (3666)..(3666): n is a, c, g, or t
  misc_feature (3669)..(3673): n is a, c, g, or t
  misc_feature (3675)..(3680): n is a, c, g, or t
  misc_feature (3682)..(3683): n is a, c, g, or t
  misc_feature (3687)..(3690): n is a, c, g, or t
  misc_feature (3692)..(3692): n is a, c, g, or t
  misc_feature (3695)..(3695): n is a, c, g, or t
  misc_feature (3698)..(3702): n is a, c, g, or t
  misc_feature (3704)..(3706): n is a, c, g, or t
  misc_feature (3709)..(3711): n is a, c, g, or t
  misc_feature (3713)..(3714): n is a, c, g, or t
  misc_feature (3716)..(3718): n is a, c, g, or t
  misc_feature (3720)..(3725): n is a, c, g, or t
  misc_feature (3727)..(3734): n is a, c, g, or t
  misc_feature (3736)..(3740): n is a, c, g, or t
  misc_feature (3742)..(3753): n is a, c, g, or t
  misc_feature (3755)..(3756): n is a, c, g, or t
  misc_feature (3759)..(3770): n is a, c, g, or t
  misc_feature (3773)..(3779): n is a, c, g, or t
  misc_feature (3781)..(3787): n is a, c, g, or t
  misc_feature (3789)..(3791): n is a, c, g, or t
  misc_feature (3793)..(3799): n is a, c, g, or t
  misc_feature (3801)..(3801): n is a, c, g, or t
  misc_feature (3803)..(3804): n is a, c, g, or t
  misc_feature (3806)..(3812): n is a, c, g, or t
  misc_feature (3815)..(3818): n is a, c, g, or t
  misc_feature (3820)..(3820): n is a, c, g, or t
  misc_feature (3822)..(3829): n is a, c, g, or t
  misc_feature (3832)..(3833): n is a, c, g, or t
  misc_feature (3835)..(3837): n is a, c, g, or t
  misc_feature (3840)..(3843): n is a, c, g, or t
  misc_feature (3846)..(3849): n is a, c, g, or t
  misc_feature (3851)..(3851): n is a, c, g, or t
  misc_feature (3854)..(3858): n is a, c, g, or t
  misc_feature (3861)..(3866): n is a, c, g, or t
  misc_feature (3868)..(3878): n is a, c, g, or t
  misc_feature (3880)..(3883): n is a, c, g, or t
  misc_feature (3885)..(3887): n is a, c, g, or t
  misc_feature (3889)..(3890): n is a, c, g, or t
  misc_feature (3892)..(3900): n is a, c, g, or t
  misc_feature (3902)..(3902): n is a, c, g, or t
  misc_feature (3904)..(3906): n is a, c, g, or t
  misc_feature (3908)..(3914): n is a, c, g, or t
  misc_feature (3918)..(3921): n is a, c, g, or t
  misc_feature (3923)..(3923): n is a, c, g, or t
  misc_feature (3925)..(3933): n is a, c, g, or t
  misc_feature (3935)..(3935): n is a, c, g, or t
  misc_feature (3937)..(3940): n is a, c, g, or t
  misc_feature (3942)..(3942): n is a, c, g, or t
  misc_feature (3944)..(3944): n is a, c, g, or t
  misc_feature (3947)..(3957): n is a, c, g, or t
  misc_feature (3959)..(3960): n is a, c, g, or t
  misc_feature (3962)..(3967): n is a, c, g, or t
  misc_feature (3970)..(3972): n is a, c, g, or t
  misc_feature (3974)..(3974): n is a, c, g, or t
  misc_feature (3977)..(3983): n is a, c, g, or t
  misc_feature (3985)..(3988): n is a, c, g, or t
  misc_feature (3990)..(3990): n is a, c, g, or t
  misc_feature (3992)..(3992): n is a, c, g, or t
  misc_feature (3994)..(3995): n is a, c, g, or t
  misc_feature (3997)..(4000): n is a, c, g, or t
nnnnnnnnngcnnnnngnnnnnnnnnnncnnnnnnnngnnnnnnnnnnnnnnnncnnnnnnnnnnnnnnnnnnnnnnnnnnnnnngnnnnnnnnnnnnnnngnngnnnnngnnnnnnnnnnnnnnnnnnnnnnnnnnnnnnnnnnnncnnnnnnnncgnggnnnnnnnnnnnntnnnnnnnnnnnnccnnnnnnnnnnnnnnnnnnnnnnnnnnnnnnnnnnnnnnnnccnnnnncnnnnnnnncnnnnnnnnnnnnnnnnnnnnannnnnnnnnnnnnncnncnnnnnnnnnnnnnnnccnnnnannnnnnncnnnnnnnncnnnnnnnnnnnnnnnncnncnnnnnnnnnnnnnnnnncnnnnnnnnnnnnnnnnncnnnnntnnnnnncnnnnnnnnnncnnnnngnnnnnnnnnnnncnnnnnnnnnnnnntngnnnnnnnnnnnnnnnncnnnncnnnnnngnnnnnnncnnnnnccnnnnnncnnnnnnnnnnnnnnncnnnnnnnnnnnnnnnccnnncnnnnnnnnnnnnnnnnnnnnnnnnnnntnnnnnntnnnnnnnnnnnnnnnannnnnnnnnnnnnnnnnnnnnnnnnnnnncnnnnnnnnnnntnnnnnnnnnnncnnnnnnnnnnnnnnnnnnnnnnnnnnnnnnnnnnnnnnnnnncntnnnntnnnnnnnnannnnnnnnnnnnnnnnnnnnntnnncncnntnnnnnnnnnnnnnnnnntnnnnnnnngnnnnntnnnnnnnnnnnnnnnnnnnnnnnnnnnnnnnnnnnnnnntnnnnnnnnnnnnnnnnnnntnnnnnntnntcnnnnnnnnnnnnntgnnttnnannnnnnnnannnntnnnnnnnnnnnnnnnnnnnnnnnnnnnnnaannnnnnnnnnnnnnnnnngnnnntttnntnnnctnnnnnnnnnnnntnncanntnnnnnnnnncnttnnnnnncnnnnnnnnttnnnnnnnnnnnnannnnnnnnnntnnnnnnnnnnnnnnntnnnnnnccncnnnnnnnnnnnntnnnnnnnnnnannannnntttnnnnnncnnnnnannnnncncnnnnnnnnnnnnnnannnttnnnntncnnnnnnagnnnnnnnnnnnnntnnnnnnnntntttttnnnntnnnnnnnnnntnntannnnntnnnnaaannnttttnnnnntnnnnnannannttnannnnctnnnnnnnnnntttttnnnntnnnnaannnnnnnnannnnntnngnanatnnnttttnnnttnnnnaanaacnttnanannctntgangannnttttttncttgannaanannnntnatagnctatgaanatcntnttncnnttgtagaanaactttcatagnctatgangatcnttttttncttgntnannanccctcatagnctatgaaantnnnnnnnnnnttgnatnaggncnntnatagcctangngnatcatttttnanttgnngantnnnnntnatagnctatgaaantngtanttcncttgtagaagaacttttatagcctatgatgattagttgtngagcnaaaaagttccctcataaggcgcactgccctttcgacgaaaggcgaagtgntgacacancacatgatnncccctttgacaaaaaacgaagccccgtcgcncagtgcgacagggcttcgacggaaacgaattgaatacaaagacagtcgagatcactccttttcgagaaaatccgattcctcgcactgaaataccaccacgntncggcaatacaagtgngggnnncaggcaaaaaaaatggccttgcggccanttctcatcttttgtcggtagcgagacccgggattgaaccggggacctcatgattatgaatcatgcgctctaaccagctgagctatctcgcctcttgtttcaaaaagacgccgcaaagatagacgtaggtttgacatacaaaagcaccgacctctttttttggtcctatcgnccctgcgtgaagtgataggngcnaaacgtcacggtgcgttttttcttcacagatccttgccggtcttcattctcgttttatatttgcgacacgataacgcaagagagcgatcacaacaccgagttaagccgcacttgttcgattgggaaactcatcataaatatcagaattccgagacacgctcttggcaccaatggcgggctgcaaccttcgggtttgcctctcgaggcacagcagattacaacgatgtcaatggcactcaaatcttgtcattcggagtttgttcaattccacagtgcggctttcatacgagagagaggtgacttttcaacgagtcgcctctctttttttnnccntnngnntnnnnnnngnnnnngnnnaannnnnannnnnngnnncntccnnnnnnnnnnnnnnnnnaaancnnaannnnnnnngnnnnnnnnnnnannnnnnnncnnntnnnnngnnnnnnngncnnnnnnnnnnnnnnntnnnnnnnannaannntnnncnggnnnnnngnnnnnnnnnnaaancnanccnntnnnnttnncnannnngnnnnnnnnnnnntnnccnnnnnnnnnnntnnnnnngggnnnannnncnnnnnnnnnngggnnntnnnnntnnnangnngnnnngncnannnnnnnntncnnnangnnnncntnnnnggnnnnnnnnnnnnnnnngnnnnngnnncnnnnnnnngnnnnnncnnnnnnnnnnannccnnanncnnnnnnnnnggnnnngnnnnngnnnnggnncnnnnnncnnnnnnncnnnnnnannnnnnnnnnnnnnnngnnnnngnnnnnggnnnngnnntnnnnnnngnnggnnnngnnnannnnnnnnntnnnnngntnnccnnnnnnnnnnncnnnnannanggnnntttnnncnnnnttngnaanggnnnngncnannnnnnnnnnnancnncnnnnngnnnnnnnncnnnnngnnnnngnnnnnnnnnannnngncnnnnnncnnnnnnnngnnnnnnntnnnnanncnngnnnnnnnnnnnnnnncnnngnnnangncnnnanncnnnnnnannnngnnnngnnnnnnngnnnnngnntnnggntnnnnnnnnnnnncanntngnnnnnangnnnnnnnnncnnncnncnnnnnnnngnnnannnnnantngnnnnannnnngntnggnnnnnnttngnnncnnncnttnnngnnnnngnnnnnnnnnnnnngnnnnncnnnnnnnnnnnntnnnnnnnctngnnnnnnnttngnngnnngnnnannnnnnttnnngnnnnggnnnnnnnnnnnnggnnnnnnnnnnngncngnnncnannnggnnnnnnnnnccnannnntnnnnnngncntnnnnnnnnnnnttnnnccngnnnnnnttncnnnnnnngnnnnccnnncntnnannnnnnngnnnnnnncnanngggnnttttnnnnnnnanngnannancnnnnngnnnngnnnnnnnnnnncnnnccnnnnnnncnncnnnannnnnnntnnnannggnnngnnggncnnnnnggnannnnnntnnannnngnnnnnnnnnnnnnnngnannnnnnnnnnggnnnnnnnngnngnannnnnncnnnnnnnngnannncnnnnnnnnnannnngnnaannnnnnnnnnnannnncntnnngnntncnaannnnntnnnnnntnncccnnnntnggnggnnnnntnnnccnnngnngnnnannnnnncnnnnnnnncnnnnngnnnnnnnnnnnnannccnnnnnnnnnnnnccnnnnnnngnnnnnnncnnngnnnnnnngnanngnnnnnnnttnnnngnannnnnnnngannannnccnnnnggnnnntnggnnnnnggnnnnnntnnnnnnnnnnncnnnncnnntnncnnnnnnnnngncnnncnnnnnnngggnnnnancnnnnnnnnnancnnnngntnccnnnnnnnnnnntnngnnnnnnggnnnanggnnnnnnncnnnnantngnntnnnn

SEQ ID NO: 506 - DNA, 4000 bp, Escherichia coli
  misc_feature (2204)..(2204): n is a, c, g, or t
  misc_feature (2492)..(2492): n is a, c, g, or t
  misc_feature (2796)..(2797): n is a, c, g, or t
  misc_feature (2800)..(2800): n is a, c, g, or t
  misc_feature (2805)..(2805): n is a, c, g, or t
  misc_feature (2810)..(2810): n is a, c, g, or t
  misc_feature (2812)..(2812): n is a, c, g, or t
  misc_feature (2820)..(2820): n is a, c, g, or t
  misc_feature (2829)..(2829): n is a, c, g, or t
aaattcttcgactccaaaccgccgatcctgttcatcgacgaaatccaccgcttcaacaagtcgcagcaggactcgctgctgggtgctgtcgagcagggcgtggtgacgctgatcggagctacgaccgaaaatccctcgttcgaggtgatctcaccgctgttgagccgctgccaggtctatatcctccagccgatgaccgacggggaactgcaaacccttttagaccgggctctggccaccgatccggagctcaaaacccgggagatcgaggtacaggaaaccgaagcgctgttccgcttttcgggcggcgacgcccgaaagctgctcaacattctggacatcatcacgggcgccgcagacggcaaagtaacgatcaccaaccaatacgtcaccgactgtctgcagcagaacatcgccctctacgacaagaacggcgaacagcactacgacgtgatctcggcctttatcaaatcggtgcggggcagcgatcccaacgcagcgatctactacctggcccgcatgctggccggaggcgaagagccgcgcttcatcgcccgccggctggtgatcctggcctcggaagacatcggcctggccaatcccaacgccctgctgctggccaacgcctgtttcgacacggtgcacaagatcggcatgcccgaagcccgcatcacgctggccgaaaccacgatctacctggccacctcgcccaagagcaactcggcctacatggccatcaaccaggcgctctccttcgtcgaacacgatacgaccaaccggcccgtacccctgcacctgcgcaacgccccgaccaagctgatggatcaggcggggtacggcaaaggctataaatacgcccacgactacggcggattcgccgggctggagttcatgcccgaaacgctcaaaggcaagaaattctacgagccgaacacccgcaacgccgccgaagcgaagatcgccgcatgcatccgggagctgtggaaggacaaatataaataacagccggagacacaacgccttccggcattcctgaagccgactgccggacagccccgaaaatacgatcggacgacatcccgtatttcaccccggcgaacggcagcgacacaagcgaccaaaatataccgacaaacggcaaaagagcacagcgggcaatccctgaatcataaatcccgaaaccgggacggaatctatccccggaaacataaagactgccgacatgttgaaaacaggcgctatattgaatttcctggtcgcggcgggacacctcgcctgcctaccttggctctatcccgtactgtcgatctatcgcatcgacggaatcatggaaacgctggccctccgctacggggccgccattccttatctgctgaccgtcgccattgcgttcatcttcgccgtattcggcctctacggactttcgggcgccgggatcatccgccggctgccgctgctcgaaacaggtatttacaccattgccaccctcttcctgctgcgggccgtcgcgggcgttgcggaaatggccgtgacgggctgcgctcttcttgcggacagtacggcagcctttgctgccgccgtcgtcggcacgctctacctgctgggcgggcggcgtaaattcggcaggcaggaatccgaatgaaacacaaacttcgccggcagtttaccgaagaatacagagaacaacaaaatagcatgaaacgcataggactcatatccgacacccacggcacgttcgaccaaacgctcaaaacattcctcaaggacgtggacgaaatctggcacgccggggacatcggctctccggaggtcgccgaccagatcgcggcgttcaaacccctgcgggccgtctatggcaatatcgacggaggtatcatgcgacgcacctaccgtgaatttctctccttcgagtgcgaaggggtgagcgtcctgatgacccacatcggcggctatccccgccactacaccccgcaggccgtagcgcggatccaatcgctgcgcccgaaaatcttcatcgcggggcactcccacattctcaaggtcatctacgaccccgtttacgacctgcttcacctcaaccccggcgctgccggctgctacggtttccacaaggtgcgcagcgccctgcgcttcaccatcgacggcaccgacatccgcgacatggaaatcggcgaatggcctcgtcccggcgcttgataaagggncgaaatcgttcaatatgcaatatttttatttaacataatattatctgggattccgtcgttataagtctgtaattttaacaggacaaaacgtacattttcgacaagcgaggagagagcgaccgcgttcgcttttccgaacacggaaaactaaaaaaggaatccaagatgcaagctaaaatctcaaaaacgctcgaggccatcatcgcccgtacggcattcgaaacctcgaaacgcgctattacccactcactcaaggattttctcacccttgagattctgcgggaagangggtccttagcgcatcagatactcacctcccgcctcaaggactgggagattcaccaaatatgccttcgcatcgaaagcgagattcggtcggtatcggcacccgattcatcgaggcagaatcccgaagaatttttccctttatacaccagagaattacaacgattgttcgccccgatgcaccatgtttcgacggcacacgcactgctgcacatcgtgagcgacccgcacacgatcacttcgcaggtgctggccatgtaccatttcgatgcacaggcgatagcgaccgaactgcaaaagatgaccnnggnggccnatcanangacgcctncggataccnattttcggccgacacccgaactacggttcatcggcctgcgcgaacctgtccgggacactcctcctgcggaacctgccttgttggacaaattcggcaccgaccttacgtacgaagctcgcagaggccgcatcgatcccgtcgtaggacgcgagcgggagatggaacgcatcgtgcagatcctctcgcgccgcaagaagaacaacccgatcctgatcggcgaagccggcgtgggcaagagcgccatcgtcgaagggctggccctgcggatggcagcggacgaagttcccgccaccatccgcggcaaacggctctattcgctcgacgtatcgtcgctcctggccgggaccaaatacagaggtgagttcgaagaacggatgcagcgacttctcgaagaattgcgcaggaagcaggactcgatcctcttcatcgacgaaatacacaccatcgcgggcgcaggttcgacccagggaagcctcgacacggccaacattctcaaacccgccctggcgcggggcgaattgcaggtcatcggagccacgacgctggacgaatatcgcgaagatatcgagagcgatcccgcgctggaacgccgctttcagaaaatcctcgtcgaacccgcttcggaagaggaaaccctgcaaatcctgcacaacatcgcaccccattacgaacggcaccacggagtgcgctactcggacgaagcattgcgggcctgcgtcgccctgaccgggcgctacattaccgaccgcaactttccggacaaggcgatcgacgtgctggacgaagccggggcacgtattcacctgcaggacaaaggcaaaaccgaaaaaccgtcccgaaaaaccgcatcccgcgaaccggtcggcgccgcagcaggagccaaaacgcccaaaaaccgctcccgcaaaacggcggcagcggacacgacgactgtcggtggcgccgtatggactcttccgtccgatcccggcccgcccgaaatccgggccgagcatatcgagcaggttattacctccatgacgggaatcccagccgaacggctctcgggcagcgaaagcgaacgtctgcgcggccttgcggactatctttcggcccgcgtcatcggccaatgcgaagccgtcgaaaagatttcgcggtcgatccaacgctcccgggcgggactcaaggacga

SEQ ID NO: 507 - DNA, 4000 bp, Escherichia coli
  misc_feature (1)..(3): n is a, c, g, or t
  misc_feature (5)..(5): n is a, c, g, or t
  misc_feature (7)..(9): n is a, c, g, or t
  misc_feature (12)..(12): n is a, c, g, or t
  misc_feature (14)..(14): n is a, c, g, or t
  misc_feature (17)..(23): n is a, c, g, or t
  misc_feature (25)..(28): n is a, c, g, or t
  misc_feature (30)..(32): n is a, c, g, or t
  misc_feature (34)..(41): n is a, c, g, or t
  misc_feature (43)..(49): n is a, c, g, or t
  misc_feature (51)..(62): n is a, c, g, or t
  misc_feature (64)..(65): n is a, c, g, or t
  misc_feature (67)..(71): n is a, c, g, or t
  misc_feature (73)..(73): n is a, c, g, or t
  misc_feature (75)..(80): n is a, c, g, or t
  misc_feature (82)..(99): n is a, c, g, or t
  misc_feature (101)..(107): n is a, c, g, or t
  misc_feature (110)..(110): n is a, c, g, or t
  misc_feature (113)..(119): n is a, c, g, or t
  misc_feature (121)..(121): n is a, c, g, or t
  misc_feature (124)..(126): n is a, c, g, or t
  misc_feature (129)..(129): n is a, c, g, or t
  misc_feature (135)..(135): n is a, c, g, or t
  misc_feature (137)..(148): n is a, c, g, or t
  misc_feature (151)..(153): n is a, c, g, or t
  misc_feature (157)..(158): n is a, c, g, or t
  misc_feature (161)..(162): n is a, c, g, or t
  misc_feature (164)..(164): n is a, c, g, or t
  misc_feature (166)..(168): n is a, c, g, or t
  misc_feature (170)..(170): n is a, c, g, or t
  misc_feature (172)..(178): n is a, c, g, or t
  misc_feature (180)..(181): n is a, c, g, or t
  misc_feature (183)..(183): n is a, c, g, or t
  misc_feature (185)..(185): n is a, c, g, or t
  misc_feature (188)..(200): n is a, c, g, or t
  misc_feature (202)..(212): n is a, c, g, or t
  misc_feature (215)..(217): n is a, c, g, or t
  misc_feature (220)..(221): n is a, c, g, or t
  misc_feature (223)..(229): n is a, c, g, or t
  misc_feature (231)..(232): n is a, c, g, or t
  misc_feature (234)..(236): n is a, c, g, or t
  misc_feature (239)..(241): n is a, c, g, or t
  misc_feature (246)..(246): n is a, c, g, or t
  misc_feature (248)..(249): n is a, c, g, or t
  misc_feature (251)..(252): n is a, c, g, or t
  misc_feature (255)..(262): n is a, c, g, or t
  misc_feature (266)..(266): n is a, c, g, or t
  misc_feature (268)..(268): n is a, c, g, or t
  misc_feature (270)..(271): n is a, c, g, or t
  misc_feature (273)..(274): n is a, c, g, or t
  misc_feature (276)..(279): n is a, c, g, or t
  misc_feature (281)..(284): n is a, c, g, or t
  misc_feature (287)..(290): n is a, c, g, or t
  misc_feature (293)..(295): n is a, c, g, or t
  misc_feature (298)..(299): n is a, c, g, or t
  misc_feature (301)..(302): n is a, c, g, or t
  misc_feature (304)..(306): n is a, c, g, or t
  misc_feature (308)..(309): n is a, c, g, or t
  misc_feature (311)..(311): n is a, c, g, or t
  misc_feature (314)..(323): n is a, c, g, or t
  misc_feature (326)..(327): n is a, c, g, or t
  misc_feature (329)..(330): n is a, c, g, or t
  misc_feature (332)..(335): n is a, c, g, or t
  misc_feature (337)..(339): n is a, c, g, or t
  misc_feature (344)..(345): n is a, c, g, or t
  misc_feature (349)..(349): n is a, c, g, or t
  misc_feature (351)..(358): n is a, c, g, or t
  misc_feature (360)..(362): n is a, c, g, or t
  misc_feature (367)..(368): n is a, c, g, or t
  misc_feature (370)..(376): n is a, c, g, or t
  misc_feature (378)..(380): n is a, c, g, or t
  misc_feature (382)..(385): n is a, c, g, or t
  misc_feature (388)..(388): n is a, c, g, or t
  misc_feature (390)..(391): n is a, c, g, or t
  misc_feature (393)..(393): n is a, c, g, or t
  misc_feature (395)..(395): n is a, c, g, or t
  misc_feature (398)..(398): n is a, c, g, or t
  misc_feature (401)..(401): n is a, c, g, or t
  misc_feature (404)..(406): n is a, c, g, or t
  misc_feature (408)..(408): n is a, c, g, or t
  misc_feature (412)..(414): n is a, c, g, or t
  misc_feature (417)..(417): n is a, c, g, or t
  misc_feature (420)..(420): n is a, c, g, or t
  misc_feature (423)..(425): n is a, c, g, or t
  misc_feature (427)..(427): n is a, c, g, or t
  misc_feature (431)..(431): n is a, c, g, or t
  misc_feature (435)..(436): n is a, c, g, or t
  misc_feature (442)..(443): n is a, c, g, or t
  misc_feature (446)..(447): n is a, c, g, or t
  misc_feature (453)..(453): n is a, c, g, or t
  misc_feature (455)..(455): n is a, c, g, or t
  misc_feature (457)..(458): n is a, c, g, or t
  misc_feature (460)..(461): n is a, c, g, or t
  misc_feature (465)..(466): n is a, c, g, or t
  misc_feature (468)..(468): n is a, c, g, or t
  misc_feature (472)..(475): n is a, c, g, or t
  misc_feature (477)..(477): n is a, c, g, or t
  misc_feature (479)..(481): n is a, c, g, or t
  misc_feature (483)..(484): n is a, c, g, or t
  misc_feature (487)..(487): n is a, c, g, or t
  misc_feature (493)..(493): n is a, c, g, or t
  misc_feature (500)..(501): n is a, c, g, or t
  misc_feature (509)..(509): n is a, c, g, or t
  misc_feature (537)..(537): n is a, c, g, or t
  misc_feature (601)..(601): n is a, c, g, or t
  misc_feature (742)..(742): n is a, c, g, or t
  misc_feature (788)..(788): n is a, c, g, or t
  misc_feature (1058)..(1058): n is a, c, g, or t
  misc_feature (1246)..(1246): n is a, c, g, or t
  misc_feature (1839)..(1839): n is a, c, g, or t
  misc_feature (2043)..(2043): n is a, c, g, or t
  misc_feature (2198)..(2198): n is a, c, g, or t
  misc_feature (2205)..(2205): n is a, c, g, or t
  misc_feature (2307)..(2307): n is a, c, g, or t
  misc_feature (2368)..(2368): n is a, c, g, or t
  misc_feature (2394)..(2394): n is a, c, g, or t
  misc_feature (2425)..(2425): n is a, c, g, or t
  misc_feature (2466)..(2466): n is a, c, g, or t
  misc_feature (2480)..(2480): n is a, c, g, or t
  misc_feature (2484)..(2485): n is a, c, g, or t
  misc_feature (2487)..(2487): n is a, c, g, or t
  misc_feature (2493)..(2493): n is a, c, g, or t
  misc_feature (2557)..(2557): n is a, c, g, or t
  misc_feature (2575)..(2575): n is a, c, g, or t
  misc_feature (2595)..(2595): n is a, c, g, or t
  misc_feature (2599)..(2599): n is a, c, g, or t
  misc_feature (2828)..(2828): n is a, c, g, or t
  misc_feature (2889)..(2889): n is a, c, g, or t
  misc_feature (3022)..(3022): n is a, c, g, or t
  misc_feature (3119)..(3119): n is a, c, g, or t
  misc_feature (3121)..(3121): n is a, c, g, or t
  misc_feature (3273)..(3273): n is a, c, g, or t
  misc_feature (3617)..(3617): n is a, c, g, or t
  misc_feature (3647)..(3647): n is a, c, g, or t
  misc_feature (3917)..(3917): n is a, c, g, or t
nnnangnnnaantnggnnnnnnntnnnncnnnannnnnnnncnnnnnnntnnnnnnnnnnnncnnannnnntngnnnnnngnnnnnnnnnnnnnnnnnntnnnnnnnaanaannnnnnntnttnnnggnaaaaanannnnnnnnnnnnggnnnaaannaanncnannntngnnnnnnntnnancnaannnnnnnnnnnnntnnnnnnnnnnnacnnnttnnannnnnnntnntnnnctnnnaaatnanntnnatnnnnnnnnaaantnanntnnannnnannnnaannnnaannnaanngnnannnanntnaannnnnnnnnnaanntnntnnnnannnaaaannaaantnnnnnnnntnnnaaaannannnnnnntnnntnnnnttntnnantnaanaanatnnnantatnnnatnaanaannngnaaanatcnnatcaannaanncgaaanancnnannaaannantcgnnnnanannntnnaancaatcnaaagacnnaataaaancaatcaaaagacggaattaaggcaatcnaaagacggcataaaagcacagcggttaagatacaaaaacagcgctgaatcacttcaacgctgcntttattattagttaatcactatatttttctaataaaatgagcgacgctttcgctcgtgttatccatcaattaatcttatacctaataactaatcctatgaaaaatcaaactaatctttaaacctaaacaactaaacctaantctatatgtaaacctaaacaatctattacctaatgtcttttagacnatgcaaaattagtaattgtgtacgaacacgccaaataaattcatgttattttgcacacttttcatgatattttgatttacatcaaagaatgagtagattcaccttgcgattctttacaacttttcacacggcatggtttgttacaactcattttccattatgcaggaactcattttatcgaaaccgccaaacaatttctgccttaaggtcattctatgagacacatacaatctcataacaaaccactttgtacgtataaaggtggtcacnaacaagaatttgggcttcaaaacctcattaaagatgattagattcgatgcaaaatcgcacgaaaacaccatttatttactttctgaaggcaaagaaacagaaaaaactttgcggtctcaaaaggtcgtaattgacaccatatttctttaccttatatatatagaaaccccgcaaaactcgtggatttncgaggaatttcgttatatatagtatacttttttataatctttttaacttaaatcttttggaaatcatcttgaaacttatttacctttgcaccacaattagagttataaataattttaaagagaagagttatgaagaagtttttaatgactttagtagcagctttcgggcttgcagttagtgcaaacgcacagacttatgtaggtggtggttttagtatcttcggtcaggataatggtaacaccactgtaactacttacaaatttattcctgaaattggttacaacttcaacaaagattgggcagctggtgttgctttcggttgggaaggtgccaataaaggcaatgaaaagagcattgaagtaaacccatatgctcgttacactttccttcatacgaagttcgttaacgtattcgttgatggtggtttaggctacaaacacacctacgatgcaggcaatgataacgacctttggactgtaggtgttcgcccaggtgtttcagttaacctcacaaagaagctttcatttgtttctcatgtaggtttcctcggctggcaacaagctaagaacaacaacttaaacgcaaaggttantaagtatggacttgaccttgatggcaacaacatctcattcagtctttactacaacttctaagtagaagtttcttaaaaactaaagaataaggcagccgactccctcaaggagccggctgttttcttttcaactaaaacacaatagcccctcattctcattatcagctgacgaaaacatatcgcccttttcaccttaattatctnccactttgcatacaacccacgaatctatcaattcattcgattaatctttacaaaagcctttagaaaactcttcctattctaaaataaaatcctttcggtcgaaaatacgcgagtttttagccttcttgtaaatcactatgtatcaaacgattaanaaaacancgtcatttttccatccaaatatcatcatcgtatgacctcatctgccgcatttcgcaacgcaatatgacgcaaacaacaatcagatatgactgaaaacacgcngtcgtttgctgcaatccgtaggccaatatgccccacttcatacgcaaaagtgaaggttttnccttcaccaaacctatcaacagaggnaacaatccccgtcttttcagccattattttnctatttgcaagcttccgaagtatcgttttttagaccatatntctttacaatccanaaannanattccnacatttcagcccataaaacaaaagtccgcacaaacctatacgatagacttgtgcggactttttnattgaagtcagccttcancttgccttaaaaagcaagcnaatnaaccgaattatcggcttccatttccttggaaaacgaagccaacgctttccttcagataggttgacgacattgcatctacctgcaaagaagctgctataatctgcatctgtgataggcgagcactgttcaaaacgccaaaagaatagctgttacgaataaagaaagctatgctaatcttatggtcttgaccaccataattgagattaaaaacaggcgaaacagggctgantaagaagcctactggattgagattataataataggtgaagcatttgatgtcttgatctggngcattacgcagtgcatttttcaatgcattgtcgttcacatattcggcaaataaccgcataggaaaggccttaataatcaacgttgagtctgtattgatttcccaacgaatggcagaagagtctttaacgatantgccattagtagcatccaagcggctaaagaagagcttaccagcatagtttcctctcgcctgttgataggcttgctgttgttgttcgggggtaagtgngngattatcatccccacctggattacaagctgcaaaggaaagacctaacatgacaaggcatcccaccagccaaaaagataatttgtttgtttgctttttcatcattttattgttatatttgattcatctactccttaaatacctatgaaaacanaaccttgcctcacgttatgttaaatgattgttaaattctaattacatagacaagattatcttatttttgcatttactaagtgaaaggactaaagaaaatgaagtcaaacaaagcttagaatgacgctataagactaaagaaaaagagctgcgcgtggcatgaaactattcagtagagataatgaacagactattgttcgcaagttaaacaggggagatgccactgctatagacttgttgtatgctgaatatgcgcctctactgacggccgtatgtgcacgatatgtcgcccagaatgaagacataaaagatatacttcaggaggctttcattaagatgtttganaaaggtcgcacgttcaactatcgtggaaangggtcattaaaagcatgggctacgcgcatcgttatcaatgaatcgctgctctttttgcgtcaacaagcaaaacaagagcaatgttttctggataaagaaccacccgatgtagtagacgaagagcccgaaattggctcacttagtgccgaagaaattacggcaatgatacgtcagttgccttcaggatatcgcacagttttcaacctgtttgttatcgaaggattaagtcatcagcaaatcgctgcacagttaaacataaaggctgacacntcagcttcacagctttataaggctaaagtcatgttggcccgtatgataaaatcatatcagaaacaagacagaatgacagaatg

SEQ ID NO: 508 - DNA, 4000 bp, Escherichia coli
  misc_feature (1)..(4): n is a, c, g, or t
  misc_feature (7)..(14): n is a, c, g, or t
  misc_feature (16)..(17): n is a, c, g, or t
  misc_feature (23)..(23): n is a, c, g, or t
  misc_feature (25)..(27): n is a, c, g, or t
  misc_feature (29)..(29): n is a, c, g, or t
  misc_feature (31)..(33): n is a, c, g, or t
  misc_feature (35)..(36): n is a, c, g, or t
  misc_feature (38)..(38): n is a, c, g, or t
  misc_feature (40)..(43): n is a, c, g, or t
  misc_feature (45)..(46): n is a, c, g, or t
  misc_feature (49)..(58): n is a, c, g, or t
  misc_feature (60)..(61): n is a, c, g, or t
  misc_feature (65)..(67): n is a, c, g, or t
  misc_feature (72)..(72): n is a, c, g, or t
  misc_feature (74)..(75): n is a, c, g, or t
  misc_feature (77)..(78): n is a, c, g, or t
  misc_feature (80)..(81): n is a, c, g, or t
  misc_feature (83)..(90): n is a, c, g, or t
  misc_feature (93)..(93): n is a, c, g, or t
  misc_feature (95)..(99): n is a, c, g, or t
  misc_feature (102)..(107): n is a, c, g, or t
  misc_feature (109)..(110): n is a, c, g, or t
  misc_feature (112)..(124): n is a, c, g, or t
  misc_feature (126)..(126): n is a, c, g, or t
  misc_feature (128)..(128): n is a, c, g, or t
  misc_feature (130)..(132): n is a, c, g, or t
  misc_feature (134)..(135): n is a, c, g, or t
  misc_feature (138)..(141): n is a, c, g, or t
  misc_feature (143)..(143): n is a, c, g, or t
  misc_feature (146)..(155): n is a, c, g, or t
  misc_feature (157)..(160): n is a, c, g, or t
  misc_feature (162)..(164): n is a, c, g, or t
  misc_feature (166)..(167): n is a, c, g, or t
  misc_feature (169)..(169): n is a, c, g, or t
  misc_feature (171)..(182): n is a, c, g, or t
  misc_feature (185)..(185): n is a, c, g, or t
  misc_feature (188)..(191): n is a, c, g, or t
  misc_feature (194)..(194): n is a, c, g, or t
  misc_feature (197)..(197): n is a, c, g, or t
  misc_feature (199)..(201): n is a, c, g, or t
  misc_feature (203)..(204): n is a, c, g, or t
  misc_feature (206)..(208): n is a, c, g, or t
  misc_feature (211)..(223): n is a, c, g, or t
  misc_feature (225)..(225): n is a, c, g, or t
  misc_feature (227)..(228): n is a, c, g, or t
  misc_feature (230)..(231): n is a, c, g, or t
  misc_feature (233)..(234): n is a, c, g, or t
  misc_feature (236)..(238): n is a, c, g, or t
  misc_feature (240)..(243): n is a, c, g, or t
  misc_feature (245)..(249): n is a, c, g, or t
  misc_feature (252)..(256): n is a, c, g, or t
  misc_feature (258)..(259): n is a, c, g, or t
  misc_feature (261)..(263): n is a, c, g, or t
  misc_feature (265)..(266): n is a, c, g, or t
  misc_feature (269)..(275): n is a, c, g, or t
  misc_feature (277)..(282): n is a, c, g, or t
  misc_feature (284)..(287): n is a, c, g, or t
  misc_feature (290)..(291): n is a, c, g, or t
  misc_feature (293)..(295): n is a, c, g, or t
  misc_feature (297)..(302): n is a, c, g, or t
  misc_feature (305)..(305): n is a, c, g, or t
  misc_feature (307)..(307): n is a, c, g, or t
  misc_feature (309)..(312): n is a, c, g, or t
  misc_feature (314)..(314): n is a, c, g, or t
  misc_feature (316)..(321): n is a, c, g, or t
  misc_feature (323)..(323): n is a, c, g, or t
  misc_feature (325)..(325): n is a, c, g, or t
  misc_feature (328)..(328): n is a, c, g, or t
  misc_feature (330)..(332): n is a, c, g, or t
  misc_feature (335)..(336): n is a, c, g, or t
  misc_feature (338)..(345): n is a, c, g, or t
  misc_feature (347)..(348): n is a, c, g, or t
  misc_feature (350)..(350): n is a, c, g, or t
  misc_feature (352)..(352): n is a, c, g, or t
  misc_feature (355)..(356): n is a, c, g, or t
  misc_feature (358)..(362): n is a, c, g, or t
  misc_feature (364)..(365): n is a, c, g, or t
  misc_feature (367)..(368): n is a, c, g, or t
  misc_feature (372)..(373): n is a, c, g, or t
  misc_feature (376)..(377): n is a, c, g, or t
  misc_feature (380)..(380): n is a, c, g, or t
  misc_feature (382)..(395): n is a, c, g, or t
  misc_feature (398)..(400): n is a, c, g, or t
  misc_feature (402)..(406): n is a, c, g, or t
  misc_feature (408)..(409): n is a, c, g, or t
  misc_feature (413)..(417): n is a, c, g, or t
  misc_feature (419)..(419): n is a, c, g, or t
  misc_feature (421)..(422): n is a, c, g, or t
  misc_feature (424)..(424): n is a, c, g, or t
  misc_feature (426)..(433): n is a, c, g, or t
  misc_feature (435)..(436): n is a, c, g, or t
  misc_feature (439)..(439): n is a, c, g, or t
  misc_feature (442)..(443): n is a, c, g, or t
  misc_feature (445)..(445): n is a, c, g, or t
  misc_feature (447)..(452): n is a, c, g, or t
  misc_feature (455)..(459): n is a, c, g, or t
  misc_feature (461)..(467): n is a, c, g, or t
  misc_feature (469)..(470): n is a, c, g, or t
  misc_feature (472)..(472): n is a, c, g, or t
  misc_feature (474)..(476): n is a, c, g, or t
  misc_feature (478)..(483): n is a, c, g, or t
  misc_feature (485)..(491): n is a, c, g, or t
  misc_feature (493)..(494): n is a, c, g, or t
  misc_feature (496)..(500): n is a, c, g, or t
  misc_feature (502)..(503): n is a, c, g, or t
  misc_feature (505)..(505): n is a, c, g, or t
  misc_feature (507)..(511): n is a, c, g, or t
  misc_feature (513)..(518): n is a, c, g, or t
  misc_feature (520)..(527): n is a, c, g, or t
  misc_feature (529)..(530): n is a, c, g, or t
  misc_feature (532)..(536): n is a, c, g, or t
  misc_feature (538)..(543): n is a, c, g, or t
  misc_feature (545)..(545): n is a, c, g, or t
  misc_feature (547)..(553): n is a, c, g, or t
  misc_feature (555)..(560): n is a, c, g, or t
  misc_feature (562)..(569): n is a, c, g, or t
  misc_feature (571)..(573): n is a, c, g, or t
  misc_feature (575)..(578): n is a, c, g, or t
  misc_feature (580)..(587): n is a, c, g, or t
  misc_feature (589)..(590): n is a, c, g, or t
  misc_feature (592)..(593): n is a, c, g, or t
  misc_feature (595)..(595): n is a, c, g, or t
  misc_feature (597)..(601): n is a, c, g, or t
  misc_feature (603)..(610): n is a, c, g, or t
  misc_feature (612)..(620): n is a, c, g, or t
  misc_feature (622)..(622): n is a, c, g, or t
  misc_feature (625)..(630): n is a, c, g, or t
  misc_feature (633)..(638): n is a, c, g, or t
  misc_feature (640)..(640): n is a, c, g, or t
  misc_feature (643)..(643): n is a, c, g, or t
  misc_feature (645)..(645): n is a, c, g, or t
  misc_feature (648)..(649): n is a, c, g, or t
  misc_feature (651)..(654): n is a, c, g, or t
  misc_feature (656)..(661): n is a, c, g, or t
  misc_feature (663)..(672): n is a, c, g, or t
  misc_feature (674)..(677): n is a, c, g, or t
  misc_feature (679)..(683): n is a, c, g, or t
  misc_feature (685)..(687): n is a, c, g, or t
  misc_feature (689)..(692): n is a, c, g, or t
  misc_feature (694)..(694): n is a, c, g, or t
  misc_feature (696)..(720): n is a, c, g, or t
  misc_feature (722)..(722): n is a, c, g, or t
  misc_feature (724)..(732): n is a, c, g, or t
  misc_feature (736)..(738): n is a, c, g, or t
  misc_feature (740)..(745): n is a, c, g, or t
  misc_feature (747)..(747): n is a, c, g, or t
  misc_feature (750)..(751): n is a, c, g, or t
  misc_feature (753)..(753): n is a, c, g, or t
  misc_feature (755)..(755): n is a, c, g, or t
  misc_feature (757)..(762): n is a, c, g, or t
  misc_feature (764)..(764): n is a, c, g, or t
  misc_feature (766)..(768): n is a, c, g, or t
  misc_feature (771)..(772): n is a, c, g, or t
  misc_feature (774)..(778): n is a, c, g, or t
  misc_feature (780)..(780): n is a, c, g, or t
  misc_feature (782)..(788): n is a, c, g, or t
  misc_feature (790)..(792): n is a, c, g, or t
  misc_feature (796)..(798): n is a, c, g, or t
  misc_feature (800)..(806): n is a, c, g, or t
  misc_feature (808)..(814): n is a, c, g, or t
  misc_feature (816)..(820): n is a, c, g, or t
  misc_feature (822)..(822): n is a, c, g, or t
  misc_feature (824)..(829): n is a, c, g, or t
  misc_feature (833)..(833): n is a, c, g, or t
  misc_feature (835)..(835): n is a, c, g, or t
  misc_feature (837)..(844): n is a, c, g, or t
  misc_feature (846)..(849): n is a, c, g, or t
  misc_feature (851)..(854): n is a, c, g, or t
  misc_feature (856)..(857): n is a, c, g, or t
  misc_feature (859)..(861): n is a, c, g, or t
  misc_feature (863)..(863): n is a, c, g, or t
  misc_feature (865)..(872): n is a, c, g, or t
  misc_feature (874)..(875): n is a, c, g, or t
  misc_feature (877)..(880): n is a, c, g, or t
  misc_feature (882)..(882): n is a, c, g, or t
  misc_feature (884)..(888): n is a, c, g, or t
  misc_feature (891)..(891): n is a, c, g, or t
  misc_feature (893)..(894): n is a, c, g, or t
  misc_feature (896)..(897): n is a, c, g, or t
  misc_feature (899)..(906): n is a, c, g, or t
  misc_feature (908)..(909): n is a, c, g, or t
  misc_feature (911)..(914): n is a, c, g, or t
  misc_feature (916)..(916): n is a, c, g, or t
  misc_feature (918)..(924): n is a, c, g, or t
  misc_feature (926)..(935): n is a, c, g, or t
  misc_feature (937)..(940): n is a, c, g, or t
  misc_feature (942)..(942): n is a, c, g, or t
  misc_feature (944)..(944): n is a, c, g, or t
  misc_feature (947)..(947): n is a, c, g, or t
  misc_feature (949)..(950): n is a, c, g, or t
  misc_feature (952)..(961): n is a, c, g, or t
  misc_feature (963)..(963): n is a, c, g, or t
  misc_feature (965)..(965): n is a, c, g, or t
  misc_feature (968)..(981): n is a, c, g, or t
  misc_feature (984)..(993): n is a, c, g, or t
  misc_feature (995)..(996): n is a, c, g, or t
  misc_feature (999)..(1000): n is a, c, g, or t
  misc_feature (1002)..(1002): n is a, c, g, or t
  misc_feature (1005)..(1009): n is a, c, g, or t
  misc_feature (1011)..(1011): n is a, c, g, or t
  misc_feature (1013)..(1014): n is a, c, g, or t
  misc_feature (1016)..(1016): n is a, c, g, or t
  misc_feature (1018)..(1018): n is a, c, g, or t
  misc_feature (1020)..(1025): n is a, c, g, or t
  misc_feature (1027)..(1030): n is a, c, g, or t
  misc_feature (1032)..(1035): n is a, c, g, or t
  misc_feature (1037)..(1040): n is a, c, g, or t
  misc_feature (1043)..(1046): n is a, c, g, or t
  misc_feature (1048)..(1049): n is a, c, g, or t
  misc_feature (1052)..(1057): n is a, c, g, or t
  misc_feature (1060)..(1062): n is a, c, g, or t
  misc_feature (1065)..(1066): n is a, c, g, or t
  misc_feature (1068)..(1070): n is a, c, g, or t
  misc_feature (1074)..(1074): n is a, c, g, or t
  misc_feature (1076)..(1079): n is a, c, g, or t
  misc_feature (1082)..(1091): n is a, c, g, or t
  misc_feature (1093)..(1097): n is a, c, g, or t
  misc_feature (1099)..(1101): n is a, c, g, or t
  misc_feature (1103)..(1105): n is a, c, g, or t
  misc_feature (1107)..(1109): n is a, c, g, or t
  misc_feature (1111)..(1118): n is a, c, g, or t
  misc_feature (1120)..(1122): n is a, c, g, or t
  misc_feature (1124)..(1129): n is a, c, g, or t
  misc_feature (1131)..(1131): n is a, c, g, or t
  misc_feature (1133)..(1134): n is a, c, g, or t
  misc_feature (1136)..(1139): n is a, c, g, or t
  misc_feature (1142)..(1143): n is a, c, g, or t
  misc_feature (1145)..(1147): n is a, c, g, or t
  misc_feature (1149)..(1149): n is a, c, g, or t
  misc_feature (1152)..(1155): n is a, c, g, or t
  misc_feature (1157)..(1159): n is a, c, g, or t
  misc_feature (1163)..(1164): n is a, c, g, or t
  misc_feature (1167)..(1168): n is a, c, g, or t
  misc_feature (1170)..(1170): n is a, c, g, or t
  misc_feature (1172)..(1175): n is a, c, g, or t
  misc_feature (1178)..(1178): n is a, c, g, or t
  misc_feature (1180)..(1181): n is a, c, g, or t
  misc_feature (1184)..(1188): n is a, c, g, or t
  misc_feature (1190)..(1190): n is a, c, g, or t
  misc_feature (1192)..(1192): n is a, c, g, or t
  misc_feature (1194)..(1197): n is a, c, g, or t
  misc_feature (1199)..(1203): n is a, c, g, or t
  misc_feature (1205)..(1210): n is a, c, g, or t
  misc_feature (1213)..(1213): n is a, c, g, or t
  misc_feature (1215)..(1218): n is a, c, g, or t
  misc_feature (1220)..(1223): n is a, c, g, or t
  misc_feature (1225)..(1226): n is a, c, g, or t
  misc_feature (1228)..(1232): n is a, c, g, or t
  misc_feature (1234)..(1240): n is a, c, g, or t
  misc_feature (1242)..(1244): n is a, c, g, or t
  misc_feature (1246)..(1246): n is a, c, g, or t
  misc_feature (1248)..(1266): n is a, c, g, or t
  misc_feature (1268)..(1268): n is a, c, g, or t
  misc_feature (1270)..(1273): n is a, c, g, or t
  misc_feature (1275)..(1276): n is a, c, g, or t
  misc_feature (1278)..(1285): n is a, c, g, or t
  misc_feature (1287)..(1288): n is a, c, g, or t
  misc_feature (1290)..(1293): n is a, c, g, or t
  misc_feature (1295)..(1295): n is a, c, g, or t
  misc_feature (1298)..(1308): n is a, c, g, or t
  misc_feature (1311)..(1312): n is a, c, g, or t
  misc_feature (1314)..(1316): n is a, c, g, or t
  misc_feature (1318)..(1319): n is a, c, g, or t
  misc_feature (1322)..(1323): n is a, c, g, or t
  misc_feature (1325)..(1327): n is a, c, g, or t
  misc_feature (1329)..(1329): n is a, c, g, or t
  misc_feature (1331)..(1334): n is a, c, g, or t
  misc_feature (1336)..(1338): n is a, c, g, or t
  misc_feature (1340)..(1342): n is a, c, g, or t
  misc_feature (1344)..(1344): n is a, c, g, or t
  misc_feature (1346)..(1349): n is a, c, g, or t
  misc_feature (1351)..(1356): n is a, c, g, or t
  misc_feature (1359)..(1363): n is a, c, g, or t
  misc_feature (1365)..(1365): n is a, c, g, or t
  misc_feature (1368)..(1370): n is a, c, g, or t
  misc_feature (1373)..(1375): n is a, c, g, or t
  misc_feature (1379)..(1380): n is a, c, g, or t
  misc_feature (1384)..(1384): n is a, c, g, or t
  misc_feature (1386)..(1386): n is a, c, g, or t
  misc_feature (1389)..(1389): n is a, c, g, or t
  misc_feature (1391)..(1398): n is a, c, g, or t
  misc_feature (1400)..(1400): n is a, c, g, or t
  misc_feature (1402)..(1403): n is a, c, g, or t
  misc_feature (1405)..(1405): n is a, c, g, or t
  misc_feature (1408)..(1411): n is a, c, g, or t
  misc_feature (1413)..(1417): n is a, c, g, or t
  misc_feature (1419)..(1419): n is a, c, g, or t
  misc_feature (1421)..(1425): n is a, c, g, or t
  misc_feature (1428)..(1429): n is a, c, g, or t
  misc_feature (1431)..(1433): n is a, c, g, or t
  misc_feature (1436)..(1436): n is a, c, g, or t
  misc_feature (1438)..(1438): n is a, c, g, or t
  misc_feature (1440)..(1441): n is a, c, g, or t
  misc_feature (1443)..(1447): n is a, c, g, or t
  misc_feature (1450)..(1450): n is a, c, g, or t
  misc_feature (1452)..(1454): n is a, c, g, or t
  misc_feature (1456)..(1458): n is a, c, g, or t
  misc_feature (1460)..(1481): n is a, c, g, or t
  misc_feature (1486)..(1487): n is a, c, g, or t
  misc_feature (1489)..(1495): n is a, c, g, or t
  misc_feature (1499)..(1500): n is a, c, g, or t
  misc_feature (1502)..(1503): n is a, c, g, or t
  misc_feature (1505)..(1510): n is a, c, g, or t
  misc_feature (1513)..(1517): n is a, c, g, or t
  misc_feature (1519)..(1519): n is a, c, g, or t
  misc_feature (1521)..(1523): n is a, c, g, or t
  misc_feature (1525)..(1529): n is a, c, g, or t
  misc_feature (1531)..(1532): n is a, c, g, or t
  misc_feature (1534)..(1534): n is a, c, g, or t
  misc_feature (1536)..(1539): n is a, c, g, or t
  misc_feature (1541)..(1541): n is a, c, g, or t
  misc_feature (1543)..(1561): n is a, c, g, or t
  misc_feature (1564)..(1565): n is a, c, g, or t
  misc_feature (1568)..(1568): n is a, c, g, or t
  misc_feature (1570)..(1570): n is a, c, g, or t
  misc_feature (1573)..(1573): n is a, c, g, or t
  misc_feature (1575)..(1575): n is a, c, g, or t
  misc_feature (1577)..(1578): n is a, c, g, or t
  misc_feature (1580)..(1582): n is a, c, g, or t
  misc_feature (1584)..(1584): n is a, c, g, or t
  misc_feature (1586)..(1590): n is a, c, g, or t
  misc_feature (1592)..(1597): n is a, c, g, or t
  misc_feature (1599)..(1605): n is a, c, g, or t
  misc_feature (1607)..(1610): n is a, c, g, or t
  misc_feature (1612)..(1612): n is a, c, g, or t
  misc_feature (1614)..(1615): n is a, c, g, or t
  misc_feature (1617)..(1618): n is a, c, g, or t
  misc_feature (1620)..(1626): n is a, c, g, or t
  misc_feature (1630)..(1635): n is a, c, g, or t
  misc_feature (1637)..(1638): n is a, c, g, or t
  misc_feature (1641)..(1643): n is a, c, g, or t
  misc_feature (1645)..(1645): n is a, c, g, or t
  misc_feature (1649)..(1652): n is a, c, g, or t
  misc_feature (1654)..(1665): n is a, c, g, or t
  misc_feature (1667)..(1678): n is a, c, g, or t
  misc_feature (1680)..(1682): n is a, c, g, or t
  misc_feature (1684)..(1684): n is a, c, g, or t
  misc_feature (1687)..(1687): n is a, c, g, or t
  misc_feature (1690)..(1690): n is a, c, g, or t
  misc_feature (1695)..(1695): n is a, c, g, or t
  misc_feature (1719)..(1719): n is a, c, g, or t
  misc_feature (1723)..(1733): n is a, c, g, or t
  misc_feature (1735)..(1749): n is a, c, g, or t
  misc_feature (1751)..(1751): n is a, c, g, or t
  misc_feature (1753)..(1758): n is a, c, g, or t
  misc_feature (1761)..(1762): n is a, c, g, or t
  misc_feature (1764)..(1765): n is a, c, g, or t
  misc_feature (1767)..(1767): n is a, c, g, or t
  misc_feature (1769)..(1772): n is a, c, g, or t
  misc_feature (1774)..(1775): n is a, c, g, or t
  misc_feature (1781)..(1781): n is a, c, g, or t
  misc_feature (1783)..(1815): n is a, c, g, or t
  misc_feature (1817)..(1821): n is a, c, g, or t
  misc_feature (1823)..(1823): n is a, c, g, or t
  misc_feature (1827)..(1827): n is a, c, g, or t
  misc_feature (1830)..(1830): n is a, c, g, or t
  misc_feature (1833)..(1833): n is a, c, g, or t
  misc_feature (1835)..(1837): n is a, c, g, or t
  misc_feature (1840)..(1841): n is a, c, g, or t
  misc_feature (1849)..(1855): n is a, c, g, or t
  misc_feature (1858)..(1864): n is a, c, g, or t
  misc_feature (1866)..(1868): n is a, c, g, or t
  misc_feature (1870)..(1878): n is a, c, g, or t
  misc_feature (1880)..(1886): n is a, c, g, or t
  misc_feature (1922)..(1933): n is a, c, g, or t
  misc_feature (1935)..(1944): n is a, c, g, or t
  misc_feature (1947)..(1951): n is a, c, g, or t
  misc_feature (1953)..(1955): n is a, c, g, or t
  misc_feature (1958)..(1959): n is a, c, g, or t
  misc_feature (1961)..(1962): n is a, c, g, or t
  misc_feature (1965)..(1969): n is a, c, g, or t
  misc_feature (1971)..(1975): n is a, c, g, or t
  misc_feature (1978)..(1978): n is a, c, g, or t
  misc_feature (1980)..(1989): n is a, c, g, or t
  misc_feature (1991)..(2007): n is a, c, g, or t
  misc_feature (2009)..(2009): n is a, c, g, or t
  misc_feature (2011)..(2015): n is a, c, g, or t
  misc_feature (2017)..(2019): n is a, c, g, or t
nnnngannnnnnnncnntgcatnannntntnnntnntntnnnntnncannnnnnnnnncnntatnnngaacnanntnnanncnnnnnnnncgntnnnnntgnnnnnnanntnnnnnnnnnnnnncntntnnnanntannnnanagnnnnnnnnnnannnntnnnanntntnnnnnnnnnnnnttnaannnnctntanannntnngnnnatnnnnnnnnnnnnncntnncnngnnannnannnnannnnncannnnncnntnnnanntannnnnnncnnnnnntnnnntanntnnncnnnnnnttntntnnnngntnnnnnncnanttncnnntannannnnnnnntnntntntgnntnnnnncnntnntacnngcnncantnnnnnnnnnnnnnnaannnannnnnanncctnnnnntnanntngnnnnnnnntnngtnttnnantnnnnnnacnnnnntnnnnnnngnntnannngnnnnnnannnnnnntnntnnnnntnntntnnnnntnnnnnnannnnnnnnanntnnnnncnnnnnngngnnnnnnncnnnnnncnnnnnnnntnnntnnnntnnnnnnnncnntnnanannnnnannnnnnnngnnnnnnnnnanaannnnnnggnnnnnntncantntanntnnnnannnnnngnnnnnnnnnnannnntnnnnnannntnnnnantnnnnnnnnnnnnnnnnnnnnnnnnntnannnnnnnnncttnnnannnnnntnganntntntnnnnnncnannnttnntnnnnncntnnnnnnnannnatannncnnnnnnntnnnnnnntnnnnntncnnnnnnttgntntnnnnnnnnannnncnnnnannannnangnnnnnnnntnntnnnngntnnnnnttncnntnncnnnnnnnntnnannnncntnnnnnnngnnnnnnnnnnannnncngntgntnntnnnnnnnnnntngnttnnnnnnnnnnnnnnatnnnnnnnnnnannttnnanggnnnnntntnntncntnnnnnngnnnntnnnntnnnncannnnanntannnnnntannntanntnnnttgnannnnacnnnnnnnnnntnnnnntnnntnnntnnntnnnnnnnnannntnnnnnnanannannnnatnngnnntnatnnnnannnatgnnttnnantnnnntancnntannnnntnangnnnntnnnnntnnnnnnaantnnnntnnnnannannnnnannnnnnntnnncntnnnnnnnnnnnnnnnnnnntntnnnnannannnnnnnnanntnnnngnttnnnnnnnnnnnacnnannnanntannannngnannnngnnngnnnantnnnncnnnnnntannnnntnaannnacnnncctnnatangntanannnnnnnntntnncnttnnnntnnnnnantnnnnnganntnnnaancnanntnnnnntanannntnnnannnnnnnnnnnnnnnnnnnnnntattnncnnnnnnntttnnanncnnnnnnctnnnnnangnnncnnnnntnnantnnnntntnnnnnnnnnnnnnnnnnnnttnnaancnacntncnnannnangnnnnnannnnnntnnnnnnnannnntngnncnntnnnnnnntttnnnnnnanntannnanatannnnannnnnnnnnnnntnnnnnnnnnnnntnnntnttnctngtttnaatccacgtacctatataaggtangacnnnnnnnnnnntnnnnnnnnnnnnnnntncnnnnnnttnnanncncnnnncnntataangnnnnnnnnnnnnnnnnnnnnnnnnnnnnnnnnntnnnnngntttnaanccncnnnccnntataaggnnnnnnnaannnnnnngnnntnnnnnnnnnannnnnnnttgtttcaatccacgtacctatataaggtacgaccnnnnnnnnnnnnannnnnnnnnnagnnnnnannnttnnannccnnnnncnnnnnaangnnnnnnnnnngnnnnnnnnnnnnnnnnnanannnnnannngtttcaatccacgtacctatataaggtacgactgcattacaaataatgcaaacatttacagtctgttatcaatgcatttatgcgataataaactttttggattttttattgatgaaataaaactaataggagtgtttaataggctaataatcaatgattgcgaaaactccagctttttgttaatgcttaatgttcgcaaacagttatattataagttcatcttctacattataggatgtgacgacacctatgtattcaactcttttagaataattatttcccaagaaatagaaacgaatactatcttttttatgatcgatgatatccgatagttttaatcttaactcggtaaattgagcaggcgagacagagcattcaaaaacggaattttggacgcgttggccataattcaggcattgacgtgctacctgacgtaacctgcgctgtccgtcggaagtcatcgtttctacgtcatatgtaactagaacatacatgaacttacttcattaaaaagaccggataattatctaaatcgtttctcaaaaaacgagctaaaagcatcgcctgaatatatgggatcagtcctatcggtacggattcatttaagtaggggtggattattgtctctttttttctcttctgccaagcgagtaagactccctttctgatatcttcatccattacaatcccgttatctccgtgttcgacaaaacctttaccggatatctgtttacgattaattaaggacaaaaccaacctgtctgccaggtaggctcgtaactcttccatcatatctaacgctaaactcgctcttcctggtcgatcggtatgtaaaaagcctacgtatggatcaagtcctactgtttccaatgcagactgtacctcatgattcagcaatgtgtaaacgaatgacaatagagcatttactttgtctttgggcggtcttctgttcctcccgttaaaaggaaaatcctcacattgcgatatgatcatctggttaaatacagagaaataagttgtagcggcttctccctctatacctcttaatgtatcggaggactcagcaactaaagcctgattctttgatctctttaacttttcagatacggataaaaacaaggatagctgtttgtcggaagaaatgtgatctcttttgaaacgatcgataaccgtccgggaatttgctatctttcctgcaataaaaagccgactgatttccagtgatttatttgcatcgtcggcaatcctgtattgtgttcttcgtaaaaggacatttccttttgtcggaccggagactctaccttgaaactgtccattagcacttaaaaaacataatcctacatttctttcagcacacatcttcattaatgccggagaagcacctatatatccgaatgtgacaataccttctatatttaaaaccggaattctgaatatatctttttccttaaccctaattacaacgttttctccatctttagttaaataggcttcaggagtagttacatacaatgtgttcaataattttctcatattttaatcgtataactgggacaggtaagtattcactttcggtgtttttgtcagtactttaggcatacatacgtcacataaagaacatgacttgcaatgcgctttgtatattgccggcggaagaactttttgctcgtatagcttgtgcatttggacacatttattttcaaccagtttccgtaattcttcagtaaactggacctcttctcggtggcgagtttccccataatacaaaaagcctttttctatgctgacgttatacatctcttccaggcaaatcgcttgtgcgcatagctggacttcatctatctgatcttttttaggtttgcctcgtttgtattcgaccggaattaattgccagaatcccggatatttaggatgtcttattgaattttgtccggaggtggaagcgaccatctctactacatcagagataccataaagtccc

SEQ ID NO: 509 - DNA, 4000 bp, Escherichia coli
  misc_feature (1189)..(1189): n is a, c, g, or t
  misc_feature (1195)..(1195): n is a, c, g, or t
  misc_feature (2777)..(2777): n is a, c, g, or t
  misc_feature (2782)..(2782): n is a, c, g, or t
  misc_feature (3449)..(3449): n is a, c, g, or t
  misc_feature (3575)..(3575): n is a, c, g, or t
  misc_feature (3599)..(3599): n is a, c, g, or t
  misc_feature (3626)..(3626): n is a, c, g, or t
  misc_feature (3631)..(3631): n is a, c, g, or t
  misc_feature (3638)..(3639): n is a, c, g, or t
  misc_feature (3644)..(3644): n is a, c, g, or t
  misc_feature (3666)..(3666): n is a, c, g, or t
  misc_feature (3689)..(3689): n is a, c, g, or t
  misc_feature (3704)..(3704): n is a, c, g, or t
  misc_feature (3707)..(3707): n is a, c, g, or t
  misc_feature (3710)..(3710): n is a, c, g, or t
  misc_feature (3713)..(3713): n is a, c, g, or t
  misc_feature (3725)..(3725): n is a, c, g, or t
  misc_feature (3731)..(3731): n is a, c, g, or t
  misc_feature (3737)..(3737): n is a, c, g, or t
  misc_feature (3992)..(3992): n is a, c, g, or t
tcttttttcaggaatcgccacggcttcgcctgatcgagggttgcgtcccatgcgcggtgggcgtcggttgacagagaagctgccaaagccacgtaattcaatacggtggcccttgaccatggcgtcactcatggcgtcaagcaaggctttgacagcaaactcggcatcgcggtgcgccaattgcgggaaccgtgcggccaactcttcaaccaaatcacttcgggtcatggctacaactctctcttcgcaggcgatttatttttcgcctgtgtcgagcttggcacgcaacaaagcgcccaagctggtggtgcccgcattgcccgaggtttggctcagggtttgcatggcgtcagcttggtcagccgcatctttggccttgatggacaactggatattgcgtgttttgcggtctacgttgaccaccacagccgtgacttcgtcaccgactttgagcacctggctggcgtcttcgatgcggtcacgcgagatttctgacacgcgcaaataaccaatgatgtcttcgcccaggtcaatttctgcgcctttggcatccacggtcttaaccgtgcccgtgacgatttcgcccttgtcattgaccgacacaaagttggtgaaggggtcggagtcgagttgcttgatgcccaaagaaatgcgctcacgctcgacgtcaacggccagcaccaaggcttcaacttcttggcctttcttgaagttgcgcacagcagcttcgccggtttcgttccaagacaggtcagacaaatgcaccaaaccgtcgataccagcagccaagccgacaaacacgccgaaatcggtgatggatttgatggggcctttgacgcggtcgccgcgcttggtggcgcctgcgaactcttgccaaggattggctttgcactgcttcatgcccaaagagatgcggcgtttgtcttcatcgatctcaaggaccatgacttcgacctcgtcgcctaaggcaacgattttggaaggtgccacgtttttgttggtccagtccatttcagacacgtggaccaagccttcgatgccgggttcgagttcgacaaacgcgccgtaatcggcgatgttggtgatcttgccgtgcatgcgcgtgccttggggatagcggcggttcacgcccatccaagggtcgtcgcccatttgtttcaaacccaaagacacgcggtttttgtcggtntcgaanttgagaatcttggcagtgatttcttggcctgcgaccaccacctcggaggggtgacgcacacgacgccaagccatgtcggtgatgtgcagcaaaccatcgatgccacccaagtcgacaaacgcgccgtactcggtgatgtttttcaccacaccgtgaacgatagagccttctttgaggttttccatcatcttggcgcgttcttcacccatggaggcttcaaccacagcgcggcgcgacaacacgacgttgttgcgcttgcggtcgagcttgatgactttgaattccatggtcttgttctcatagggagacaagtctttgatggggcgggtgtcgatgagtgagccgggcaaaaaggcgcggatgccattgaccaacacggtcaggccgcctttgactttgccgctggtggtgccggtgacaaattcgccggactcgagggctttttctaggctcatccaagacgctaaacgcttggcggtgtcgcggctgaggatggtgtcgccgtaaccgttttctacagagctgatggccaccgacacaaagtcgccggcctggacttcgatttcgcccaaatcgtttttaaattcttcgataggcacataggcttcagacttcagccctgcgttgaccaccacgtggttgtgttcgacacggatgacttcagcggtgatcacttcaccggtgcgcatctctgagcgtttcagggattcttcaaacagggctgcaaaagattcagacattccattttcctaatttcgtcggccaaggagcctgcccatgcaatgggcaaagagaagacttgatcgacggttgttgcggcttaaccgcagttgggtgaaacaaccccagcaccagagcgccaagcagcgcgagagggatgccaaggaaccagattcagatgcggccggggccaaacacctgtttgctttgccaccaagccaacacttgcgccaccgattcatcgatggacaacaaagagttgtctaagtgcattgcgtcttgcgcgggctttaaaggtgcaacgctgcgttgtgtgtcacgggcgtcacgcgcttgtaagtctgcgtgaagagccgcgattgtagtagaaaaaccttttgaaatcagttgtttgtgtcgccgttctgctcttttttctgcactggcggtcaaaaacactttcaaaggcgcctcgggaaagatgaccgtacccatgtcgcggccatcggccaacagtcctggcaatcgggcaaaactctgttgaaaatcaaccaaagccagcctgaccgctggcaaaaccgatactttggaggcattcatgccggcttcctcggtgcggatggcctcagaaacattgacctcagccagaagcacttgctcaccttcaaatcgaactggcaagtggcgggccagctcggctatttgcaattcatgcgcggcgtccaggctcaagccttgctgcaaggccgcgtaggcggtcaagcggtatagcgcgccgctgtctaaatagtggtaacccaagctttgagccacccgcgaggccagcgtgcctttgcccgaggcggtggggccgtcgatgcaaatgacgggtaccaaggcggcntgggncaagccaaacagcgcttcaaaataatcgggaaaggttttggctacgcatttcgggtcttcaatgcgcactggcaagccagcggggttgaacgcggcgagcgaaaaacacatggcgatgcggtggtcgtcgtaggtgtggatgctggctgccttccattggctgatggggtgcacgcgaatccaatcggggccttcttcaacctgagcgcctagcttgcgcgcttcgcaggccatggccgcgatacggtcggtttctttcacccgccagctggcgatattgcgcaaggtgctggggccgtcggcatacaacgccatgacggccaaggtcatggcggcgtcgggaatttggttgcaatccatgtcgatggctttgagtggccaagcgccgcgtcgggtttgcacccagttggggccgctgtccaccaccgcgcccatttgtgcggccgcgtccatgaagcgtatatcgccttgtatggagtctgcgcccacgccttgtatacgcacacccgtctcggaagccagagcgcccaaagctatgaaataactcgccgaggatgcgtcggcttccacgtgcagcaggccaggcgaggtgtagcggctgcccgcgggcagggtgaaacgctgccagccctcgcgcttgaccctcacgccaaagcgttgcagcagnttcaaggtgatgtctatataaggtttgctgatgagttcgcccaccacctcgatgacgatgtcttggcttttcgccaccagcggcagcgccaacaacaaggccgtgagaaattggctggacacatcnccgcgcacttggataggcgcgtcnagttgcaagccctgatggcctttgagntgcancggcggnnagccntcttggccggtgtagtcaatgncgcaaccgagttggcgcagcgcntccaccaagtcgccnatnggncgntcgtgcatgcgnggcacnccatgnaagcgcgcttgtgcgcccatcagcgccaaggcggcggtgagcgggcgcatggccgtgcctgcattgcccatgaacaaatccaattcagcagcgggcgtttggccgcccaagcctgtgatgctgacgctgctgacacgcttgtcgacttggcagcccatggcttgcaaagccgtcaacatgacgcgggtgtcgtccgagtccagcaaatcgtggagctcggtggtgccttggcttaaggccgccaacaacagcacncggttgga

SEQ ID NO: 510 - DNA, 4000 bp, Escherichia coli
  misc_feature (227)..(227): n is a, c, g, or t
  misc_feature (412)..(412): n is a, c, g, or t
  misc_feature (425)..(425): n is a, c, g, or t
  misc_feature (449)..(449): n is a, c, g, or t
  misc_feature (557)..(557): n is a, c, g, or t
  misc_feature (581)..(581): n is a, c, g, or t
  misc_feature (713)..(713): n is a, c, g, or t
  misc_feature (1260)..(1260): n is a, c, g, or t
  misc_feature (1317)..(1317): n is a, c, g, or t
  misc_feature (1335)..(1335): n is a, c, g, or t
  misc_feature (1354)..(1354): n is a, c, g, or t
  misc_feature (1363)..(1363): n is a, c, g, or t
  misc_feature (1371)..(1371): n is a, c, g, or t
  misc_feature (1374)..(1374): n is a, c, g, or t
  misc_feature (1389)..(1389): n is a, c, g, or t
  misc_feature (1410)..(1410): n is a, c, g, or t
  misc_feature (1425)..(1425): n is a, c, g, or t
  misc_feature (1452)..(1452): n is a, c, g, or t
  misc_feature (1457)..(1457): n is a, c, g, or t
  misc_feature (1485)..(1485): n is a, c, g, or t
  misc_feature (1500)..(1500): n is a, c, g, or t
  misc_feature (1506)..(1506): n is a, c, g, or t
  misc_feature (1542)..(1545): n is a, c, g, or t
  misc_feature (1572)..(1572): n is a, c, g, or t
  misc_feature (1644)..(1644): n is a, c, g, or t
  misc_feature (1653)..(1653): n is a, c, g, or t
  misc_feature (1659)..(1659): n is a, c, g, or t
  misc_feature (1680)..(1680): n is a, c, g, or t
  misc_feature (1683)..(1683): n is a, c, g, or t
  misc_feature (1686)..(1686): n is a, c, g, or t
  misc_feature (1701)..(1701): n is a, c, g, or t
  misc_feature (1707)..(1707): n is a, c, g, or t
  misc_feature (1881)..(1881): n is a, c, g, or t
  misc_feature (1926)..(1926): n is a, c, g, or t
  misc_feature (1953)..(1953): n is a, c, g, or t
  misc_feature (1994)..(1995): n is a, c, g, or t
  misc_feature (2004)..(2004): n is a, c, g, or t
  misc_feature (2197)..(2197): n is a, c, g, or t
  misc_feature (2320)..(2320): n is a, c, g, or t
  misc_feature (2368)..(2368): n is a, c, g, or t
  misc_feature (2617)..(2617): n is a, c, g, or t
  misc_feature (2785)..(2785): n is a, c, g, or t
  misc_feature (3050)..(3050): n is a, c, g, or t
  misc_feature (3056)..(3056): n is a, c, g, or t
  misc_feature (3155)..(3155): n is a, c, g, or t
  misc_feature (3167)..(3167): n is a, c, g, or t
  misc_feature (3194)..(3194): n is a, c, g, or t
  misc_feature (3208)..(3208): n is a, c, g, or t
  misc_feature (3212)..(3212): n is a, c, g, or t
  misc_feature (3227)..(3227): n is a, c, g, or t
  misc_feature (3248)..(3248): n is a, c, g, or t
  misc_feature (3263)..(3263): n is a, c, g, or t
  misc_feature (3266)..(3266): n is a, c, g, or t
  misc_feature (3302)..(3302): n is a, c, g, or t
  misc_feature (3386)..(3386): n is a, c, g, or t
  misc_feature (3389)..(3389): n is a, c, g, or t
  misc_feature (3407)..(3407): n is a, c, g, or t
  misc_feature (3422)..(3422): n is a, c, g, or t
  misc_feature (3434)..(3434): n is a, c, g, or t
  misc_feature (3470)..(3470): n is a, c, g, or t
  misc_feature (3491)..(3491): n is a, c, g, or t
  misc_feature (3506)..(3506): n is a, c, g, or t
  misc_feature (3512)..(3512): n is a, c, g, or t
  misc_feature (3599)..(3599): n is a, c, g, or t
  misc_feature (3731)..(3731): n is a, c, g, or t
  misc_feature (3782)..(3782): n is a, c, g, or t
agtggatgattcccgcacattgcggagctttcatgccgcggcggaatgtccacgcgcgcacttcttgttcacccgctgtaaagtaagtcgctaatcctaataagtggtatgctttttggattaagatatctaaccctgagatttcgatacccatttcttctaagaaggcttgtttctcttcttcctctaattcggctacctcttcttcgattttcgcacaaatcacnacgacttctgcatcttcttttgcagcatagtcttctactaattgcacatattggttatggccgccttccatcacgtcatcttcagagatgtttgcgatgtaaagcattggttttgttgttaaaaggaataagcctttcacgattggaagttcttcatctgtgaattcaatcgtacgtgctaattntccttcttctaanacaggtttgattttttctaagacngcaagttctgcaaccgcgtctttatcttttgttttcgcaatttttgccacacgagcgatacgtttgtccactgactcaaggtcggccaacactaactctaggttgatngtttcgatgtcggcgattgggtcnactttcccagccacgtgtgtaatattttcgtcttcaaaacaacgaaccacttggcaaatcgcatctacttgacggatatggcttaagaatttatttccaagaccttccccgcggcttgcccctttaacgatncccgcgatatctgtaaattcaaatgtcgttgggacagttttctttggtttcactaattctgttagtttttgtaaacgaaggtctggtacttctaccactccgacgtttgggtcaatcgtcgcaaacggatagttcgctgcttcgacccctgcttttgtaattgcattaaataatgttgacttcccaacgtttggtaagccgacgattccagctgttaaggccatttgtcacactctttctttatttgttttcttcggcaacagaaatcgtcacctttttcatcttcttctcgaattcccgtcttggcattaggaccatttgaccacagtgatcacacttgatacgaatgtccatccccatacggatgatttcccaggaattcgtttggcacgcatgcggctttttcatttccacatgatcgtgtaattgatacgttgttcctgctttcatacagactcctttttaatcgtctaattcgatttctaatacttctaaaatacgtgttaaatccttttgagaaaggtattcaatctcgatttttccacgntcgcctttttcgacgatttgcacgcttgttccaaatttatccatcaagcgttcttcngactcaacgatatacatngatttcttcggtttcgctncttttttancaaccttnttnactggttcattaatngattgaacgagttgttccaangcacgaaccgttaanccttccttcaccgcttttttagcgacnggtangattttcgtttggtcttttaatccaagnaaagtacgtgcatgncctgcngataactctccgctttgaacgagttcttgtacaggnnnnggcaatgttaataaacgtaagaagttngccacatatgaacggctcttgccgacacggtttgcgacttcttcttgttttaatttcaatgaatccatcaangtgcggtangccatngcttcatctaatggtttcaanttntcncgttgtaagttttcnacaacngcgatttgaatcatcgtttcttcagagtagtcacgtacgatggccggaatcgtttctttctcggctaatttagacgcacgcagacgacgttccccagccacaagctcgtagcctttaattttcgacttacgaacgatgattggttggaagactccattttgacgaatcgattcngctaattctgccaagccctcttcatcaaactctttacgaggttgntatgggtttggacgaatttctgaaacngcaatttgttgaatttgttctgaatcttgaacttgctccanngcatcgatngtatccaagtcattcataaagagcgcatcaataccgcgtccaagaccttttcctttttgatttttactcatgtgccaacacttcctttgctaactccatgtacacttcagcaccacgagagcgtggatcatagtcgacaatcgcttgtccgtaacttggcgcctcagatagacgtacgtttcgaggaataatngttttatatactttttcacggaaatacttaatcacatcgtctttcacttcgttccctaagttcgtacgcgcatcgtacatcgttaaaagaacgccctcaatcttcaactgcggattgaagtgnttgcgaaccatcgtgatcgtgttcatgagttgtgacaacccttcaagngcgtagtattcacattgcacagggattagaactgtgtcgctggccgtaaaagcattcattgtcaaatgccctagtgaaggtgggcagtcgataaagatataatcgtagtcatctttaatcttcttcacggcttccttcaagcgttgttcacgacgtggttgactcgttaactcgatttcggcacctgctaactgaatcgtagaaggagcaatcatcaagttttcgcgcgttgtcggtacaatgacatcngccattggtacttggttcactaaaacatcatatacatcttgttctagctctcctttttgcacgccaagaccactcgtcgcatttccttgagggtcactatcaataatcaatacttttttgccatgaacggcaagtgctgcagccaaactcactgtcgaagttgtcttnccaactccacctttttggttggcaacggatatcacacgtcccatattcttcctccatgttttcttgttataaaaaagggagaatgcaagcattctccctctcgcatgtctacaaaatgttcttcatttctcgcaatattttgttcttttctattgtaacaaaaaagcgcctttttttgtagtcatagcggtttattttacgaaaaaagcttcgcccttattgcggcaaagctttcttttgttgttcattaaattgtaagtacgcnatcgantattctttacgcatttgttcgccttcatccgttaccttgatttcaacatttgtaatcagatttccagcgccatctgtcttgatttttaactcgactttngacgtatccgtngtcgcaattccaagaaccgacgtcaangccttacgaatcgnttcntcgtttcctgtatangtcttctcgtatccagagaangtcttcttccaaggnacntcttgatgaatttccttcgttaattgaatcaccttngcatacgggaaaacaaccgtattttgaagacttgaggctgccgtgatggtttgttcccacttgtcttgatagtagcgaataaanccnacattggcatccgcaatnacttcgagttggttngttaccttaccngcatttttatcgattttcgagccgtatcctgtgccntctttccacgcgctagcactngccaccgtttgtgcnccaggngttttcgacccttccttatagtccgattgcttcacggtaatatgataattggaaaccgactcttcagaacttacgatttggtcttgnaccgcctctgttgataagccatttccacaagcagataaaacgcatagaaacgccattaatactgtacttttaatccatttcatgattttacctcctccttatcatccgttttattatagcaaacttccttcnaaaattctcttaaaataaaatattagaaaaatagctacaaaataagctggncactaggcccagcttacacagtttgcgtggcaacgtcctaccctcgcagggagaaacccccaactactatcggcgctaagaagcttaacttctgtgttcgagatgggaacaggtgtatccttcttgccatcgtcaccacactttatcttctgaaaaaactttcgttctttcaaaactgaatctatatccaactccatcaatctaccagctatacaact

SEQ ID NO: 511 - DNA, 4000 bp, Escherichia coli
  misc_feature (158)..(158): n is a, c, g, or t
  misc_feature (283)..(283): n is a, c, g, or t
  misc_feature (290)..(290): n is a, c, g, or t
  misc_feature (338)..(338): n is a, c, g, or t
  misc_feature (437)..(437): n is a, c, g, or t
  misc_feature (563)..(563): n is a, c, g, or t
  misc_feature (1047)..(1047): n is a, c, g, or t
  misc_feature (1176)..(1176): n is a, c, g, or t
  misc_feature (1599)..(1599): n is a, c, g, or t
  misc_feature (1706)..(1706): n is a, c, g, or t
  misc_feature (1742)..(1742): n is a, c, g, or t
  misc_feature (1796)..(1796): n is a, c, g, or t
  misc_feature (1801)..(1801): n is a, c, g, or t
  misc_feature (1808)..(1808): n is a, c, g, or t
  misc_feature (1820)..(1820): n is a, c, g, or t
  misc_feature (1823)..(1823): n is a, c, g, or t
  misc_feature (1834)..(1834): n is a, c, g, or t
  misc_feature (1848)..(1848): n is a, c, g, or t
  misc_feature (1856)..(1856): n is a, c, g, or t
  misc_feature (1925)..(1925): n is a, c, g, or t
  misc_feature (1957)..(1957): n is a, c, g, or t
  misc_feature (1960)..(1961): n is a, c, g, or t
  misc_feature (1974)..(1974): n is a, c, g, or t
  misc_feature (1987)..(1987): n is a, c, g, or t
  misc_feature (2008)..(2008): n is a, c, g, or t
ggtcaagatcaacactgtaattagggtaaaaccattttgcttgttatacactgccagctccgtatgctttgactaatattgcattagttaaggcaatatcaatgttaataccattaccgaactgagctggtaaatcatttggctttacagtaacggtnacaagctcaccggcgatatcaaatgacaaagcttcgattcctgtcagtaatcgctctgaggcagcgccatcgagtgaacacattaagttgctaccatttaagctatatacttcaaccacctgcgnagttgtngcagagccatcacaggcaatgacaccacttggctgagtaatagtaatngtgcttttatctgcactgatggtgggtgttagttgtgtttgctttatgctgcggttgaatactttactggtatagcgaatcacttcttgagcgttttcnagctctttactcacctcaatggtgcttttaatcgccgagtaagacaagctcactcccgctaataaaaaagcgccagctgccaatgccaccatcagttcaactaaggtaaaaccctgaacgcgtttnttcatgagcacaccgccgttaaatcaggaaaactggcatttagactaatttgattttctgcattgtctgtcatgcgtttatcaacccaagctacattaatttgcatgtcatcactgtaagtagctgggatcgtcagctgataatcactcacttgtggcgcgagcgaagctctaaatgtcgcgtcttgaaaaagtgcggtattagttttttgaatttcacaaatgcgtggccacaaacgctcaatggtgttttgcccttgaataagtgacacagtgtaatcaaaactattggttgcatattgcagcgattttagctgcgctgccgccaagcctaataatgcgatgccagcgatcaccactgaaatcatcacttctaataatgaaaagcctgcctgcttattcatgcacatcctcgctgtgaattttctactaaccagttttggccacttttaagcacacacatcacgtaatcagtggtatttgtntgctcatctttcactaaaatttcagcttgtttatcaacttcgccactggcactaatggccaatgcgactaaattgacggcaacgccgctttttgtgaccgaaaattcttttaaaaccgtgtctacgccnccctcgttgagggtcacttgccaactattattactaacaactaggttaataggtttgtcgcgtttgaccgcttcactgcgtgcaaatttataagcactatttaattgatttgcagtagttacgacgcgatcttgcaaaatttgctgactaaaagacgggaaagcaagggctgccataatgccaataacactcagcacaaccattaactcaattaaggtaaaccctgcaattcgacgcaattgtgttactcccagcaatcactaaatgaagcgctataactaccatcatgtttaacggttaagtcaccacagcgatcactcgcttgcgccgaacccgatttaggagcggcttttaaactgtagccacgatttttaaaatcgcttacagcacctgatactttatctgttgctgtgtaagtaaggntgtaatagtcagtattttgagttgcaaatgcattggggtagccgccatttcgtgaataaattcgttcaagactggcgctgtattgcagtaactcttgttgaatatcngcacggcgactacgttgcatgtgctcagtgtaagcnggcagtgctacgctatacagaatccctaaaatagcgatcacgataagaatttcnactantgtaaancctgtttgtttnccnattccatgtgntactaatgcacttntcaacctnaaccccttaatactttttaaccagcacaatataaatgacagcgttgtcagtgtcaattttaaccaattnacttttactcattcgattatactaataagaanaannaaattaagaaaanagaacgtatgttnttaaaataggtaataatatangattagtatttgtatgtttaaaatatagaaaccaatactattggatgacaactgaagaagcaatagcggtacaaaatgctacaatttataaatttcaggcacaaaaaagccgcacctaagtgcggctttttttacttaatattgctattaagcttcagcgataacgattactttgatagtagccgatacgtctgagtgtactgcgattgctacgtcaaattcgccagtctcacggatagtacctagaggtaaacgaacttctgatttagcaacttcaacgccaacagctgaaatagcttcagcgatgtcgcgagtaccgatagaaccgaataacttgccttcgtcaccagctttagaaactagtgtaacttcagctaatgcttctaacttgtcagcgcgagcttgagcagcagctagatcttcagcgatcttagcttctaaatcagcacgacgtgcttcgaaagtttcgatgttagctttagttgcaggaactgccttaccttgtgggaaaaggaagttacgtgcgaagccagatttaactacaacctggtcacctaggccacctaggtttgcgatcttgtctagtagaataacttgcatgtctctacaccttttaaaaactgttaatccgctgcttacttatgtaagtcagtgtatggaagaagggctaagtagcgagcacgcttgatagcagttgctagctgacgctgatatttagcgctagtacctgtgatacggctaggtacgattttgccactttctgtaacatagtttctaagagtagctagatctttataatcgatttgttgtacgccttccgctttgaagcggcagaacttacgacgtctgaaataacgtgccatgagtaaaattcctcaaaaaattctttctatatgttgagcatgcaagaccaattggcttaagccgtttcggccttcgtgacggtttaaaaaccccgtcacttgcacttgttgcccaacgtgcaattgttgagtttgttgttgcattggcgtgccgctggcaacaacttgaagcctgacataactattacggttaaggtctgcttcaacttgcatcgatttatgttcaagaacaaaaatacaatgcggtataccagcagggctttgactatatttaggtgttttacaaacaaccccagatagtgtcagctgattcatataaggattaagcggttggctcatctttttgtctcaactgcaagcgccatgcttgaactcaaaacgattaagcagctggtgcttctttcttctcttctttcgcaagaggagatgcttcagttacagcgtctttagtacgcataactaagttacgaagcactgcatcgttgtagcggaaagtagtttctagctcgctgattacttcagtaggtgcttcaacgttcataagaacataatgagctttgtgaagcttgtcgattgggtaagccaattgacgacggccccagtcttcaagacggtggatagtaccaccagcttcagtgatagaaccagtataacgttcgatcataccaggtacttgctcactctgatcagggtgaaccatgaatacgatttcgtaatgacgcatggatattccttacggttaatagagccttctaccgtttcggccagtcggtttaaggcaaggaattaaatttaataagccgaaatgagcgcgcattttacgcttagattgataattaagcaagataaaacagcaagccaagctagattattgtgctctaataataatttctaagcgctaaaaacaaaaaacccagccgaggctgggtttttgaattctgaaaactaaaattacttgattttagcttctttgaaaatcacgtgtttacgagctttaggatcgtattttttgatttccattttttcaggcatgttacgcttgttcttgtcggtagtgtagaaaaaaccagtaccagcagttgaaactaaacggatcttatcgcgcatgattcagttccttaaacttttt

SEQ ID NO: 512 - DNA, 4000 bp, Escherichia coli
  misc_feature (1)..(33): n is a, c, g, or t
  misc_feature (35)..(47): n is a, c, g, or t
  misc_feature (49)..(60): n is a, c, g, or t
  misc_feature (65)..(82): n is a, c, g, or t
  misc_feature (85)..(87): n is a, c, g, or t
  misc_feature (89)..(89): n is a, c, g, or t
  misc_feature (91)..(102): n is a, c, g, or t
  misc_feature (106)..(110): n is a, c, g, or t
  misc_feature (112)..(125): n is a, c, g, or t
  misc_feature (127)..(140): n is a, c, g, or t
  misc_feature (146)..(149): n is a, c, g, or t
  misc_feature (153)..(153): n is a, c, g, or t
  misc_feature (160)..(161): n is a, c, g, or t
  misc_feature (163)..(168): n is a, c, g, or t
  misc_feature (171)..(175): n is a, c, g, or t
  misc_feature (182)..(199): n is a, c, g, or t
  misc_feature (202)..(212): n is a, c, g, or t
  misc_feature (214)..(231): n is a, c, g, or t
  misc_feature (233)..(235): n is a, c, g, or t
  misc_feature (237)..(238): n is a, c, g, or t
  misc_feature (240)..(254): n is a, c, g, or t
  misc_feature (256)..(257): n is a, c, g, or t
  misc_feature (262)..(274): n is a, c, g, or t
  misc_feature (277)..(283): n is a, c, g, or t
  misc_feature (285)..(301): n is a, c, g, or t
  misc_feature (303)..(318): n is a, c, g, or t
  misc_feature (320)..(337): n is a, c, g, or t
  misc_feature (340)..(347): n is a, c, g, or t
  misc_feature (349)..(351): n is a, c, g, or t
  misc_feature (354)..(356): n is a, c, g, or t
  misc_feature (361)..(374): n is a, c, g, or t
  misc_feature (381)..(381): n is a, c, g, or t
  misc_feature (384)..(384): n is a, c, g, or t
  misc_feature (386)..(388): n is a, c, g, or t
  misc_feature (394)..(403): n is a, c, g, or t
  misc_feature (407)..(410): n is a, c, g, or t
  misc_feature (412)..(415): n is a, c, g, or t
  misc_feature (417)..(419): n is a, c, g, or t
  misc_feature (423)..(433): n is a, c, g, or t
  misc_feature (437)..(437): n is a, c, g, or t
  misc_feature (439)..(443): n is a, c, g, or t
  misc_feature (445)..(452): n is a, c, g, or t
  misc_feature (455)..(457): n is a, c, g, or t
  misc_feature (459)..(465): n is a, c, g, or t
  misc_feature (467)..(467): n is a, c, g, or t
  misc_feature (470)..(472): n is a, c, g, or t
  misc_feature (475)..(478): n is a, c, g, or t
  misc_feature (480)..(482): n is a, c, g, or t
  misc_feature (487)..(487): n is a, c, g, or t
  misc_feature (489)..(490): n is a, c, g, or t
  misc_feature (492)..(492): n is a, c, g, or t
  misc_feature (497)..(501): n is a, c, g, or t
  misc_feature (508)..(509): n is a, c, g, or t
  misc_feature (512)..(512): n is a, c, g, or t
  misc_feature (517)..(517): n is a, c, g, or t
  misc_feature (521)..(522): n is a, c, g, or t
  misc_feature (529)..(529): n is a, c, g, or t
  misc_feature (531)..(532): n is a, c, g, or t
  misc_feature (534)..(536): n is a, c, g, or t
  misc_feature (538)..(538): n is a, c, g, or t
  misc_feature (540)..(541): n is a, c, g, or t
  misc_feature (543)..(543): n is a, c, g, or t
  misc_feature (551)..(556): n is a, c, g, or t
  misc_feature (558)..(558): n is a, c, g, or t
  misc_feature (562)..(562): n is a, c, g, or t
  misc_feature (564)..(565): n is a, c, g, or t
  misc_feature (567)..(568): n is a, c, g, or t
  misc_feature (571)..(571): n is a, c, g, or t
  misc_feature (573)..(578): n is a, c, g, or t
  misc_feature (581)..(581): n is a, c, g, or t
  misc_feature (583)..(584): n is a, c, g, or t
  misc_feature (587)..(587): n is a, c, g, or t
  misc_feature (589)..(589): n is a, c, g, or t
  misc_feature (591)..(591): n is a, c, g, or t
  misc_feature (593)..(596): n is a, c, g, or t
  misc_feature (599)..(601): n is a, c, g, or t
  misc_feature (604)..(604): n is a, c, g, or t
  misc_feature (608)..(608): n is a, c, g, or t
  misc_feature (614)..(615): n is a, c, g, or t
  misc_feature (619)..(619): n is a, c, g, or t
  misc_feature (623)..(623): n is a, c, g, or t
  misc_feature (625)..(626): n is a, c, g, or t
  misc_feature (630)..(630): n is a, c, g, or t
  misc_feature (633)..(633): n is a, c, g, or t
  misc_feature (635)..(636): n is a, c, g, or t
  misc_feature (639)..(640): n is a, c, g, or t
  misc_feature (646)..(647): n is a, c, g, or t
  misc_feature (650)..(651): n is a, c, g, or t
  misc_feature (661)..(661): n is a, c, g, or t
  misc_feature (665)..(665): n is a, c, g, or t
  misc_feature (667)..(668): n is a, c, g, or t
  misc_feature (670)..(670): n is a, c, g, or t
  misc_feature (679)..(679): n is a, c, g, or t
  misc_feature (687)..(687): n is a, c, g, or t
  misc_feature (691)..(691): n is a, c, g, or t
  misc_feature (695)..(695): n is a, c, g, or t
  misc_feature (697)..(698): n is a, c, g, or t
  misc_feature (702)..(703): n is a, c, g, or t
  misc_feature (705)..(705): n is a, c, g, or t
  misc_feature (707)..(710): n is a, c, g, or t
  misc_feature (712)..(712): n is a, c, g, or t
  misc_feature (715)..(716): n is a, c, g, or t
  misc_feature (720)..(721): n is a, c, g, or t
  misc_feature (723)..(726): n is a, c, g, or t
  misc_feature (729)..(729): n is a, c, g, or t
  misc_feature (733)..(733): n is a, c, g, or t
  misc_feature (735)..(735): n is a, c, g, or t
  misc_feature (737)..(737): n is a, c, g, or t
  misc_feature (955)..(955): n is a, c, g, or t
  misc_feature (1175)..(1175): n is a, c, g, or t
  misc_feature (1346)..(1346): n is a, c, g, or t
  misc_feature (1415)..(1415): n is a, c, g, or t
  misc_feature (1424)..(1424): n is a, c, g, or t
  misc_feature (1436)..(1436): n is a, c, g, or t
  misc_feature (2303)..(2304): n is a, c, g, or t
  misc_feature (2327)..(2327): n is a, c, g, or t
  misc_feature (2334)..(2334): n is a, c, g, or t
  misc_feature (2348)..(2348): n is a, c, g, or t
  misc_feature (2351)..(2351): n is a, c, g, or t
  misc_feature (2357)..(2357): n is a, c, g, or t
  misc_feature (2361)..(2361): n is a, c, g, or t
  misc_feature (2365)..(2366): n is a, c, g, or t
  misc_feature (2369)..(2369): n is a, c, g, or t
  misc_feature (2414)..(2415): n is a, c, g, or t
  misc_feature (2417)..(2417): n is a, c, g, or t
  misc_feature (2421)..(2421): n is a, c, g, or t
  misc_feature (2431)..(2431): n is a, c, g, or t
  misc_feature (2462)..(2462): n is a, c, g, or t
  misc_feature (2545)..(2545): n is a, c, g, or t
  misc_feature (2564)..(2564): n is a, c, g, or t
  misc_feature (2566)..(2566): n is a, c, g, or t
  misc_feature (2612)..(2612): n is a, c, g, or t
  misc_feature (2645)..(2645): n is a, c, g, or t
  misc_feature (2663)..(2663): n is a, c, g, or t
  misc_feature (2705)..(2706): n is a, c, g, or t
  misc_feature (2708)..(2708): n is a, c, g, or t
  misc_feature (2719)..(2720): n is a, c, g, or t
  misc_feature (2722)..(2724): n is a, c, g, or t
  misc_feature (2727)..(2727): n is a, c, g, or t
  misc_feature (2751)..(2751): n is a, c, g, or t
  misc_feature (2756)..(2756): n is a, c, g, or t
  misc_feature (2773)..(2773): n is a, c, g, or t
  misc_feature (2779)..(2779): n is a, c, g, or t
  misc_feature (2785)..(2786): n is a, c, g, or t
  misc_feature (2789)..(2789): n is a, c, g, or t
  misc_feature (2797)..(2797): n is a, c, g, or t
  misc_feature (2799)..(2799): n is a, c, g, or t
  misc_feature (2838)..(2838): n is a, c, g, or t
  misc_feature (2842)..(2842): n is a, c, g, or t
  misc_feature (2852)..(2852): n is a, c, g, or t
  misc_feature (2931)..(2931): n is a, c, g, or t
  misc_feature (2954)..(2954): n is a, c, g, or t
  misc_feature (2967)..(2967): n is a, c, g, or t
  misc_feature (2991)..(2992): n is a, c, g, or t
  misc_feature (2995)..(2995): n is a, c, g, or t
  misc_feature (3020)..(3020): n is a, c, g, or t
  misc_feature (3027)..(3027): n is a, c, g, or t
  misc_feature (3044)..(3044): n is a, c, g, or t
  misc_feature (3046)..(3046): n is a, c, g, or t
  misc_feature (3101)..(3103): n is a, c, g, or t
  misc_feature (3109)..(3109): n is a, c, g, or t
  misc_feature (3111)..(3111): n is a, c, g, or t
  misc_feature (3113)..(3113): n is a, c, g, or t
  misc_feature (3115)..(3115): n is a, c, g, or t
  misc_feature (3117)..(3117): n is a, c, g, or t
  misc_feature (3122)..(3122): n is a, c, g, or t
  misc_feature (3125)..(3125): n is a, c, g, or t
  misc_feature (3127)..(3128): n is a, c, g, or t
  misc_feature (3130)..(3132): n is a, c, g, or t
  misc_feature (3135)..(3135): n is a, c, g, or t
  misc_feature (3137)..(3139): n is a, c, g, or t
  misc_feature (3142)..(3143): n is a, c, g, or t
  misc_feature (3145)..(3145): n is a, c, g, or t
  misc_feature (3147)..(3147): n is a, c, g, or t
  misc_feature (3150)..(3153): n is a, c, g, or t
  misc_feature (3156)..(3156): n is a, c, g, or t
  misc_feature (3161)..(3161): n is a, c, g, or t
  misc_feature (3163)..(3163): n is a, c, g, or t
  misc_feature (3167)..(3167): n is a, c, g, or t
  misc_feature (3170)..(3171): n is a, c, g, or t
  misc_feature (3173)..(3173): n is a, c, g, or t
  misc_feature (3175)..(3178): n is a, c, g, or t
  misc_feature (3180)..(3183): n is a, c, g, or t
  misc_feature (3186)..(3186): n is a, c, g, or t
  misc_feature (3189)..(3191): n is a, c, g, or t
  misc_feature (3194)..(3197): n is a, c, g, or t
  misc_feature (3200)..(3201): n is a, c, g, or t
  misc_feature (3203)..(3210): n is a, c, g, or t
  misc_feature (3212)..(3212): n is a, c, g, or t
  misc_feature (3217)..(3219): n is a, c, g, or t
  misc_feature (3221)..(3224): n is a, c, g, or t
  misc_feature (3226)..(3227): n is a, c, g, or t
  misc_feature (3232)..(3232): n is a, c, g, or t
  misc_feature (3236)..(3236): n is a, c, g, or t
  misc_feature (3238)..(3238): n is a, c, g, or t
  misc_feature (3241)..(3242): n is a, c, g, or t
  misc_feature (3245)..(3245): n is a, c, g, or t
  misc_feature (3247)..(3247): n is a, c, g, or t
  misc_feature (3250)..(3250): n is a, c, g, or t
  misc_feature (3253)..(3254): n is a, c, g, or t
  misc_feature (3257)..(3257): n is a, c, g, or t
  misc_feature (3259)..(3259): n is a, c, g, or t
  misc_feature (3261)..(3263): n is a, c, g, or t
  misc_feature (3265)..(3265): n is a, c, g, or t
  misc_feature (3267)..(3271): n is a, c, g, or t
  misc_feature (3273)..(3274): n is a, c, g, or t
  misc_feature (3277)..(3279): n is a, c, g, or t
  misc_feature (3282)..(3282): n is a, c, g, or t
  misc_feature (3285)..(3285): n is a, c, g, or t
  misc_feature (3288)..(3290): n is a, c, g, or t
  misc_feature (3295)..(3295): n is a, c, g, or t
  misc_feature (3297)..(3297): n is a, c, g, or t
  misc_feature (3299)..(3299): n is a, c, g, or t
  misc_feature (3303)..(3305): n is a, c, g, or t
  misc_feature (3310)..(3310): n is a, c, g, or t
  misc_feature (3314)..(3315): n is a, c, g, or t
  misc_feature (3317)..(3318): n is a, c, g, or t
  misc_feature (3320)..(3322): n is a, c, g, or t
  misc_feature (3324)..(3324): n is a, c, g, or t
  misc_feature (3327)..(3327): n is a, c, g, or t
  misc_feature (3329)..(3329): n is a, c, g, or t
  misc_feature (3331)..(3333): n is a, c, g, or t
  misc_feature (3336)..(3336): n is a, c, g, or t
  misc_feature (3338)..(3338): n is a, c, g, or t
  misc_feature (3342)..(3343): n is a, c, g, or t
  misc_feature (3345)..(3346): n is a, c, g, or t
  misc_feature (3348)..(3349): n is a, c, g, or t
  misc_feature (3352)..(3352): n is a, c, g, or t
  misc_feature (3354)..(3354): n is a, c, g, or t
  misc_feature (3358)..(3358): n is a, c, g, or t
  misc_feature (3360)..(3360): n is a, c, g, or t
  misc_feature (3366)..(3366): n is a, c, g, or t
  misc_feature (3370)..(3370): n is a, c, g, or t
  misc_feature (3373)..(3373): n is a, c, g, or t
  misc_feature (3375)..(3376): n is a, c, g, or t
  misc_feature (3378)..(3378): n is a, c, g, or t
  misc_feature (3381)..(3381): n is a, c, g, or t
  misc_feature (3383)..(3383): n is a, c, g, or t
  misc_feature (3385)..(3387): n is a, c, g, or t
  misc_feature (3390)..(3391): n is a, c, g, or t
  misc_feature (3393)..(3396): n is a, c, g, or t
  misc_feature (3398)..(3398): n is a, c, g, or t
  misc_feature (3400)..(3400): n is a, c, g, or t
  misc_feature (3404)..(3404): n is a, c, g, or t
  misc_feature (3412)..(3413): n is a, c, g, or t
  misc_feature (3417)..(3418): n is a, c, g, or t
  misc_feature (3421)..(3421): n is a, c, g, or t
  misc_feature (3423)..(3423): n is a, c, g, or t
  misc_feature (3430)..(3430): n is a, c, g, or t
  misc_feature (3433)..(3434): n is a, c, g, or t
  misc_feature (3437)..(3438): n is a, c, g, or t
  misc_feature (3441)..(3442): n is a, c, g, or t
  misc_feature (3444)..(3445): n is a, c, g, or t
  misc_feature (3447)..(3448): n is a, c, g, or t
  misc_feature (3450)..(3459): n is a, c, g, or t
  misc_feature (3462)..(3468): n is a, c, g, or t
  misc_feature (3472)..(3472): n is a, c, g, or t
  misc_feature (3475)..(3476): n is a, c, g, or t
  misc_feature (3478)..(3480): n is a, c, g, or t
  misc_feature (3484)..(3484): n is a, c, g, or t
  misc_feature (3486)..(3487): n is a, c, g, or t
  misc_feature (3489)..(3489): n is a, c, g, or t
  misc_feature (3491)..(3492): n is a, c, g, or t
  misc_feature (3494)..(3496): n is a, c, g, or t
  misc_feature (3498)..(3498): n is a, c, g, or t
  misc_feature (3500)..(3501): n is a, c, g, or t
  misc_feature (3504)..(3504): n is a, c, g, or t
  misc_feature (3508)..(3508): n is a, c, g, or t
  misc_feature (3511)..(3511): n is a, c, g, or t
  misc_feature (3513)..(3513): n is a, c, g, or t
  misc_feature (3516)..(3517): n is a, c, g, or t
  misc_feature (3519)..(3522): n is a, c, g, or t
  misc_feature (3524)..(3525): n is a, c, g, or t
  misc_feature (3527)..(3527): n is a, c, g, or t
  misc_feature (3529)..(3529): n is a, c, g, or t
  misc_feature (3531)..(3532): n is a, c, g, or t
  misc_feature (3536)..(3536): n is a, c, g, or t
  misc_feature (3539)..(3539): n is a, c, g, or t
  misc_feature (3544)..(3547): n is a, c, g, or t
  misc_feature (3549)..(3550): n is a, c, g, or t
  misc_feature (3553)..(3554): n is a, c, g, or t
  misc_feature (3556)..(3557): n is a, c, g, or t
  misc_feature (3559)..(3559): n is a, c, g, or t
  misc_feature (3562)..(3562): n is a, c, g, or t
  misc_feature (3565)..(3565): n is a, c, g, or t
  misc_feature (3567)..(3567): n is a, c, g, or t
  misc_feature (3571)..(3571): n is a, c, g, or t
  misc_feature (3574)..(3574): n is a, c, g, or t
  misc_feature (3577)..(3577): n is a, c, g, or t
  misc_feature (3579)..(3579): n is a, c, g, or t
  misc_feature (3581)..(3581): n is a, c, g, or t
  misc_feature (3583)..(3585): n is a, c, g, or t
  misc_feature (3589)..(3589): n is a, c, g, or t
  misc_feature (3592)..(3593): n is a, c, g, or t
  misc_feature (3595)..(3597): n is a, c, g, or t
  misc_feature (3599)..(3600): n is a, c, g, or t
  misc_feature (3603)..(3609): n is a, c, g, or t
  misc_feature (3611)..(3611): n is a, c, g, or t
  misc_feature (3616)..(3616): n is a, c, g, or t
  misc_feature (3621)..(3623): n is a, c, g, or t
  misc_feature (3627)..(3627): n is a, c, g, or t
  misc_feature (3629)..(3629): n is a, c, g, or t
  misc_feature (3632)..(3633): n is a, c, g, or t
  misc_feature (3635)..(3636): n is a, c, g, or t
  misc_feature (3638)..(3639): n is a, c, g, or t
  misc_feature (3642)..(3643): n is a, c, g, or t
  misc_feature (3650)..(3653): n is a, c, g, or t
  misc_feature (3655)..(3655): n is a, c, g, or t
  misc_feature (3657)..(3657): n is a, c, g, or t
  misc_feature (3662)..(3663): n is a, c, g, or t
  misc_feature (3665)..(3666): n is a, c, g, or t
  misc_feature (3671)..(3673): n is a, c, g, or t
  misc_feature (3676)..(3677): n is a, c, g, or t
  misc_feature (3682)..(3682): n is a, c, g, or t
  misc_feature (3684)..(3684): n is a, c, g, or t
  misc_feature (3686)..(3688): n is a, c, g, or t
  misc_feature (3690)..(3690): n is a, c, g, or t
  misc_feature (3694)..(3695): n is a, c, g, or t
  misc_feature (3697)..(3697): n is a, c, g, or t
  misc_feature (3702)..(3702): n is a, c, g, or t
  misc_feature (3704)..(3704): n is a, c, g, or t
  misc_feature (3706)..(3709): n is a, c, g, or t
  misc_feature (3711)..(3713): n is a, c, g, or t
  misc_feature (3716)..(3718): n is a, c, g, or t
  misc_feature (3721)..(3722): n is a, c, g, or t
  misc_feature (3725)..(3725): n is a, c, g, or t
  misc_feature (3729)..(3729): n is a, c, g, or t
  misc_feature (3731)..(3734): n is a, c, g, or t
  misc_feature (3736)..(3736): n is a, c, g, or t
  misc_feature (3738)..(3739): n is a, c, g, or t
  misc_feature (3742)..(3749): n is a, c, g, or t
  misc_feature (3753)..(3753): n is a, c, g, or t
  misc_feature (3755)..(3761): n is a, c, g, or t
  misc_feature (3764)..(3765): n is a, c, g, or t
  misc_feature (3769)..(3770): n is a, c, g, or t
  misc_feature (3772)..(3774): n is a, c, g, or t
  misc_feature (3777)..(3777): n is a, c, g, or t
  misc_feature (3779)..(3779): n is a, c, g, or t
  misc_feature (3782)..(3785): n is a, c, g, or t
  misc_feature (3787)..(3788): n is a, c, g, or t
  misc_feature (3791)..(3791): n is a, c, g, or t
  misc_feature (3793)..(3793): n is a, c, g, or t
  misc_feature (3796)..(3799): n is a, c, g, or t
  misc_feature (3802)..(3802): n is a, c, g, or t
  misc_feature (3804)..(3807): n is a, c, g, or t
  misc_feature (3809)..(3811): n is a, c, g, or t
  misc_feature (3814)..(3814): n is a, c, g, or t
  misc_feature (3817)..(3817): n is a, c, g, or t
  misc_feature (3821)..(3822): n is a, c, g, or t
  misc_feature (3824)..(3825): n is a, c, g, or t
  misc_feature (3827)..(3827): n is a, c, g, or t
  misc_feature (3829)..(3829): n is a, c, g, or t
  misc_feature (3832)..(3832): n is a, c, g, or t
  misc_feature (3836)..(3837): n is a, c, g, or t
  misc_feature (3839)..(3842): n is a, c, g, or t
  misc_feature (3845)..(3845): n is a, c, g, or t
  misc_feature (3848)..(3854): n is a, c, g, or t
  misc_feature (3856)..(3858): n is a, c, g, or t
  misc_feature (3860)..(3860): n is a, c, g, or t
  misc_feature (3862)..(3862): n is a, c, g, or t
  misc_feature (3864)..(3866): n is a, c, g, or t
  misc_feature (3868)..(3870): n is a, c, g, or t
  misc_feature (3872)..(3872): n is a, c, g, or t
  misc_feature (3875)..(3883): n is a, c, g, or t
  misc_feature (3885)..(3886): n is a, c, g, or t
  misc_feature (3888)..(3888): n is a, c, g, or t
  misc_feature (3890)..(3896): n is a, c, g, or t
  misc_feature (3898)..(3898): n is a, c, g, or t
  misc_feature (3900)..(3900): n is a, c, g, or t
  misc_feature (3902)..(3902): n is a, c, g, or t
  misc_feature (3905)..(3907): n is a, c, g, or t
  misc_feature (3909)..(3911): n is a, c, g, or t
  misc_feature (3914)..(3915): n is a, c, g, or t
  misc_feature (3918)..(3918): n is a, c, g, or t
  misc_feature (3921)..(3924): n is a, c, g, or t
  misc_feature (3927)..(3927): n is a, c, g, or t
  misc_feature (3929)..(3929): n is a, c, g, or t
  misc_feature (3933)..(3933): n is a, c, g, or t
  misc_feature (3935)..(3937): n is a, c, g, or t
  misc_feature (3939)..(3941): n is a, c, g, or t
  misc_feature (3943)..(3943): n is a, c, g, or t
  misc_feature (3945)..(3945): n is a, c, g, or t
  misc_feature (3947)..(3947): n is a, c, g, or t
  misc_feature (3949)..(3953): n is a, c, g, or t
  misc_feature (3956)..(3961): n is a, c, g, or t
  misc_feature (3965)..(3966): n is a, c, g, or t
  misc_feature (3968)..(3970): n is a, c, g, or t
  misc_feature (3972)..(3972): n is a, c, g, or t
  misc_feature (3975)..(3975): n is a, c, g, or t
  misc_feature (3978)..(3979): n is a, c, g, or t
  misc_feature (3984)..(3984): n is a, c, g, or t
  misc_feature (3986)..(3986): n is a, c, g, or t
  misc_feature (3989)..(3990): n is a, c, g, or t
  misc_feature (3993)..(3995): n is a, c, g, or t
  misc_feature (3997)..(3998): n is a, c, g, or t
  misc_feature (4000)..(4000): n is a, c, g, or t
nnnnnnnnnnnnnnnnnnnnnnnnnnnnnnnnntnnnnnnnnnnnnntnnnnnnnnnnnnttttnnnnnnnnnnnnnnnnnnttnnnantnnnnnnnnnnnntttnnnnntnnnnnnnnnnnnnntnnnnnnnnnnnnnntttttnnnntttnttttttnntnnnnnnttnnnnnttttttnnnnnnnnnnnnnnnnnnaannnnnnnnnnncnnnnnnnnnnnnnnnnnntnnntnntnnnnnnnnnnnnnnnannttttnnnnnnnnnnnnnttnnnnnnnannnnnnnnnnnnnnnnnannnnnnnnnnnnnnnnannnnnnnnnnnnnnnnnnttnnnnnnnntnnnaannnttttnnnnnnnnnnnnnnttttttnttntnnntttttnnnnnnnnnnaaannnnannnntnnnaaannnnnnnnnnntttnannnnnannnnnnnnttnnntnnnnnnntnttnnnatnnnntnnntttgngnntnttttnnnnnaaatttnnttntaaantttnnaattttngnngnnntntnntntaatttcnnnnnngntttntnngnnttntnnnnnnttngnnttntncntnnnnaannnaanaggnggcgcnngtgntgangnntggnaanannccnntttgtnnttnntgggcctccntttncnnanacaaaaatnaggatttnattnaaanannattnntnannnntnaannttanntnnnnccntcantncnaatttacaagtacaaatgtacttcaataatcaagaccaaaaagaaaaaaattcagaatccggttgatcctgccggacctgactgctatcggattgatactaagccatgcgagtcattgtagcaatacaaggcatacggctcagtaacgcgtagtcaacctaacctatggacgggaataacctcgggaaactgagaataatgcccgatagaacattatncctggaatggtttatgttccaaatgatttatcgccgtaggatgggactgcggcctatcagtttgttggtgaggtaatggcccaccaagactattacaggtacgggctctgagaggagtagcccggagatgggtactgagacacggacccaggccctatggggcgcagcaggcgagaaaactttgcaatgtgcgaaagcacgacaaggttaatccgagtgntttctgctaaagaaatcttttgttagtcctagaaacactaacgaataaggggtgggcaagttctggtgtcagccgccgcggtaaaaccagcacctcaagtggtcaggatgattattgggcctaaagcatccgtagccggctctgtaagttttcggttaaatctgtacgctnaacgtacaggctgccgggaatactgcagagctagggagtgggagaggtagacggtactcggtaggaagnggtaaaatnctttgatctatngatgaccacctgtggcgaaggcggtctaccagaacacgtccgacggtgagggatgaaagctgggggagcaaaccggattagatacccgggtagtcccagctgtaaactatgcaaactcagtgatgcattggcttgtggccaatgcagtgctgcagggaagccgttaagtttgccgcctgggaagtacgtacgcaagtatgaaacttaaaggaattggcgggggagcaccacaaggggtgaagcctgcggttcaattggagtcaacgccagaaatcttacccggagagacagcagaatgaaggtcaagctgaagactttaccagacaagctgagaggtggtgcatggccgtcgccagctcgtgccgtgagatgtcctgttaagtcaggtaacgagcgagatccctgcctctagttgccaccattactctcaggagtagtggggcgaattagcgggaccgccgcagttaatgcggaggaaggaaggggccacggcaggtcagtatgccccgaaactctggggccacacgcgggctgcaatggtaacgacaattggtttcgaatccgaaaggatgaggtaatcctcaaacgttaccacagttatgactgagggctgcaactcgccctcacgaatatggaatccctagtaactgcgtgtcattatcgcgcggtgaatacgtccctgctccttgcacacaccgcccgtcgtttcattgaagtgagcttttagcgaggtgacgtctaattggcgttatcgaacttgaggttcgtgacaagggaaaagtcgtaacaaggtgaccgtaggggaacctgcggtcggatcacctccttagacatggaaagtgtacgggtgtacataatcttcacatnnaatcatcgatgcaatgcatcacnaaagtgntgtatgaaggatgnagngggccntttnccgnnggnttgcaatgatcgtcgtgcatagtcgtgtaatatgtggctgaattnncnggtntaaagacgcnaataggtggattgctaggcttgagaagagangaaggacgtggcaagctgcgataagctcggggtaggcgcacgcatcctatgatcccgagatgtccgaatgagaatcttacacntttgtgtattccagtacantngtattggaagtcgaaccgtgggaattgaagcatcttagtaccacgnggaaaagaaatcaattgagatttcccaagtagnggcgaacgaaaaggaaanagcccaaactgaatccttcgggagatgtggtgttttggtatnntnatatggaatcnngnnncanagctgaaatgatctgaaaagttcnggaanagagggtgatacccccntaagcnaagtgnnaanggtcctantnatacccgagtagttgtccttggtagtgggcaatgaatangggngaaagtagcntccgaggctaaatatttctcaagaccgatagtggactagtaccgtgagggaaagctgaaaagtaccccggaaggggggngaaaagtgcatgaaacctattgnttacagacgtgcntggcatggaaggtgattttttcannttngagattctagcaatagagttgaagntttgatnttcaaatcatcagtgtnangcgttccgtctcgaaacacgggccaaggagctaactgtcatggcaagcttaaacnnnaaaagngnangngnagggnaancnngnnntcncnnnttnncnanaannnnggngaggngngtgnaanngngnnnngnnnnggnggnnnggnnnnaanncnnnnnnnntnttccnnngnnnnannaaggngggngnaannccncnggnggnnttnanannntntnnnnngnnaannnttnttntgnnntgggnanangggnnnaaaancaanntnnannngngcncncnnnttncnaccnnanngnntcncngggngnggtttntggngananngnttncngnnnagnncnnnnanangggngcgggggnnaaannccncnccccccnttnnaannccnnanngnnannnnnnnnnnaannnnnnncacnggnncnnntggngnnangnncnnngncnnaangggnttnanccnnannnnanntnangnncccnaanttttnnnnanngtnnanngnaanagngngttntcnccnananannngggnggnnannncnnaannnnnnntnctttnaaaannntgtnanaanntnncnnccnnggggggnnnncncnaaaanngnnggggnnnaannaaaanancnnnantttnnanaattntnannnnannnttnnnggnnggntggngnnnngntnnggnnnnnnnngggngnnnnnnnccnntggnncnnnttntnttnnnnannttngnggnnnnaanannnnannnttntgngaannannancnccncaanngnnnnggnttnnnnnnnannngntntnnncnnngnggnnnnnnnnncnnanannnnnnncnananagnnnannnaannggnaannnnttnanattntnnnannntntntnannnnnttnnnnnntatnntnnncntcnggnnaaggngngtnnaannntnntn

SEQ ID NO: 513 - DNA, 4000 bp, Escherichia coli
  misc_feature (1)..(7): n is a, c, g, or t
  misc_feature (9)..(9): n is a, c, g, or t
  misc_feature (11)..(17): n is a, c, g, or t
  misc_feature (19)..(20): n is a, c, g, or t
  misc_feature (23)..(24): n is a, c, g, or t
  misc_feature (28)..(29): n is a, c, g, or t
  misc_feature (31)..(31): n is a, c, g, or t
  misc_feature (39)..(39): n is a, c, g, or t
  misc_feature (122)..(122): n is a, c, g, or t
  misc_feature (219)..(219): n is a, c, g, or t
  misc_feature (632)..(634): n is a, c, g, or t
  misc_feature (640)..(643): n is a, c, g, or t
  misc_feature (649)..(649): n is a, c, g, or t
  misc_feature (651)..(651): n is a, c, g, or t
  misc_feature (656)..(657): n is a, c, g, or t
  misc_feature (660)..(661): n is a, c, g, or t
  misc_feature (663)..(666): n is a, c, g, or t
  misc_feature (671)..(671): n is a, c, g, or t
  misc_feature (673)..(675): n is a, c, g, or t
  misc_feature (677)..(677): n is a, c, g, or t
  misc_feature (679)..(680): n is a, c, g, or t
  misc_feature (682)..(683): n is a, c, g, or t
  misc_feature (685)..(686): n is a, c, g, or t
  misc_feature (689)..(689): n is a, c, g, or t
  misc_feature (696)..(696): n is a, c, g, or t
  misc_feature (698)..(698): n is a, c, g, or t
  misc_feature (706)..(706): n is a, c, g, or t
  misc_feature (711)..(711): n is a, c, g, or t
  misc_feature (713)..(714): n is a, c, g, or t
  misc_feature (718)..(718): n is a, c, g, or t
  misc_feature (720)..(720): n is a, c, g, or t
  misc_feature (725)..(726): n is a, c, g, or t
  misc_feature (729)..(729): n is a, c, g, or t
  misc_feature (733)..(733): n is a, c, g, or t
  misc_feature (777)..(777): n is a, c, g, or t
  misc_feature (1564)..(1564): n is a, c, g, or t
  misc_feature (1924)..(1924): n is a, c, g, or t
  misc_feature (1989)..(1989): n is a, c, g, or t
  misc_feature (1991)..(1993): n is a, c, g, or t
  misc_feature (2020)..(2020): n is a, c, g, or t
  misc_feature (2836)..(2836): n is a, c, g, or t
  misc_feature (3460)..(3460): n is a, c, g, or t
  misc_feature (3488)..(3488): n is a, c, g, or t
  misc_feature (3494)..(3494): n is a, c, g, or t
  misc_feature (3578)..(3578): n is a, c, g, or t
  misc_feature (3937)..(3937): n is a, c, g, or t
  misc_feature (3950)..(3950): n is a, c, g, or t
nnnnnnnancnnnnnnnanngcnngaanntnaaggacgngaagctggagcccaacaagctctacacgtttgttttgctgggaggggagggaaaaccgctggcctgcaaagtcatcgaggatnaactgctgcctccggagacaattgaacattgactgtagcggcggtctatgaccgccgacgatttccacttgcgacatcgtcggcggtcatagaccgncgctacagtcaatgttcaatcaaccaaactcacctacgcgcccgcgtgatgagaattggatacggattgatgggcgttccctcccaccagcgcttctccggcccgagcttgaaaattccaaagtgcaggtgaggagtgtttgcgggcgcgttcccggtggttcctacgtatccgataacgtcaccttgctttaccgtcaaaccctcgcgaataccttcggcgtaccgatcgaggtgagcgtagtaataagaatactgctcggcgggatcaaactgataaatggtattgccgccgggcttgctcaaaaacagtttcttgatcacgccgtcgtcggctgcaatcacgggcgtgccccgcggtgcgaggatatccgtcgcttcgtgcctgcgtgacgttccacgagtttcgtcgannntgtccnnnntggccncngcggnnacnncnnnnacggngnnnangnngnngnnggnaaaatcngnagagtcgntcgcngnngccncngcggnngcntcanttgcgtcattggcgtcattggcatcagcggcatcaggcggaacngtcgggccgccggcgtgtacaatttccagttcgcgaggctgctgcgaggagagcatcacgatacccagcatcgcgagaccgcccataataaaaccggccagaaaagtcatcagacgagatcgagtcatagctttactccgtgaggatggcggtcatgcccggcgaaaccaggcccgccagccgcatcgcgtcccaattcgtcaggcggatgcatccgtgtgattgagcatggccgacttgcgacggttccggcgtgccgtgtatcccgtaatgcggtttggacaagtcgatccaaaccacgcccactggattgttcggtccggccgcaatcttcgccgccgagttccccggctcggcatcccaaaagagtttgggattgtaatgaaacaccggattcctggcgacgcctttgatcttccattttccgatgggtagcggatcgtgttcgctcccggcgcttgcaggaaactgggccatcaccatgccctgcgcatcgagcgcggtgaccgtcatatcgctcttgcgaacaaggattgaggcagccttgtgtatcggttccgccggcctctcgacgttagggaccaggatctcctcgccctccttatcgaaggctttgcccttgttcagaagtctcaagactttgggactgacgtggaatttttcaccgagcagctcgagcggcgactgatagccgagcgcctgcagtttggctctttccatgatgtcggcggggatctcctcgaatggaccggcaacatcttccgccgagatttcatacgggatcaanaccggttcgctgtccatgttgagcagcgcccatgtctccggccccaattcatctgtggcggggaggtcatgcgccgcttgaaagccgcgtatcgccgaacgaagatttgggccatagccatcatcgatttcgcccggtgaaaaagccgcccgatcgagcaggatttgcgcccgcaacactgccgatccgctgctgcggggagccaccacggttgtcgtttgtgggttattcgcctgacttagatcgacgtcgcgagcccggcggccggcggttttccgagtaattttgaccggtttatgttgttttcgagagtggttcgctgcgtccgcagcggagaccatgaatgctacaacgcacagnacggtgaagatacggttcatcttgcagttctcggggtggccgcatccgcgggaccccacagtgcntnnngcaattagctggccaaccgcgtttcanttagatactctcgcgactcatataaataaggaggagccgatggtccgactgacgatggcgtttactgccgctctgataactttgacgcttgcgggaattcaggctcaacgacaacctgccggcacttttcaccagggaaaggcatacaggttcaacaaagttgcggatggcgtctatcacgcagtcggcaccggtgcgctttcggtggttggcaactcgtccgttatcgtcaacgacaacgacgtcatcgttgtggatgatcacgtttcgcccgcggcagcatcggtactgctcgatgagctgaaggacatcacgaacaagccggtgcgcaccgttatcaatacccattttcactacgaccatgcccacggcaatcagatcttcgacaaagatgtcgcgatcatcggtcacgagttcacccgccagatgcttatgggcggcaaatcgattgaaatgccgctgtataagagttacgtgaccggaattccccggcagatcgaagatctgaaaaaacggatcgcagcggaatccgatgcggccaggaaggcgaatctgcaaacacagcttcaagtcgccgagaacaatgctgcgtcacaggcggaactgaaacccacaccgccaaacgtgactctccagacccagatgacgctgtaccggggcgatcgcgaaatccagattcgttttctcggtcgtgcccatactgccggcgatgtcgttgtgtaccttccaaaagagaagattgtttgtacgggagacatgctgacgtcggcgctttcgaacatgagcgatgcatttgtggatgagtggagcaaaacnttggaggagctgaagaagctcgatttcgtaaccgttcttcccggtcacggcgacgctttcacggacagagccaagatcgattactttcaggcgtaccttcgcgatgtgtggggccaggtcagccgcctcaagcaacaaggcgtttctgcggaggaggctgcgaagcgagccgatttgacgaagcaccgggagcacttcccaggtatccaggcgccgggcgttccgctcatcggagtcacgcggatttatgagcttcttgacgggaccgtgcgtcgggattaagcacaaagacacaaaaatcagccgcggattacgcgaattacgcggatgggcgcgctatcacactgtattaccgctcgtatgaagatgttgcgcgcccatccgcgtaattcgcgtaatccgcggctgatttttgtgtccttgtgtttaattcccccggcacattcctcatttcgttgccgtctgtgtggttaccggcgtgaccggaaccaggatgtaaccggcggcattgccgtctgcgattcgagtaaacacgagctgatatgctctctcgtccccctggctggagaaggcaatcggatgctgtgcgcctgcatcgtgcaaccacaggaagcgtccgtcgcnggcgatctgcaaccatccgccaatctgntgatgngcaacatccgtgtgattgatcgtcaggtatatgccggcaaccaattcggtggttcggtccttcgaaacctcgaaatcgacgcgntgccgctccacctggtagtagaggttgtccacccggctctggttcgacagcatctggttgtgcagtcctgaaacttcgctctgagtggactgttgcgcctggtcgatctcgcgcacctgagtcgtttgttgtgcggccgcttcacgcatggacgccaggtcatgctgtacggaggcgaggtcgttctgaagtcgagcaacctcgtcatgcatttcagtttgtgtcgattcgacaccgctcaacctggactgaacggagtccaggccctgacgcatttcgcgttttacgccctcaaccagcgcaagggcttcggcccgcgctctcctgacattggaggccacggacttctcgagctgagncattcggtccgtnaagccagtccgctctttcccccaggagttcagcttctcttctgccgaatc

SEQ ID NO: 514 - DNA, 4000 bp, Escherichia coli
  misc_feature (865)..(865): n is a, c, g, or t
  misc_feature (979)..(979): n is a, c, g, or t
  misc_feature (1282)..(1282): n is a, c, g, or t
  misc_feature (1779)..(1779): n is a, c, g, or t
  misc_feature (1933)..(1933): n is a, c, g, or t
  misc_feature (1965)..(1965): n is a, c, g, or t
  misc_feature (1985)..(1986): n is a, c, g, or t
  misc_feature (2063)..(2063): n is a, c, g, or t
  misc_feature (3665)..(3665): n is a, c, g, or t
ccagcgcggttcggagcgcgttttgaccggagaaatcgatcatgcggcggcgtgaatgaccaagagccacatgccccagttcatgggccaccacgctggccatttcttctgcagtgacctgcccatcggtgaacttgcgataaaacccccgggtgatatagattttaccatcgggtgcggccagaccgttgaccggatcaatttcataaagatggacgcgaattctcgtcacctcaagcgctttggccatgcggtcggttaacacttttaactttgggtcaagcaattcatgcgactggccggtgagctcccgattggtgcgccagaccgaaaaccggtacatgataacgccgtaaacaagggccagaagtatgggtgaaagttgcagcattctatatatatggggtatgatcaacccggtgacaagcatgcgggggttacagagtgcaaccctgtcggctagcgaccgaggtgtcgcatgccctgctcgatcccagccagtgtcatcggaaccatccggccgggaaaaaggtcttggatcatactgatggaatgtgtgtaaccccagtatttctccggtaccggattaagccagaggtgattttgccactggtcttgtgcgcgctgcaaccagacttgaccggcctctgcattccagtgttcgttggcaccaccggggtaggcaatctcataaggtgacatgctcgcatcgccgacaaagatgcatttataatcgggtccataggtgtgtaaaacgtccattgttggaatttgtgcatcccagcgccgggtgttgtcacgccaaaccccctcatagagacagttgtggaagtaatagtattcaagatgtttaaactcggtccgngccgcgctgaacaattcctcaaccaccttgatatgagaatccatagacccaccaacatctagaaacagcagaactttgacggcattgcgccgctctgggcgggttttcacgtcnagatagccgttttcggcggtggccttgatggtgccatcaaggtcaagctcatcctcggccccgtcgcgggcccattggcgcagacgtttcagcgcaactttgatgtttctcgtgcccaactcaaccgtatcgtcaaggtttttaaactcgcgtttgtcccaaacctttaccgcacgcctatgccggctttcattctggccgatccgcacgccttcggggttatagccaaaggcgccaaacggtgatgtcccagcggtgccgatccatttactgccgccctgatgacgtttctcttgttctttnaggcgctctttcagggtctccatcaatttttcaaagccaccaagcgatttaatttcgtcgcgctcttcctgactgagatgcttttcggccattttttccagccaatctgcaggaatgtccaccgcctccatcacttcgccgagcgtgatatcctcaagccccttgaatgtggctgcaaatgcccggtcaaatttatcgatattgcgctcgtctttgaccattgcactgcgcgccagatagtaaaatgcctcaatatcataggtggcaatgccggcttttaccgcctctaaaaacgtcagatattcgcgtagtgagacaggaattttactctcgcgcaggttttcaaaaaacggcagaaacattgctatgttgctgtccggtggatgatcaaagttaagaccagacccgcgagcataaacatgatgccatagctggtggcataatgcagaatgtcgggccagcggcctttgcggcggtgggctgtgtagcctccgaangacacgccgcagatcaatcccaatattattagcatctgtttccctaatttttcccgcacagcttgagcttgacgagatggttttttcgtcgcgtcgccgcagctagtcgacgttttggtatctggctcgaccggcgctgtccagtcaaaccaancctgttttgtgccgcattgagcgactggttanggcgccctgatgccccaganngttacctagcgccgcgggccataaaggccaaccgctcaaataaatgcacatcttgttcatttttcagcagcgccccntgcaattgaggtaaggcatttgatccgtctcgcgccaaatcttcggctgtgagatcttctgccagcagcagcttgagccagtccagcacctcggaagttgagggttttttctttaaaccctgttgttcgcgcaactcatagaactgggtgagtgcagtggtcagcaacgcgtctttgatcccggggtgatgcacctcgacaattcggcgcatcgtttcgagatcgggaaaccggatgtaatggaaaaaacaccgccgcagaaacgcatcagggagttctttttcattgtttgacgtgataatgacaatgggtctctgacgggcttttaccagttcatcggtctcatagacatggaactccatcttatcgagctcctgcaaaagatcattgggaaactcgatgtcggccttgtcgatttcatcgatcaataacaccagtttttcatcggcctcaaacgcctgccaaagcttgcccttgcgaatatagttgcgcacatcctgaactttttcatcgccaagctggctgtcgcgcaagcggctaacggcgtcatactcatagagcccctgctgggctttcgttgtggatttaatattccattcaaccatcttcagacccagagccttggcgacttgacgggccaactctgtctttccggttcccggttcgcctttgaccaaaagcggtctttcgagcgttacggccgcattgacagcaaccgtcagatcgtctgtggccacatattcttgggtgcctgtaaatttcatcggtcgttccaattgtgtaagtgatttgcgctgacactaacgcgaacacaaaaacaccgcaatcggctcctaacagctagtgacaaccgacgggtcatggggtaatgcacagccagaggggtcgtgtgtttggccgaattgaaaaacattaatcttgtggggagctcgaaatgaaagcagatgtgattctgcccgataactataaaccgagcgaagatgaacctttcatgaacgcaaaacagcttgagtattttcaacgcaaattgttgagctggaaagcggatcttttagttgaaaccagagagacgctggaaggtcttcaggggacgacgcgcaacattcctgattctgcagatcgcgccagtgaagaaaccgaccgttcactggaactgcgcacgcgggaccgtcagcgtaagctggtaaccaaaattgattcggccttgcagcgtattgcagagggtgaattcgggtattgtgaagttaccggtgagccgatttcgctcaaaaggcttgacgcgcgaccgattgcgaccatgagcctcgaggcgcaggaacgccatgagcgcaaggaaaaagtccaccgcgatgactaagacctatagttgaggcttatttgacaatcatcgggtcagatgctttgacggattcggtttcaggatagcgcatgcgaatttctggaaaaaaaatcatcgtgattggtggcgggattggcggtcttgccgcggcgctggcgctgtcccgcttaggcgccgcggtgactgtgcttgaacaagccgctgaaatctctgacatgggggccgggctgcagatcagcccaaacggctttgcggtacttgangcgctggggttgcgcgacgccgtgattgaccggtcaatggcggcaacttctttggtcctgcgcaattatagcgattcggcgacggtggcgacacttgatatttcgaccgggaaagatggacagaattactattttattcatcgggcggatctggttgcctgtctgctgagcgcggccagacagactggggttcaggtgcggctgcaacacaaagtaaaacaggttcagacctcggtgataccgcaggtggttctgacgaatggtcaaacgattatggcagatctggtggttggcgcagatggtttgcattcttgcttgcgaccggttctaaacca

SEQ ID NO: 515 - DNA, 4000 bp, Escherichia coli
  misc_feature (1977)..(1977): n is a, c, g, or t
  misc_feature (1985)..(1985): n is a, c, g, or t
  misc_feature (1995)..(1995): n is a, c, g, or t
  misc_feature (2002)..(2002): n is a, c, g, or t
  misc_feature (3400)..(3400): n is a, c, g, or t
  misc_feature (3411)..(3411): n is a, c, g, or t
  misc_feature (3416)..(3416): n is a, c, g, or t
  misc_feature (3760)..(3760): n is a, c, g, or t
  misc_feature (3762)..(3763): n is a, c, g, or t
  misc_feature (3765)..(3767): n is a, c, g, or t
  misc_feature (3770)..(3773): n is a, c, g, or t
  misc_feature (3775)..(3775): n is a, c, g, or t
  misc_feature (3777)..(3779): n is a, c, g, or t
  misc_feature (3781)..(3784): n is a, c, g, or t
  misc_feature (3787)..(3791): n is a, c, g, or t
  misc_feature (3793)..(3800): n is a, c, g, or t
  misc_feature (3802)..(3805): n is a, c, g, or t
  misc_feature (3807)..(3807): n is a, c, g, or t
  misc_feature (3810)..(3815): n is a, c, g, or t
  misc_feature (3817)..(3818): n is a, c, g, or t
  misc_feature (3824)..(3832): n is a, c, g, or t
  misc_feature (3834)..(3849): n is a, c, g, or t
  misc_feature (3851)..(3851): n is a, c, g, or t
  misc_feature (3853)..(3855): n is a, c, g, or t
  misc_feature (3857)..(3860): n is a, c, g, or t
  misc_feature (3864)..(3866): n is a, c, g, or t
  misc_feature (3868)..(3872): n is a, c, g, or t
  misc_feature (3874)..(3876): n is a, c, g, or t
  misc_feature (3878)..(3880): n is a, c, g, or t
  misc_feature (3882)..(3886): n is a, c, g, or t
  misc_feature (3889)..(3890): n is a, c, g, or t
  misc_feature (3892)..(3896): n is a, c, g, or t
  misc_feature (3898)..(3901): n is a, c, g, or t
  misc_feature (3903)..(3906): n is a, c, g, or t
  misc_feature (3908)..(3909): n is a, c, g, or t
  misc_feature (3911)..(3911): n is a, c, g, or t
  misc_feature (3913)..(3917): n is a, c, g, or t
  misc_feature (3919)..(3919): n is a, c, g, or t
  misc_feature (3921)..(3931): n is a, c, g, or t
  misc_feature (3933)..(3934): n is a, c, g, or t
  misc_feature (3936)..(3936): n is a, c, g, or t
  misc_feature (3939)..(3939): n is a, c, g, or t
  misc_feature (3942)..(3944): n is a, c, g, or t
  misc_feature (3946)..(3950): n is a, c, g, or t
  misc_feature (3952)..(3952): n is a, c, g, or t
  misc_feature (3954)..(3954): n is a, c, g, or t
  misc_feature (3957)..(3969): n is a, c, g, or t
  misc_feature (3971)..(3978): n is a, c, g, or t
  misc_feature (3981)..(3992): n is a, c, g, or t
  misc_feature (3994)..(3996): n is a, c, g, or t
  misc_feature (3999)..(3999): n is a, c, g, or t
cctcgatctcgtaatcggtgaccagaccggtctcgtcacgcacgcacttgaccttggcgtacttgattgcgctcagggagtcaactacatggctgaagccggcaataccggtggcaaaggtgcggcgcacatcggtatcgatcagggccatttcagccgcctcatagtagtacttgtcgtgcatgtactggatcaggttcagcacattgacgtacaggcctgccagccaatccatcataacgtcatacctggcaataacttcgtcataatccaggtactctgcagtgatgggggcatagtgagggccaatctgctcatgcagcttttcgtccataccgccgttgatggcatacagcaggcacttgcccaggttggcacgtgcgccgaagaactgcatctccttgccggtctgggttgcggaaacgcagcagcagatggagtagtcgtcgccccagacaggcttcatcacatcgtcgttctcgtactggacggaggaagtcttgatagagatcttggaggcgtaatccttaaaggtcttgggcagagcagaggagtacagaacggtcaggttcggctccggtgcggggcccatgttttccagggtatgcaggaagcggaagtcggtcttggtgaccatggagcggccatccatgccgatgccgccaacttccagggtagcccacacggggtcgccgctgaacagctggttgtagctggggatacgggcaaacttgaccatgcggaacttcatggtcaggtggtcgatcagttcctgggcctcggtctcggtcaggatgcccttatccaggtcgcgctggatgtagatatccaggaaggtggagatacggccaacgctcatggcagcgccgttctgggtcttgatggcagccagatagccaaagtacagccactgcacagcctccttggcgttggcagcgggcagggagatatcatagccgtaagcagcggccatggccttcatatcgttcagggcgcggatctgcagggcgatctcttcgcgcagacggatgacgtcatcggtcatggtgccgtcaccgcagttggcaaagtcgttctgcttttctttgatcaggtagtcaatgccgtacagggcaacgcggcggtagtcgccaacgatgcggccgcggccataggtatcgggcaggccggtcacaatgtggctgtggcgtgcctttttcatctccggggtgtaggcatcaaacacagcggtgttgtgggtgcgggcatacttggtaaagatttcgtgcagcttcggggacggagtatagccataggtggtgcaggcctgttctgccatcttgatgccgccatagggcatgaaggcgcgcttgaggggcttatcggtctgcaggccgacgactttttccagatccttcaggtcctcgctgatatagccggggccgtaagcggtcatgccggaaaccacttcagtctccatatccagaacgccgcccttggcgcgctcttccttctgcagaacctgcagagcaccccaaagcttatcggttgcttcggtggggccggcaaggaagctttcatcgccggagtaggggcggtagttcttctggataaaatcgcgggtgttgacttcttctttccagatgcggccctggaagccttcccactgtacaaaatctgtcatcggttacctcctgttgtaaaccaaatacgctgctctattagttaggttattctaaccagctattgaaaatcttgtccttttccagctggcgggcgggcagcttttctgcgttgcccacggttccagcccaaaaggacgccattgaccagcccgtatccgggccacaatcattctaccatatgtccttacaaaaagcaacaactacaccaaaaattgtgttggaaacttttgcattgctttttgtgcatggcatttgccgcacatgtcggtggcttcccatggcgaacggtgcaggtataattttgtctttcatngttaggtngcgctaacanagaaagnactttcaaaagtcggggttttcataccggctctgccgggttgttggttcagcataccctgcagagtgcctttagtataccaacccgcatcggggccgtctgttgccaaggcaacaacccaaaaatttgcaaaaaaagcccccgcaccggaagctgctccggtggggggcgttggagagggagagatcaggttttgggttccgccgctttttctgcgtcttccgatttttctgtttcatcgggttctgcagcgggttcttccggcaggcggccatacagctccatagcgtcatgcagcttttgggccagctccggggtaaaggcgccgggcagggcgcgccagcaccagttaccgcccaaggtggcgggggtgttcatcctggcttcatgcccaaggcccagcacatcctgggcctgcaccacggccagatccgccacgctggaccagatgccgcgcatcatgccccagttcataccttcctctttggtcagattcaggtactggatggcgcgctcaatatcgtccggcagagcggttccaaaccagccgtccaccggctcattatcatgggtgccagtgtaagcaatgcagttggtggggtagctgtgggggcggtagtcaccgccgtcacggctgtcaaaggcaaattccagcactttcatgccggggtaggcgcattctttcagcagagcgcgcacatcgtcggtcaaaaagcccaagtcctcagcaataatgcgggggctgcccagctcttttttgacggcagcaaagagggcatagcccggcccagtgcgccagcggccgttttcggcggtcttatcaccataggggatggcataataccccgcaaagccgcggaaatggtcaatgcgcaacacatcataaattccgcacaggtggcggatgcggcgcacccaccaggcatagccgttggcagccatagcgtcccagtcaaacagcgggttgccccatagctgaccggtggcggagaagccatccggcgggcagccggccacctcggtggggaccaggttttcgtccagctggaactcctgcgggcaggaccagacatccacgctgtcctccgccacatagatcggcaggtcgccgataatctcaatgccctgcgcgttggcataggctttcaggtcatgccactgggtatagaacaggtactgcacagcctgccagaagtcaatatccgccgcatatttggcgcgggccgcggccaaggtctccggttcgcggcggcgcagcggttcttcccactgctgccagcagaccccgttatgggcatctttcagggccatgaacagggcatagtccggcagccagaacgcgtttttcgccaaaaaatcggcgtaatccgccgggggcgctgccaacaggcgggcacangctttgtgcancaccncataacgcttttggtacaacgctccgtaattgacacagccaggggtgctttcccagtcgatagattcatattcttccggctggaggaggcccgctttggccagcaggtccaggtcaataaaatacggattgcccgcaaaggtagaaaaagactggtaagggctgtcgccatagctggtggggcaaaccggaaggatctgccagtaagcctgaccggctttgactaggaaatccacaaaatcttttgctgccgcgcccatggtgccgatgccatggggggagggcaggctggaaatatgcagcagaatgccgcttgctctcatcagggaaacctcttttctttangnnannnccnnnnantnnnannnnccnnnnngnnnnnnnngnnnngncannnnnnannccaaannnnnnnnnannnnnnnnnnnnnnnncngnnntnnnnccgnnntnnnnncnnntnnncnnnnnttnngnnnnntnnnngnnnngnngngnnnnntncnnnnnnnnnnngnncngcngcnnntnnnnntngngcnnnnnnnnnnnnncnnnnnnnnccnnnnnnnnnnnntnnngcng

SEQ ID NO: 516 - DNA, 4000 bp, Escherichia coli
  misc_feature (13)..(14): n is a, c, g, or t
  misc_feature (20)..(21): n is a, c, g, or t
  misc_feature (26)..(27): n is a, c, g, or t
  misc_feature (30)..(32): n is a, c, g, or t
  misc_feature (37)..(40): n is a, c, g, or t
  misc_feature (47)..(48): n is a, c, g, or t
  misc_feature (51)..(51): n is a, c, g, or t
  misc_feature (54)..(55): n is a, c, g, or t
  misc_feature (58)..(58): n is a, c, g, or t
  misc_feature (62)..(62): n is a, c, g, or t
  misc_feature (64)..(65): n is a, c, g, or t
  misc_feature (67)..(68): n is a, c, g, or t
  misc_feature (70)..(71): n is a, c, g, or t
  misc_feature (81)..(81): n is a, c, g, or t
  misc_feature (86)..(87): n is a, c, g, or t
  misc_feature (90)..(90): n is a, c, g, or t
  misc_feature (93)..(94): n is a, c, g, or t
  misc_feature (96)..(96): n is a, c, g, or t
  misc_feature (101)..(103): n is a, c, g, or t
  misc_feature (105)..(107): n is a, c, g, or t
  misc_feature (109)..(110): n is a, c, g, or t
  misc_feature (112)..(113): n is a, c, g, or t
  misc_feature (118)..(119): n is a, c, g, or t
  misc_feature (121)..(121): n is a, c, g, or t
  misc_feature (131)..(133): n is a, c, g, or t
  misc_feature (137)..(137): n is a, c, g, or t
  misc_feature (145)..(147): n is a, c, g, or t
  misc_feature (152)..(152): n is a, c, g, or t
  misc_feature (155)..(155): n is a, c, g, or t
  misc_feature (157)..(157): n is a, c, g, or t
  misc_feature (164)..(164): n is a, c, g, or t
  misc_feature (169)..(169): n is a, c, g, or t
  misc_feature (174)..(174): n is a, c, g, or t
  misc_feature (177)..(177): n is a, c, g, or t
  misc_feature (180)..(180): n is a, c, g, or t
  misc_feature (184)..(184): n is a, c, g, or t
  misc_feature (189)..(189): n is a, c, g, or t
  misc_feature (192)..(192): n is a, c, g, or t
  misc_feature (194)..(194): n is a, c, g, or t
  misc_feature (200)..(200): n is a, c, g, or t
  misc_feature (204)..(205): n is a, c, g, or t
  misc_feature (208)..(208): n is a, c, g, or t
  misc_feature (212)..(212): n is a, c, g, or t
  misc_feature (214)..(214): n is a, c, g, or t
  misc_feature (216)..(218): n is a, c, g, or t
  misc_feature (227)..(227): n is a, c, g, or t
  misc_feature (230)..(230): n is a, c, g, or t
  misc_feature (233)..(235): n is a, c, g, or t
  misc_feature (238)..(241): n is a, c, g, or t
  misc_feature (247)..(247): n is a, c, g, or t
  misc_feature (249)..(250): n is a, c, g, or t
  misc_feature (254)..(254): n is a, c, g, or t
  misc_feature (257)..(257): n is a, c, g, or t
  misc_feature (259)..(260): n is a, c, g, or t
  misc_feature (273)..(275): n is a, c, g, or t
  misc_feature (278)..(278): n is a, c, g, or t
  misc_feature (283)..(283): n is a, c, g, or t
  misc_feature (285)..(285): n is a, c, g, or t
  misc_feature (288)..(288): n is a, c, g, or t
  misc_feature (290)..(290): n is a, c, g, or t
  misc_feature (292)..(292): n is a, c, g, or t
  misc_feature (294)..(294): n is a, c, g, or t
  misc_feature (296)..(296): n is a, c, g, or t
  misc_feature (299)..(299): n is a, c, g, or t
  misc_feature (301)..(301): n is a, c, g, or t
  misc_feature (308)..(308): n is a, c, g, or t
  misc_feature (311)..(312): n is a, c, g, or t
  misc_feature (314)..(314): n is a, c, g, or t
  misc_feature (318)..(319): n is a, c, g, or t
  misc_feature (324)..(324): n is a, c, g, or t
  misc_feature (328)..(330): n is a, c, g, or t
  misc_feature (336)..(337): n is a, c, g, or t
  misc_feature (343)..(343): n is a, c, g, or t
  misc_feature (350)..(351): n is a, c, g, or t
  misc_feature (355)..(355): n is a, c, g, or t
  misc_feature (357)..(357): n is a, c, g, or t
  misc_feature (359)..(359): n is a, c, g, or t
  misc_feature (366)..(366): n is a, c, g, or t
  misc_feature (371)..(371): n is a, c, g, or t
  misc_feature (374)..(374): n is a, c, g, or t
  misc_feature (376)..(377): n is a, c, g, or t
  misc_feature (382)..(384): n is a, c, g, or t
  misc_feature (388)..(388): n is a, c, g, or t
  misc_feature (395)..(397): n is a, c, g, or t
  misc_feature (400)..(401): n is a, c, g, or t
  misc_feature (405)..(406): n is a, c, g, or t
  misc_feature (409)..(410): n is a, c, g, or t
  misc_feature (412)..(412): n is a, c, g, or t
  misc_feature (415)..(415): n is a, c, g, or t
  misc_feature (417)..(418): n is a, c, g, or t
  misc_feature (420)..(424): n is a, c, g, or t
  misc_feature (426)..(426): n is a, c, g, or t
  misc_feature (429)..(430): n is a, c, g, or t
  misc_feature (432)..(432): n is a, c, g, or t
  misc_feature (434)..(434): n is a, c, g, or t
  misc_feature (437)..(437): n is a, c, g, or t
  misc_feature (439)..(442): n is a, c, g, or t
  misc_feature (445)..(445): n is a, c, g, or t
  misc_feature (448)..(450): n is a, c, g, or t
  misc_feature (454)..(456): n is a, c, g, or t
  misc_feature (459)..(460): n is a, c, g, or t
  misc_feature (462)..(462): n is a, c, g, or t
  misc_feature (466)..(466): n is a, c, g, or t
  misc_feature (468)..(468): n is a, c, g, or t
  misc_feature (471)..(471): n is a, c, g, or t
  misc_feature (473)..(473): n is a, c, g, or t
  misc_feature (482)..(482): n is a, c, g, or t
  misc_feature (487)..(488): n is a, c, g, or t
  misc_feature (492)..(494): n is a, c, g, or t
  misc_feature (499)..(500): n is a, c, g, or t
  misc_feature (502)..(505): n is a, c, g, or t
  misc_feature (507)..(508): n is a, c, g, or t
  misc_feature (516)..(516): n is a, c, g, or t
  misc_feature (518)..(518): n is a, c, g, or t
  misc_feature (520)..(521): n is a, c, g, or t
  misc_feature (523)..(525): n is a, c, g, or t
  misc_feature (529)..(529): n is a, c, g, or t
  misc_feature (532)..(532): n is a, c, g, or t
  misc_feature (534)..(534): n is a, c, g, or t
  misc_feature (537)..(538): n is a, c, g, or t
  misc_feature (540)..(543): n is a, c, g, or t
  misc_feature (545)..(546): n is a, c, g, or t
  misc_feature (552)..(552): n is a, c, g, or t
  misc_feature (555)..(556): n is a, c, g, or t
  misc_feature (560)..(560): n is a, c, g, or t
  misc_feature (569)..(569): n is a, c, g, or t
  misc_feature (573)..(576): n is a, c, g, or t
  misc_feature (579)..(582): n is a, c, g, or t
  misc_feature (589)..(590): n is a, c, g, or t
  misc_feature (593)..(593): n is a, c, g, or t
  misc_feature (596)..(598): n is a, c, g, or t
  misc_feature (600)..(600): n is a, c, g, or t
  misc_feature (602)..(603): n is a, c, g, or t
  misc_feature (606)..(606): n is a, c, g, or t
  misc_feature (610)..(610): n is a, c, g, or t
  misc_feature (612)..(612): n is a, c, g, or t
  misc_feature (614)..(614): n is a, c, g, or t
  misc_feature (622)..(623): n is a, c, g, or t
  misc_feature (626)..(626): n is a, c, g, or t
  misc_feature (629)..(629): n is a, c, g, or t
  misc_feature (641)..(641): n is a, c, g, or t
  misc_feature (644)..(644): n is a, c, g, or t
  misc_feature (647)..(648): n is a, c, g, or t
  misc_feature (655)..(656): n is a, c, g, or t
  misc_feature (658)..(658): n is a, c, g, or t
  misc_feature (660)..(660): n is a, c, g, or t
  misc_feature (666)..(666): n is a, c, g, or t
  misc_feature (669)..(669): n is a, c, g, or t
  misc_feature (671)..(672): n is a, c, g, or t
  misc_feature (675)..(675): n is a, c, g, or t
  misc_feature (677)..(677): n is a, c, g, or t
  misc_feature (681)..(681): n is a, c, g, or t
  misc_feature (686)..(686): n is a, c, g, or t
  misc_feature (689)..(689): n is a, c, g, or t
  misc_feature (693)..(693): n is a, c, g, or t
  misc_feature (699)..(700): n is a, c, g, or t
  misc_feature (707)..(709): n is a, c, g, or t
  misc_feature (713)..(713): n is a, c, g, or t
  misc_feature (717)..(718): n is a, c, g, or t
  misc_feature (720)..(726): n is a, c, g, or t
  misc_feature (728)..(728): n is a, c, g, or t
  misc_feature (730)..(731): n is a, c, g, or t
  misc_feature (733)..(736): n is a, c, g, or t
  misc_feature (738)..(741): n is a, c, g, or t
  misc_feature (743)..(744): n is a, c, g, or t
  misc_feature (746)..(752): n is a, c, g, or t
  misc_feature (754)..(759): n is a, c, g, or t
  misc_feature (761)..(788): n is a, c, g, or t
  misc_feature (790)..(796): n is a, c, g, or t
  misc_feature (798)..(801): n is a, c, g, or t
  misc_feature (803)..(836): n is a, c, g, or t
  misc_feature (838)..(843): n is a, c, g, or t
  misc_feature (845)..(921): n is a, c, g, or t
  misc_feature (923)..(924): n is a, c, g, or t
  misc_feature (926)..(944): n is a, c, g, or t
  misc_feature (946)..(965): n is a, c, g, or t
  misc_feature (967)..(1034): n is a, c, g, or t
  misc_feature (1036)..(1037): n is a, c, g, or t
  misc_feature (1040)..(1042): n is a, c, g, or t
  misc_feature (1044)..(1046): n is a, c, g, or t
  misc_feature (1048)..(1048): n is a, c, g, or t
  misc_feature (1050)..(1050): n is a, c, g, or t
  misc_feature (1052)..(1054): n is a, c, g, or t
  misc_feature (1058)..(1062): n is a, c, g, or t
  misc_feature (1064)..(1067): n is a, c, g, or t
  misc_feature (1069)..(1070): n is a, c, g, or t
  misc_feature (1072)..(1075): n is a, c, g, or t
  misc_feature (1077)..(1078): n is a, c, g, or t
  misc_feature (1080)..(1080): n is a, c, g, or t
  misc_feature (1082)..(1085): n is a, c, g, or t
  misc_feature (1087)..(1088): n is a, c, g, or t
  misc_feature (1090)..(1090): n is a, c, g, or t
  misc_feature (1092)..(1099): n is a, c, g, or t
  misc_feature (1101)..(1103): n is a, c, g, or t
  misc_feature (1105)..(1124): n is a, c, g, or t
  misc_feature (1127)..(1132): n is a, c, g, or t
  misc_feature (1134)..(1140): n is a, c, g, or t
  misc_feature (1142)..(1150): n is a, c, g, or t
  misc_feature (1152)..(1153): n is a, c, g, or t
  misc_feature (1155)..(1155): n is a, c, g, or t
  misc_feature (1158)..(1182): n is a, c, g, or t
  misc_feature (1184)..(1187): n is a, c, g, or t
  misc_feature (1189)..(1223): n is a, c, g, or t
  misc_feature (1225)..(1228): n is a, c, g, or t
  misc_feature (1231)..(1233): n is a, c, g, or t
  misc_feature (1235)..(1237): n is a, c, g, or t
  misc_feature (1239)..(1239): n is a, c, g, or t
  misc_feature (1241)..(1244): n is a, c, g, or t
  misc_feature (1246)..(1248): n is a, c, g, or t
  misc_feature (1251)..(1257): n is a, c, g, or t
  misc_feature (1259)..(1261): n is a, c, g, or t
  misc_feature (1263)..(1267): n is a, c, g, or t
  misc_feature (1269)..(1277): n is a, c, g, or t
  misc_feature (1280)..(1285): n is a, c, g, or t
  misc_feature (1287)..(1289): n is a, c, g, or t
  misc_feature (1292)..(1294): n is a, c, g, or t
  misc_feature (1296)..(1296): n is a, c, g, or t
  misc_feature (1299)..(1302): n is a, c, g, or t
  misc_feature (1304)..(1304): n is a, c, g, or t
  misc_feature (1307)..(1312): n is a, c, g, or t
  misc_feature (1317)..(1318): n is a, c, g, or t
  misc_feature (1321)..(1324): n is a, c, g, or t
  misc_feature (1326)..(1326): n is a, c, g, or t
  misc_feature (1328)..(1328): n is a, c, g, or t
  misc_feature (1330)..(1330): n is a, c, g, or t
  misc_feature (1332)..(1332): n is a, c, g, or t
  misc_feature (1335)..(1337): n is a, c, g, or t
  misc_feature (1339)..(1341): n is a, c, g, or t
  misc_feature (1343)..(1343): n is a, c, g, or t
  misc_feature (1345)..(1349): n is a, c, g, or t
  misc_feature (1352)..(1354): n is a, c, g, or t
  misc_feature (1356)..(1357): n is a, c, g, or t
  misc_feature (1359)..(1359): n is a, c, g, or t
  misc_feature (1361)..(1369): n is a, c, g, or t
  misc_feature (1371)..(1374): n is a, c, g, or t
  misc_feature (1376)..(1381): n is a, c, g, or t
  misc_feature (1383)..(1388): n is a, c, g, or t
  misc_feature (1390)..(1393): n is a, c, g, or t
  misc_feature (1395)..(1398): n is a, c, g, or t
  misc_feature (1400)..(1403): n is a, c, g, or t
  misc_feature (1405)..(1409): n is a, c, g, or t
  misc_feature (1411)..(1412): n is a, c, g, or t
  misc_feature (1415)..(1416): n is a, c, g, or t
  misc_feature (1418)..(1424): n is a, c, g, or t
  misc_feature (1428)..(1441): n is a, c, g, or t
  misc_feature (1443)..(1445): n is a, c, g, or t
  misc_feature (1448)..(1448): n is a, c, g, or t
  misc_feature (1450)..(1452): n is a, c, g, or t
  misc_feature (1455)..(1455): n is a, c, g, or t
  misc_feature (1457)..(1460): n is a, c, g, or t
  misc_feature (1462)..(1462): n is a, c, g, or t
  misc_feature (1464)..(1464): n is a, c, g, or t
  misc_feature (1467)..(1476): n is a, c, g, or t
  misc_feature (1478)..(1478): n is a, c, g, or t
  misc_feature (1480)..(1486): n is a, c, g, or t
  misc_feature (1488)..(1488): n is a, c, g, or t
  misc_feature (1490)..(1491): n is a, c, g, or t
  misc_feature (1494)..(1495): n is a, c, g, or t
  misc_feature (1499)..(1502): n is a, c, g, or t
  misc_feature (1504)..(1505): n is a, c, g, or t
  misc_feature (1507)..(1507): n is a, c, g, or t
  misc_feature (1509)..(1509): n is a, c, g, or t
  misc_feature (1511)..(1511): n is a, c, g, or t
  misc_feature (1513)..(1513): n is a, c, g, or t
  misc_feature (1515)..(1516): n is a, c, g, or t
  misc_feature (1518)..(1518): n is a, c, g, or t
  misc_feature (1520)..(1522): n is a, c, g, or t
  misc_feature (1525)..(1529): n is a, c, g, or t
  misc_feature (1531)..(1534): n is a, c, g, or t
  misc_feature (1536)..(1539): n is a, c, g, or t
  misc_feature (1541)..(1541): n is a, c, g, or t
  misc_feature (1543)..(1545): n is a, c, g, or t
  misc_feature (1547)..(1551): n is a, c, g, or t
  misc_feature (1553)..(1557): n is a, c, g, or t
  misc_feature (1560)..(1562): n is a, c, g, or t
  misc_feature (1564)..(1566): n is a, c, g, or t
  misc_feature (1569)..(1570): n is a, c, g, or t
  misc_feature (1574)..(1579): n is a, c, g, or t
  misc_feature (1583)..(1583): n is a, c, g, or t
  misc_feature (1588)..(1589): n is a, c, g, or t
  misc_feature (1591)..(1595): n is a, c, g, or t
  misc_feature (1598)..(1602): n is a, c, g, or t
  misc_feature (1604)..(1608): n is a, c, g, or t
  misc_feature (1610)..(1612): n is a, c, g, or t
  misc_feature (1615)..(1617): n is a, c, g, or t
  misc_feature (1619)..(1622): n is a, c, g, or t
  misc_feature (1624)..(1627): n is a, c, g, or t
  misc_feature (1629)..(1633): n is a, c, g, or t
  misc_feature (1636)..(1638): n is a, c, g, or t
  misc_feature (1640)..(1640): n is a, c, g, or t
  misc_feature (1642)..(1642): n is a, c, g, or t
  misc_feature (1644)..(1644): n is a, c, g, or t
  misc_feature (1647)..(1650): n is a, c, g, or t
  misc_feature (1652)..(1665): n is a, c, g, or t
  misc_feature (1669)..(1669): n is a, c, g, or t
  misc_feature (1671)..(1676): n is a, c, g, or t
  misc_feature (1678)..(1684): n is a, c, g, or t
  misc_feature (1687)..(1687): n is a, c, g, or t
  misc_feature (1691)..(1691): n is a, c, g, or t
  misc_feature (1695)..(1697): n is a, c, g, or t
  misc_feature (1699)..(1700): n is a, c, g, or t
  misc_feature (1702)..(1703): n is a, c, g, or t
  misc_feature (1705)..(1705): n is a, c, g, or t
  misc_feature (1707)..(1707): n is a, c, g, or t
  misc_feature (1709)..(1710): n is a, c, g, or t
  misc_feature (1712)..(1713): n is a, c, g, or t
  misc_feature (1715)..(1718): n is a, c, g, or t
  misc_feature (1720)..(1723): n is a, c, g, or t
  misc_feature (1725)..(1736): n is a, c, g, or t
  misc_feature (1738)..(1738): n is a, c, g, or t
  misc_feature (1740)..(1742): n is a, c, g, or t
  misc_feature (1744)..(1749): n is a, c, g, or t
  misc_feature (1751)..(1751): n is a, c, g, or t
  misc_feature (1753)..(1754): n is a, c, g, or t
  misc_feature (1756)..(1756): n is a, c, g, or t
  misc_feature (1758)..(1758): n is a, c, g, or t
  misc_feature (1760)..(1762): n is a, c, g, or t
  misc_feature (1765)..(1768): n is a, c, g, or t
  misc_feature (1770)..(1773): n is a, c, g, or t
  misc_feature (1776)..(1778): n is a, c, g, or t
  misc_feature (1780)..(1789): n is a, c, g, or t
  misc_feature (1791)..(1797): n is a, c, g, or t
  misc_feature (1799)..(1804): n is a, c, g, or t
  misc_feature (1806)..(1808): n is a, c, g, or t
  misc_feature (1811)..(1813): n is a, c, g, or t
  misc_feature (1815)..(1815): n is a, c, g, or t
  misc_feature (1817)..(1820): n is a, c, g, or t
  misc_feature (1822)..(1828): n is a, c, g, or t
  misc_feature (1831)..(1832): n is a, c, g, or t
  misc_feature (1834)..(1835): n is a, c, g, or t
  misc_feature (1837)..(1837): n is a, c, g, or t
  misc_feature (1839)..(1842): n is a, c, g, or t
  misc_feature (1844)..(1845): n is a, c, g, or t
  misc_feature (1847)..(1847): n is a, c, g, or t
  misc_feature (1973)..(1973): n is a, c, g, or t
  misc_feature (1984)..(1984): n is a, c, g, or t
  misc_feature (1986)..(1988): n is a, c, g, or t
  misc_feature (2003)..(2004): n is a, c, g, or t
  misc_feature (3331)..(3331): n is a, c, g, or t
gaggcatcgaggnnacaggnntttanntcnnnatacnnnnaaaaaannaanggnntcntgtnanngnntnnagggctgacnctgcnncgncgnngngtcgnnngnnnannannagaanntngaaacgttannnaggnagaacccnnnatcanggnancgtcgtncggcngttgntanaanctgnacacntcnanacggcntaannccngtgngngnnngcaattttncancgnnncgnnnngccgancnngcgnttntnnggttaaggcgttnnncangtggntnatngntntnantcngnagaccgnganncngaanntgcgnaccnnnggacgnncggacngccgatnnatcnangnttcaaantcagnagncnnacgannngacnattcccnnnttnntttnncanntncanannannnnnanacnnanangtngnnnnctnacnnnaacnnntanncncatncncgnantcatacgancggannaccnnngatcnncnnnntnnccatatancntnnannnatgnggncncgnntnnnncnntacgancgnngatncgaagatangctnnnnagnnnngcagaannacnagnnntncnnctngttntngngcctgganncanganaagattatacgnttngcnnaacgacnnancnaccagnctncnntcngncggnaaggntgnaatncagcannggattgnnncaangggnnannnnnnngncnngnnnncnnnntnnannnnnnnannnnnnannnnnnnnnnnnnnnnnnnnnnnnnnnnannnnnnngnnnngnnnnnnnnnnnnnnnnnnnnnnnnnnnnnnnnnncnnnnnnannnnnnnnnnnnnnnnnnnnnnnnnnnnnnnnnnnnnnnnnnnnnnnnnnnnnnnnnnnnnnnnnnnnnnnnnnnnncnncnnnnnnnnnnnnnnnnnnngnnnnnnnnnnnnnnnnnnnntnnnnnnnnnnnnnnnnnnnnnnnnnnnnnnnnnnnnnnnnnnnnnnnnnnnnnnnnnnnnnnnnnnnngnngcnnngnnnangnannncggnnnnnannnnanntnnnntnngntnnnngnntngnnnnnnnngnnncnnnnnnnnnnnnnnnnnnnnaannnnnnannnnnnnannnnnnnnntnntntgnnnnnnnnnnnnnnnnnnnnnnnnncnnnncnnnnnnnnnnnnnnnnnnnnnnnnnnnnnnnnnnncnnnnccnnncnnnancnnnncnnnccnnnnnnntnnncnnnnngnnnnnnnnnttnnnnnnannnaannnanggnnnngnggnnnnnnttccnnccnnnncncntnanggnnngnnngnannnnnaannnanntnannnnnnnnngnnnngnnnnnngnnnnnntnnnntnnnngnnnncnnnnnannganngnnnnnnncaannnnnnnnnnnnnntnnnttncnnntcnannnncngnctnnnnnnnnnngngnnnnnnnancnnaannaaannnngnncngntngncnngncnnnccnnnnntnnnncnnnnancnnncnnnnnannnnntcnnntnnntcnntctnnnnnnaaanaaaanngnnnnnatnnnnntnnnnncnnnccnnncnnnncnnnnannnnncgnnngntngnttnnnncnnnnnnnnnnnnnnaatntnnnnnncnnnnnnngtnaggngagnnntnngnntngngnngnnannnnannnnannnnnnnnnnnncnannntnnnnnncncnncncncnnntcnnnncnnnncannncnnnnnnnnnntnnnnnnncnnnnnntnnnaannngntnnnngnnnnnnnccnntnncntnnnnanngnaaagcttgtgcctcacccttgcttcaccttcagctgcggaatccgagttcaattcaacctttctcgactgtttttgtttcacgtgaaacaaatttatcttccattgggagcgaacctgtgatatgnaaatgctatancnnntcatatttataactnnttgatttataagtgatttctgtgagtaagattgtcgcagtcgcaaaccaaaagggaggtgtcgggaagactacgaccagcgttaatttaaccgcagcactcgctctcgaggggaaacgaaccctacttgtagacgttgatccgcaaggcaacagttcgacgggcctgggaatcgaccggtcacaggttacggcgagtctttatgatgtccttgcggggaccaagttcttgggcgaggcgctctgggcgactgaaattccccagctaatgcttattccgtcgaccagggatctcgtgggtgcagaaatcgaattggtcggcgccgagaggcgagagtatcgactcaaagacgcgttaagctcagtgcgcagtcactatgattatgtcctgctcgattgcccgccgtcgctggggctacttactctaaacgcgctgactgccgccgactcgcttctaattccgatccagagtgaatattacgctttggaggggttaagcgctctactggaaaccgtgaccttggtgcagaaagggctcaatcccgaactttatcttgaggggatagtgatcacgatgttcgacagccgcaaccgactgtcgcatcaagtggtcgaagaaattcgttctcattttcccgataagctctaccgaactattattcgccggaatgtgcggctcagcgagagcccgagttacggcaagccggtatgcttgtatgatgcaagctctacaggctcgcaggactatcgggatttagcaaaggaggtaattgatcgtggagaaaacagtgtcgctgcaaaagaggggtttgggtagaggcctcagcgcgctgattcccggtgcagccgaagcgaaagcagaaacgaagactgacgctagcaatcttaagattgacatcgataggatttcgccgagccctttccagccgcgccgcagatttgatgaagccaaaattgaagaacttgcgtcatccattcgcaatcaggggattattcaaccgctcgtagttcgacccaagggtgatggctacgaattaatcgccggcgagcgtcgctggcgcgctgcgatgaaagcgggtttgctggaggtccccgccgttattcgcgaggcgagcgaccaggaagccctgcaactggctctggtcgaaaatctgcagcgcgaagatctaaatcccatcgaagaggccagcggttatcggcgcttgcaggaggaatttcactggagccaagaagagatggcggagagagttggcaagagccgtccggctatcgcgaatgccatgcgcctcctcgcgctccctggtgaggtccagcatgaagtggcgtccnggaatctacccgtcggccaggccagggcattgcttgggttgcagagtgagccattgatcgtttcatcttgtcgtgaggtgatcgcaaaaggtttgtctacgcgtgaaaccgagaagctcgtacgtcgtctcatggcagggaggagacggcggcgtcaagtttctcttatcgatcccgatctaaagtcaattgccgaggagttgcagcgctcgctgggaacgcgagtgcggttgatcccgaaggcgaggtcaacgaagggaaaaattgagatcgaatattacaccttggtggacttggagcgaatcatccacgcgatcaccggcagacgttatcccgcataaaaacgtttggctgtcaatgctccagtagtggcttgagctcttcccagttcgtggccggcgccgagcaggtaaagttgtggcagacgtaaacagtcggtttaccgtcaagctgtgtttttccctgcaacagaggtgaaatcttttcgagggattggtccgggccggcgagctgaagactcttgttcggcaaataaaccgagtgaattctatttactaactccgcgacattcgtatcgtcgcgggttcctatgacaacgatctctttgggtttcctcgagtacagatccaaggcgcaaagcatgtgagcgaagccaaacggctggctcat

SEQ ID NO: 517 - DNA, 4000 bp, Escherichia coli
  misc_feature (175)..(175): n is a, c, g, or t
  misc_feature (592)..(592): n is a, c, g, or t
  misc_feature (625)..(625): n is a, c, g, or t
  misc_feature (628)..(628): n is a, c, g, or t
  misc_feature (640)..(640): n is a, c, g, or t
  misc_feature (643)..(643): n is a, c, g, or t
  misc_feature (655)..(655): n is a, c, g, or t
  misc_feature (685)..(685): n is a, c, g, or t
  misc_feature (688)..(688): n is a, c, g, or t
  misc_feature (691)..(691): n is a, c, g, or t
  misc_feature (694)..(694): n is a, c, g, or t
  misc_feature (705)..(706): n is a, c, g, or t
  misc_feature (715)..(715): n is a, c, g, or t
  misc_feature (718)..(718): n is a, c, g, or t
  misc_feature (727)..(727): n is a, c, g, or t
  misc_feature (745)..(745): n is a, c, g, or t
  misc_feature (751)..(751): n is a, c, g, or t
  misc_feature (772)..(772): n is a, c, g, or t
  misc_feature (799)..(799): n is a, c, g, or t
  misc_feature (1108)..(1108): n is a, c, g, or t
atagggcatcgaaccgctatcaaaccagacgtcgatcaggtcactttcacgtttcatggctttgcctgaggggctcaccagtacaacggtatccatgatatgacggtgcaaatctattttagcgtagttatcgtcgctcatgtccgttgggtcaaaatcacccattggattcgtntccatgagaccggctgcaatcgctttttcaatttcttcttttaattgggccgcgctttcaatacagaggtgttcgtcgccttcctctgtgctccagatcggcaatggaattccccaaaagcgcgaacgactaaggttccaatcgttgaggttttctaaccaatttccaaaacgtcccgtacccgtcgaagccggtttccaattgatggtcttgttcaacgcaatcatttggtcctttttcgctgtggatttgataaaccagctgtctaatggatagtataagacgggtttgtcggtacgccaacagtgcggataactgtgctcgtacttctcaatcttgaacgctttattttcaatttttaatttcaatgcaatacgctcatcgacgctgaggtaagcttttagctcaggtatgatnggcttcaatagcgcttgttgctttgccaattcntcngctttctcctcntcngtgaggtattcngccttaatgtattcttctccgaagccaaanacnggntcngccaattcagnncggaacttnccncttaaatcnaccaacggtactagattnccttgntcgtctttcaccaacaaaggnggtacacctgcatcggcagcaactttngcgtcgtccgcaccaaaggtcggcgctgtatgcacgatacccgtaccgtcttctgtggttacaaaatctccaggaataatacggaatgcgtcttcaggacgttcatcgggcagtgcgtacggcatgagttgctcgtatttcaagcccactaaatctgtacctgtaacggttttctcgatctggtatggaattttttttgcgcctgcttcgtaggcagccgtatctccttccacgaattttttaccaaagagtttccccaaaagtggcgtggcagcaacaatgctaaccggttcgtgcgtgtattggttnaaggtgtggactaagctgtattctattttgggacctacagttaaggccgtatttgatggcaaggtccatggtgtggtggtccaggcgaggaagtgtacggtcgcggcgccgaagagcgcttcactttgcccgttatttatcattttgaattgggccacgacggtattgtctttgacatcctggtagcagcccggctgattcagctcatgtgagctcaatcccgtacccgcctttggtgagtaaggttgaatggtatagcccttgtaaatcaagccttttttgtagagttgcgagagtagccaccacacactttccatgtatttaggttcataggtaacatagggtttgtccatatctacccaatagcccatttggtcagtcaagtctttccaaataccggtataacgcatgactgcggtgcggcacgcatcgttgtattcttctacagtgatggacttgcctatatcttctttggtaatgcccaattctttctcaacacctaattctactggtaaaccgtgagtatcccatcccgctttacggtcaacgaggtagcctttttgcgttttgtagcgacaaaacacatcttttaatgagcgtcccataacgtgatgaatacctggaagtccattcgcgcttggaggaccttcaaagaaaatccaaggctcggcatccttgcgtgcagcgagcgtttgttcaaataaatgcgattgcttccatttggctaaaacagctttgtggatgcccgcgaggtcgagattggcgtattctggaaatgtactcatgaggttattctacagtagcgatacacttaagttctatggcaatgggcgtaggtaggctgtttatttctacggtagttcggcacggttggttctcttggaagtattctgcatagatgcgattgaacgtatgaaaatcacgtttcatattaacaagaaagacctgtacgtcgaccaattcttcccaagaagaaccgctcgcctccaaaatggccttcacgtttgcaaaaacactgtggacctgtgcttcaaaatcaaaagctttaaaattgccattgtgatccaattccaatcctggaaccccgctatcattcgcatcgcttcccgccgttctaggacctactcctgagaggaacaacaggttgcctacttttctggcgtgcgggtacaaaccaactggttttggggcggttgaggttgaaatcttgcttgaatcggccatatcacttctttattgagtctgcaaaaatagggaatgcacatgggaagcccttcatgaaatggcaacagcttcaaagaaaacttagtgttatttgtacacttagtacaatttgttatatatttgcacctgtatgtgaagattggtggttctttcttttcatgcttctgtgataggttctaggggctatttggcagagtttttaaggtgttactgagccgatttttaacacctgagaatccttccaaattcccctttttttatgccctaaactttcgtttttagggatttttactctgccaatgtgtccatttttgcaggaaagtttcgaattggcccttttttagcagtcataaaagtctacccttcgggtacaacctattatttttgtggactatttataagaatctgacagcctcatgctgaaactcatatccaaactcgtgggatctaaaagtgaccgcgatcttaaaaaattacagcctcacgtagaatctgtaaatgcattcgatgcagcgctcaagacaatgagcaatgatcagttgcgtgagcgtacggttgcgttcaaagcgagcatcgcggaagcgacggctgaaacaaaagcatcaaaggatgcactccatgcgcagattgatgctacaccggattatgatgctcgcgaacctttgtacgaagaaatagaagctttagacgcacaagaactcgaattgattgaaggtgtgttgagcgctatacatccggaagctttcggtgtgatgcgcgagacggcccgacgttttaatgcgggtgatgttcgtgccactgcgacagtattggaccgagaattggcaaaaaatcatcctcatattaccctagacggagatgaagtaatctattcaaattcgtggaaggctgcaggtggggatattacctggaacatggtacactatgacgtccagttgatcggtggaacggtcttgcataaaggaaagattgcggagatggctacaggtgaaggaaaaacgctcgttgcgaccttaccagtctatttgaacgctcttccgcagcgcggggtgcacgtggttacggtaaacgactatctagcgaaacgcgatagcgaatggatggcgccggtatttaattttcatgggttaacgatcgattgtattgataaacacccttcgaattctgaagagcgtcgtgccgcttattatagcgatatcacctacggtacaaacaatgaattcggtttcgactatttgcgcgacaatatggcgcgccgtcaagaagaccgggtgcagacgcgcggacaccactttgcgattgtggatgaggtagatagtgtcttgattgacgatgcacgaacgccgcttatcatttccggcccaacgccaaagggcgatcagcatcagttcaatgagttgaaaccgtatgtcgatgcactgatgacggctcaaaaggcattagttcagaaagaattgaccgaagcaaagaaattgattagtgaaggcgataccgaagagggtggcgtgaaattattgcgcgcctaccgtggtctccctaagtcgaagccgttgattaaattcttgtcccaagacggtatgaagtcgctgctccagaggacggaggcgaattacatgcaagagcaaggcaagaaaatgaaactcatcgatgaggaaatgtatttcatca

SEQ ID NO: 518 - DNA, 4000 bp, Escherichia coli
  misc_feature (153)..(153): n is a, c, g, or t
  misc_feature (985)..(985): n is a, c, g, or t
  misc_feature (1071)..(1071): n is a, c, g, or t
  misc_feature (1111)..(1111): n is a, c, g, or t
  misc_feature (1453)..(1453): n is a, c, g, or t
  misc_feature (1504)..(1504): n is a, c, g, or t
  misc_feature (1587)..(1587): n is a, c, g, or t
  misc_feature (1621)..(1621): n is a, c, g, or t
  misc_feature (2229)..(2229): n is a, c, g, or t
  misc_feature (2421)..(2421): n is a, c, g, or t
  misc_feature (2813)..(2813): n is a, c, g, or t
  misc_feature (2853)..(2853): n is a, c, g, or t
  misc_feature (2874)..(2874): n is a, c, g, or t
  misc_feature (2898)..(2898): n is a, c, g, or t
  misc_feature (2929)..(2929): n is a, c, g, or t
  misc_feature (3071)..(3071): n is a, c, g, or t
  misc_feature (3153)..(3153): n is a, c, g, or t
  misc_feature (3163)..(3164): n is a, c, g, or t
  misc_feature (3180)..(3180): n is a, c, g, or t
  misc_feature (3184)..(3184): n is a, c, g, or t
  misc_feature (3220)..(3220): n is a, c, g, or t
  misc_feature (3222)..(3222): n is a, c, g, or t
  misc_feature (3238)..(3238): n is a, c, g, or t
  misc_feature (3364)..(3364): n is a, c, g, or t
  misc_feature (3378)..(3378): n is a, c, g, or t
  misc_feature (3397)..(3397): n is a, c, g, or t
  misc_feature (3673)..(3673): n is a, c, g, or t
  misc_feature (3678)..(3678): n is a, c, g, or t
  misc_feature (3761)..(3761): n is a, c, g, or t
  misc_feature (3806)..(3806): n is a, c, g, or t
  misc_feature (3833)..(3833): n is a, c, g, or t
  misc_feature (3836)..(3836): n is a, c, g, or t
  misc_feature (3847)..(3847): n is a, c, g, or t
  misc_feature (3878)..(3878): n is a, c, g, or t
atcacctctatctttgctgtcatcaagccgcgatccagcggcatcagaaaggtagagacgatgacgaagacatggttcatcacgggcacatcctcgggtttcggccggatcatgaccgagaagctgctggcgcgcggcgatcgggtagccgcnaccctgcgaaagcgggaggccctggctgaccttgaggcgcagtatggcgaacggctctgggtcgcaaacctggacgtcaccgacgaccgggccgttcgtgcagtcgtcgacaccgcctttcaaaagatggggcgcatcgatgtcgtcgtcagcaatgccggatacggcctgtttggcgctgcagaggaggtgagcgatgcgcagatccgtcatcagatcgataccaacctgatcggctccatccaggtgatccgcgcggccttgccgcatctgcgtcagcagggcggcggtcgcatcctgcaggtcgcttcggaaggcggacagatcgcctatccgaatttcagcctctatcacgcgaccaaatgggggatcgaaggtttcatcgaggcggtagcgcaagaagttgcttcctttggcatcgacatcaccattgccgaaccgggaccggcgggcacggatttcggcgccggtctcgtcaggccgccgcagatggatgtctacgaggacacgccggccggccaggtgcgcagggcaattgccggcggctcgttcaagatcctgggcgatccagtgaagatgaccgacgcgatgatcgcggcggccgaaaaacaaccggcacccaagagacttgcgcttggcagcacgacctatcagtcgatccgcaaggctctgggcgagcggcttgccgagctggaagcacagaaggagatcacgctgtcgaccgatatcgacgtctgactgccctcagcggtcgatcgtcgccatgatcgtgtcgttgtagcgcttgccggaaaccttgccgggggcaagcgcttcatcgagcgccttcatntgttcggcgccaagcgcgatggaggcagcggcgatattgtcttccagataggcgcggcgtttggtgccggggatcggcacgaaatngctgcccttgtggaggatccaggcgagcgccacctggccnggcttgactccgagcgaggatgcaacggagcggacggcctcggccgcgcgaacattggcgtcgtaattttcgccctgatagcgtggatcgccacggcggaaatcgccttccggataatcctctgcgcgcttgacctctccggtcaggaagcctcggccgagtgggctgaagggcacgagaccgatgccgagttccttcaaggcggggatgacgtcggcttccagattgcgctcccacagcgaatattcactctgaacggctgagacgggcaggacggcatgagcgcggcggatattggcgacaccggcttcggaaagcccgaaatagcgaaccttgccctcnttgacgagttcggcaacggtagcagcgacgtcctccatcgggacagccggntcgacgcggtgctggtagatgagatcgatgtggtcggtggcaagacgcttgagcgagccctcgacggcgctgcgaatggtttncggccggctgtcgcgctcggtgccgacctgcttnccatccttcaggcgaaagccgaatttggtggcgagcgtcacctcgttgcggcgacccttcagcgcacggccgagcaattcttcattcctgtaggggccgtagacctctgccgtgtcgagaaaggtgcagccgagctcgatggcgcggtgaagggtggcgatggattccgtttcatccgccgggccgtaggactggctcattcccatgcatccgaggccgatggccgatacttcaagtccctggctgccgagtttgcgcttctgcatcatcatgctcctgcttctcaaatgggagaggtctatatagaccccagcgcaggattatgaatgcgcgaaaatcccgataaactgcgtgagcgttcagctgttacgttggtgccggttgttccggtcatcagatgtgtaggtggcgaggcgaagcgcatccatcaggacggcaatgatttgcttccacatggcgtttctcctttcgccagtgttctcctcctcttgcgcgcaaccttcaaacgagcttatcgtcggtttcggataacttgaggttatgggatgaaacgcggccggcttcccctgacggcattgcgcagcttcgaggttgctggccggctcganagcttcacgcttgcggcggaggaactgttcatctcgcaggcggccgtcagccggcagatccgcgagttggagcaactgttgggtgaaccgcttttcgagcggcgtcatcgcagtgttctgctgacgggaagcggacggaaactgcttgccgtgctcactccatcctttgaccggatcgatgagtgcctggangatatccgcggggcttcaatgtctgcggatctgaaagtcagcgtcgagccttcctttgccgcttgctggctggtgccgcgactgccggaattccgcaaacgtcaccctgacgtcgagatcttgctcgatgccgatccgaggacgatcgaatttcgtaccggccaggcgcagatcgcgatcagacacagcgccaccgtcactgcatggccacgaacagaaagccggcacctgatcgatgtccgcatggtgccggtgatcgcatccgatcttctggaacgtggcacgccgatctcctctccgcatgacatctttgcgtatgggcttttgcatgaggaaacccgcgacgcctggagccggtggtttggggcggctggccttgccatgcccgaganggcgagggggcccgtctatgccgatgacggcctcgtgctncaggcggcgctgcgcggccanggcgttgcgctccttgatgaagcntttgcagaggaggaaatccggggtggccgtntacgccagcttttcgatctcgctgtgccgaacggcgcctattggctggtggcccgcagcttcgaccgccttccgcctccggccgcggattttgtacgctggatcaccgaaagctttcacaagcgctgacgtctacccgcctntcgccatccgcttttgggcggcctcgcggacaagcttccatcgggtaagctcaagcgtggcgtctgccaatgcgcgatgcgncgggattgcnnccttgctttcctcgangatnccgtcgatgagcttcgacagctctgtctcggtgacngncgctcctgtcaattcncgcgccgtggccataaaggcatcacgtgacttgccgagcctgagagcatggcgcggaaagcctgcggcgcgcaggagaacgctgagccattttccgtcccatgacggcgcgctcgcatagagatcntggccggtcaaaanctcgaccatttcgccggcnacctgctccaccggcacgccctgcgacgcaagcagcgcctgcggaatcccgtggattgcttccgcatccgcagcccaatcgtcccagtcgggggcaggccggatcaaggtcgagtgcgagcgtccatcctcgaacacccaggcaacctcgatgggaacgcttttcttgctgagggacgaagcctcgaaatccaggaaaacgatcaatgcaacgcgacaggcgagagctgccctccagcgaaagactttatcccgatcggacggtgcctcaagtttngggcnccggctcgaacgaacaggaaatgcagcctagctctgccggcatttatttgtcgagccgcgtgccatcggcgctgaagatatgnaggtgggcaggatcacagatgaaagcgagctgactgccggtcgcnatgtcgccagatcctctatattcgacngtnagaggctgacngtcgccaagctgacagtagaggaattgagtnccgccgagatattcgtcgaaatcaacccttgccgccagaaccccatcccgcggttcggcaatgctcagatgttccggccgtgcgccgagcgtgatcttctggcccgccgtcaggcccgcgcc

SEQ ID NO: 519 - DNA, 4000 bp, Escherichia coli
tccggagacatcggcataccccatggtgaaatcgtccgtaaccccagcagcctctatttggtccatatcttccggttcccggatagccaagaaatgatgacggttgaaccgaacatttttaccgatatgatcttccagaccggttttctctttccggataaggctgggagtcgtacccgcttggtagctactatgcaaaccaatagttacattatgctctagagcactttttatcaatttacgaatatctttattcctcaaatcgtaatgaggtttgtcgtgcttggctttccccccgttccggataaataggatagggtgacattgttccttcccgatcaaatcctgaaggatactattctggcggaaaaaccaagggaaggtataaaacgggtctttctcaagggtaccgaatttaccttgaaaggatttatataaacctcttctatctctaatagaccgtatcaaacctttccacgaacgatatagagtcggagaatctacgtcgtgcgtgaggtagatcttccggatttgcttttttacctcgggtacacgtaaccgggattggcgtagccaacgatgaagcagcatgcgatattcatccacgatcggacgatgcaggaaaccggcccggtagggcaaggactctttaccgggaaatcttccatgctcatcccgaagtccacgccgtaccatctcctcgtatctggaaatgagaaaataagtacttgcgatgatatcggcatgaaccacccatgtatctcttacccattcctctttcggcgagccgaataacaaggggataccttgaacctcttgcaaagggagttccggtaaggaagcaggagtcccgtatgtttgtccatcaaagaagccggatggaatgataacgacgttatatcggtcgaatttattgggatcagccgtgtacccgatcgtttccaccagttcgctagggacatcatctcctacaagaaaacgtattatataatgtaaagtgcgatttttcatacccatttgcttagtttaatgcgtgctctgtctaataaactcaatttccccctagatattgtgaaaaatggggtttggatagctccgaactcgcggaagaaacgttctactccgggtagcatagacccttcgaaatcaaataccgtcgtaaattgagaaacgaaatgaagacattcccacaggacgtagctttgcgctccggaacctctatagaccggatttcctcctccagcgagatagtaagccgatcgatcttgccatacgatgaaagcggccgcatgtaaatggccttgctcgtcataacctccccataaatcaccttgtcctctttgtcggcaagtggcgatcaagtctttcagtacattcgtgtcttccttgattcgtacatgctggcggtcaaatgtttgggcttgtacagctaggaactcattcaaaggaatccctttttttacggatatatggtatttattctgcgctttcgtaatatttcgccggatattggggctcatattctcccataccgcttgatgatcccggatattttttaataaataggtataacgtgtcgtttggttatatcccgcccaataaaacggaagccaatccgtgatgtcataattgaaattttgcaggaagtgcggatagcgttttagttcttccgtgaattgtttgcatagttcttgacgtcgtcctaactcggtcgtatatttcgtgtcggaggaacttgcggtgaaccaagggcccattgtttgggtgtaagaaggcattgagacaatatcggaatgggggacgtaaagggggagggttgcctgtatctttcccttttgttctataagcaagacatcccattttttttctccgcaaaccgtatccaaccaccagtcatgtgagaagatcggtatatttttttcagtattgcaaagtaaacgatatttgtctttattactcattacaatttcgtataggggcggggggtgcccgcccccgcaaattacttgttggcttttaatgcctcaaatattaattcggataattcgtctgccaattcgggattgtcctcgacacattgttttgccgcatcacgaccttgtcccaatttggtatcattgtagctgtaccacgaaccgctcttcttgatgatattcagttcagagccaagatcgatgatctctccggaacgggagataccttgaccgaacatgatatcgaactctgccttgcggaatggaggagccaccttgttttttatgactttcacacgcacttggttacccttgatctcgtcaccatctttcagctttccaatactacggatatccaaacggactgaggcgtagaacttcaacgcattaccaccagtcgtcgtttccgggttcccgaacattacgccgatcttatcacgcaattggttgatgaagatacaggtcgtattcgtcttattgatcgcagctgtcaatttacgaagggcttgcgacattaagcgagcttgcagacccatcttgctgtctcccatatcgccctcaatctcagctttaggagtcaaagcggctacggagtcgataacaatgatatctacggcggatgaacggatcaactgctcggctatttccaaggcctgctcaccgttatccggctgggagatccataggttctctacatcaacgcctaacttttcagcatagaaacggtcaaaagcatgctccgcatcgataaatgcggcgatacctccttttttctgagcctcggcgatcgcatggatcgctatggttgtcttaccggaagattccggaccatagatctcgacgatacgtcctttcggatatccgcctacgcccagcgctgcgtttaaagcgatagagcctgtcggtatcacctcgatatcctcgatgttttcatcgcctagtttcatgatcgaaccttttccgtagttcttctcgattttatccattgccgcacgtaaagcctttagcttatccgtgttagcggctggtttaccaccttcttctttcgctttttcttcgaacaaattttcttcttttgccatatgtgtcccttataaattaaggatttgatttgcatggtcttttgtcttcacctctttcggcccgatgatattagtaacaataccttcctcgttaatgataaaggtggtccggagagtccccatgtatgaacgtccgtacatttttttctcagcccacacaccaaactgttcttgtaaggtcgtgtctgtgtccgctattaaacggaaaggtaagttttgcttttgtataaagccttgatgcgatttggcgctatctttgcttactccgatgatctcgaagcctttcgcttgtaaggcttgatagccgtcacgtaagctgcatgcttccgccgtgcaaccgctcgtgttatctttcggatagaaatagagcgctacttttttccctttatagtcactcatctttacctctttaccgtcttgatcggttcccaaaaactcgggaaccttatcgcctatttgtactgccatattacaattctaagtcaatgttaaacaattcatgccaaggcaaaccttgctcatttagctctttcatgaatgggtccggattgaattcctctacattccatactcccggtttcttccaaatgccttgcataaataatttggcgccgatcatggcgggaacaccggtggtataactaacaccttgcgctcctgtctctagataagcggcatggtggctacagttgttgtatacgtaataagttaattccttaccgtccttgataccacggatgcggcaaccgatggaagtctcgccagtataattctctcccagatcacccgggttcggcaatacggcttttaagaattggatcggaacgatttcctgcccgttgtaaaggatcgggtcgatacgagccataccgatattttggatgacacgtagatgagtcaagtattcctgtccgaaagtcatccagaaacgagcccgtttgaggg

SEQ ID NO: 520 - DNA, 4000 bp, Escherichia coli
  misc_feature (1508)..(1508): n is a, c, g, or t
  misc_feature (1751)..(1751): n is a, c, g, or t
  misc_feature (3191)..(3191): n is a, c, g, or t
agtcattaaggctaaagtaattcctgcaactaatggagttgatcttggtagatgaaaggtcccaagcaaaatacccaaacctaataatccaaatacaatggaaggtactgctgctaaattatttatattaatttctataaaatcagtaattttatttttaggagcaaattcctctaaataaactgaagctgcaatagcgattggaaaagataataataaagtaattacaatggtaaaaaatgaacccactaaggctccaccaattcctgcaagttcagggtttcttgaatctcctttagtaaacaaatatgagttaaatattttattaacttttccttcattaactaattcgtcataaagatttaattgaaaattattaatccgtcttcgctcttctggaagttctctagggtaattacctttatgcaattgatcaaaatcatctgatgcagttagttttaatacagtggtttgatttaaagcttttggattatcaagtaaaaagtttcttatttcatattcataatcaggactaaataaattaattaataacttttcttcagttaaaccattaactttttttactttaagaatactatcaattgctagttcatagtaatctgtattttctaaatcttcgagtggaggcgattcacttaattctaaagtgtcagcatcaaaatttacctcaacatcgatagttgtttttaaaaatgcgccactgccttttgaaaagatagcatttaataaaaagattacaaaaaaaattgctagtaaaatagaagttaatccatagagcttaaatcttttttcagcattatgtcgtttttttaatcgttgctctttattcatatttttctctatattttttaacaaatcttaaggctatgtagtttaaaattaatgttgcaaagaaaagtgttaagcccaatgcaaaagcagattgtgtttttggactatcgaactcctgatcgccaattaataacattacaatttgagtggtgatggtagtggtagactcaagtggattaatggttagatttgcggctaaaccagcagccattaccacaatcattgtttcaccaatggctcttgatacagctaataacaccgagcccacaatccctggtaatgcagcaggaattacaacatttttaatagtttctgatttggttgctccaattgcataagatccatctcttaaagattgagggactgcattaatcacgtcatcagataatgaagacacataaggaataatcataacccccattaccaatcctgcagcaagagcactttcagaagatacctctaagtttaacttttcacctaattctctaaaaaaggggccaacagtaagcgctgcaaaaaagccatatacaactgttggaattccagccaggatttcaataattggtttagaatattttctaactttagaacttgcgtactctgccatataaattccagaaaataatccaataggaacagctacaagcattgcaatnagagctataaatgctgtaccagcaaataaaggaacagaaccaaaagcaccttttaaattttcatattctaaagctgtaattgctgaggcatcactaacgaaagctctttgaggactccaattcattccaaacaaaaaatcaaaaatattaattgctgaaaaaaattttaaactttcaaataaaagagagaaaataattcccattgttgttaatatagcaactagagaacatacaaaaagtaancctgttaaaattttttcaacatcatgtcttgctttattattttttgaaattctaaaaatcccatatgagatagcagcaataaaagttgataataataaaacaattttagaattttgagcaattgtttgtaaattttcataattcttaacacctattttaatttcttcagttaaggttcctgaaaaattaccctcataaagtgatctaattttttgataaagtaaattaagttggtcactcgaataatttaaatcgttttgaattaaagtttgtgagatcaaatatttaataatcgctggttcaaatatagaccaaaataataatataattaatgctggtaacgcgcaccataaagctagataataaccataataatttggtagagcgttaatctttatagattgtgttgatgtaatttttcttattctagagcgaccatataaaaatgatagatagctaaatattgtaactaataataaaattataatattcatgagcttatgtattacagttttaatgttacagatttgttacaattttaaactacaaattgtactaataaaaaaggccagaagtttattctggccttgattgtgtttgaggaatttaaattacttgatgctaatagtgtttaattcgaccgctgcagttcttacaacatcatattttgctttagctaaaggtactaaaccgatctcagctaagtaacctcttggtcccattgctttttttgacgtaaaatctttaataaatgcgtcaattccaggaactactccaatatgtgctttttttacataaaagaataaaggtctagctattggatatgagtaatcttgaataccttcaagactaggtttaactccttctatagctgcagctttcaccttgtctttattgccaactaaatagctataaccaaaaaagccgtatgcgtcaggatttgatgctagtttttgaacaattagagtatcgttttcacctgcttctactgcataaccgtcttcacggattttagtacattcgctactagctttgtcaccaaaaagtgcttttgcctctttagaacaacctttgctcattactaaagaattccatgcatctcttgtacctgatgttggtggggcaataagaatttctatctttttagaaggaagtgatggatcaatgtcgctccattgtttatatggattagcaaccaatttaccatctacatctacttcatttgctagtgctctccaaagttgttctttagtaaaatttgaatctggagaatctactgcgtgagctaaagaaataccgtcatttcctacaataatttctataatttcagttacaccatttttttcacataatgctttttctttagattttatagctcttgatgcattagtaatatctgggtgatcagtgccaacaccagcacaaaataatttcataccnccacccgttccagtgctttcaattacgggcgttttaaattttcctgttttaccaaaattttcagcaacaacagttgcatatgggtaaacagttgatgaccccactatccggatttgatctcttgcttgaacatttgacgcaaatagcatcaccgtcaagattgataaaataattttaacatttttcatttttatttttcctttgtttatttatatttaattcttataaaatttctttgtttcaattttattacaagtttatgaaacttttatgacaaagaatattttattatcttctaaaattttatacttttggaaattcaatggtaaattcagtaccttttccttcagtactgataatatccatagttgcacggtgttgatttactatatgtttaacaatagccaaacctaaaccagtaccccctgcatctttgcttcttgcaggatctactctgaaaaaacgctcagtgattcgggataaatattttttaggaattccaaccccttggtctttaatagaaaacaaaatagtgtccattttcttaaccaaggaaattttaatgacagtatcactatcgctatacttgcaagcattatcaattaaattagtaaaaatttctattaatctatttctatctccagaaattttataagtatcatctgtaatattgttttctatttttatcttttttttcttaacaagctctgaattcaatttaatcacgtgagttattatttcttttaaatctaactcagtggtgggtctaatatgttcttgtaattcgatttttgacaatgaaagtaaat

SEQ ID NO: 521 - DNA, 4000 bp, Escherichia coli
  misc_feature (1291)..(1291): n is a, c, g, or t
  misc_feature (1488)..(1491): n is a, c, g, or t
  misc_feature (1493)..(1498): n is a, c, g, or t
  misc_feature (1500)..(1504): n is a, c, g, or t
  misc_feature (1508)..(1515): n is a, c, g, or t
  misc_feature (1517)..(1522): n is a, c, g, or t
  misc_feature (1524)..(1525): n is a, c, g, or t
  misc_feature (1527)..(1541): n is a, c, g, or t
  misc_feature (1543)..(1545): n is a, c, g, or t
  misc_feature (1550)..(1555): n is a, c, g, or t
  misc_feature (1559)..(1560): n is a, c, g, or t
  misc_feature (1564)..(1565): n is a, c, g, or t
  misc_feature (1569)..(1571): n is a, c, g, or t
  misc_feature (1575)..(1578): n is a, c, g, or t
  misc_feature (1581)..(1586): n is a, c, g, or t
  misc_feature (1615)..(1615): n is a, c, g, or t
  misc_feature (1706)..(1706): n is a, c, g, or t
  misc_feature (1711)..(1713): n is a, c, g, or t
  misc_feature (1715)..(1717): n is a, c, g, or t
  misc_feature (1720)..(1721): n is a, c, g, or t
  misc_feature (1727)..(1734): n is a, c, g, or t
  misc_feature (1737)..(1738): n is a, c, g, or t
  misc_feature (1740)..(1742): n is a, c, g, or t
  misc_feature (1747)..(1747): n is a, c, g, or t
  misc_feature (1749)..(1750): n is a, c, g, or t
  misc_feature (1752)..(1754): n is a, c, g, or t
  misc_feature (1756)..(1757): n is a, c, g, or t
  misc_feature (1759)..(1760): n is a, c, g, or t
  misc_feature (1763)..(1763): n is a, c, g, or t
  misc_feature (1766)..(1770): n is a, c, g, or t
  misc_feature (1859)..(1859): n is a, c, g, or t
  misc_feature (1862)..(1863): n is a, c, g, or t
  misc_feature (1990)..(1992): n is a, c, g, or t
ggacgcgcgcgcgaggcggaacgaacaaagtctcgaatcttttacacgacgcgaaacgcgatgacgcgacggaaaaaggcgggaataaactaggaaaaatacgcagcgcgcgacgcgcgcgggcgcggggcgcgaggggagggatgggaagacgcgaagacgcgaagacgggctcaacggtcgacgcgctcgacggcggcggggagaaagaaacaactcgcggcggcgatggcggcggcggaggaacataagatcatgccggcgttgtcggtaccgatgaaatcgtccaatacgccgaggacgagaggtccgatgaggaagatgaaatcggcggcggatttcggaagcgtcagggcttcgccttcgccacccttgggggcgagctcttgcgcgagggcgttgatcgcgggaccggccgcggcggtcccgatgccccacgcgccgatgaaaaatatcaactcagattgcgtctgcgactgggcgccgaagaacaaacccgtggcgcacgcggcgagcgcggcgccgacgacgacttttttgccaaatttatccgccgccaaaccgctcagcggggcggtcgccagacctaacaacgcggtgatggagaacaagtttccaacctccgcgggcgacgcgtccaggtgcccggaggcgtagagcggaatcacggtgagcttggcgacgaaacccagggaattcgccgacgcacacaacaacaacacgcgctgctcgcgattcgccaacagcgtcaaccaactgctcgactcgcgctgactcttgcgttcccgcaactcttcgcgctcgtcgctcgacatgaaagggttaagcccttcaaacattcctccgtcctcctcgtccatcgtcgcctttaattccgccgcctcgcgcgtctcctccgtgagcgtctcgggcaaaaacgaatacccgatcgccgtcccgaccgccgccgcggcgacgtaataaaacgccgcgggcgcaccgtacgcctccatcaatctccctcctaacaacggtcctatcaccaacccaaccgcgtgcaccgtgctctgtcccgcgacgatgattcctcgcttctccggcacgcgcgcgcacaaatccgccagatacgccctgtctccgcactcgcaccccgcgcgtccgactcccagcagcatccgcatcggcaccagcgccgcgacgctcctcgacatcgccgttcccacgtccgcgagcgccatcaccaccatccctcccatcatcagcggtttccttccgtatcgatccgtcgcccgccccagcggcaggttcagcnccagcatcgccagcgccggcgcgctgatcaccaccccgttcgccgagctcgacagcccgatcgactgcgcgtacagcggcagcgccggcagcagcgccccgacgcccaggaacagcacgaactgcgacgcgagcagcgtgcgcaggggctcgtagacgtctcgcggcagcccgagcgtcgtcgccgcgcgcgcgccnnnncnnnnnncnnnnncccnnnnnnnncnnnnnncnncnnnnnnnnnnnnnnncnnngccgnnnnnncgcnnccgnncgcnnncgcnnnnggnnnnnncgccgtcgccgtcgccgtcgccgcgtctntcgtcgtcgccgtcgccgtcgccgtcgcgccgtcgcgtcgtcgcgtcgtcgcgcgccgtcgcgccgtcgcgcggtcgcgccggcgcgacgncgcgnnngnnnccnncgtccnnnnnnnncgnncnnncgcgngnncnnncnngnncgncgnnnnngcgcgtcgcggattcgcgtcggcattcgcgcgcgcggcatcgaatcgaatcgaatcatgcgcgcgatgcagcgcggcgtcgcgacgcgntcnngcgcggacgtcgcggacgtcctcgtcgtcggcggcggcgtcgccggcgccgcgctcgcgtgcgcgctccgcgcgcgcgacgcgacgaaagatctgcgcgtcgtcgtcgtcgacggtggggacgcgcnnncggcgccgaagcgcgacgacgcgatcgacgcgcggtgcgtcgcgctgacgccgcggtcgcgggcgtttctggcgcacgagtgcgggggggcgtgggacgagatcgagcgcgcgggacgggcgagggcgttcgacgcgatgcaggcgtgggacggcgtcggcggcggacacgcgacgtacgacgcgcgggagctcggcgcggcgtccctggggacggtggcggagaatcgggtcgtgctttgggcgctggagcgcgcgggcgagcgactgggggtcgaacgcgtcgcgagggcgcgggtgacggcgacgaagacgccggaggaggacgcgagcgggacgccggcgcgggcgaccgtcgtcgtcgaggacgcggggaagggcgggaaggcgacgacgacgcgcgagaggggggcgggaggtggtgaagcgagcgagcggacgatggagatcgacgcgcggttgatcgtcgcggcggatgggccgaagagcgcgacgcggacggcggcggggataaaagtcggggggtgggggtacgggcaacgcgcggtggtggggacggtgaggaccgatcgcgcgcactcgacggcgtggcaaagattcttgccgacgggaccgatcgcgctgctgccgatcggagacgggacgtactcgaacgtggtttggacgacgacgccgagcgaggcgaaacgcttagccgaggacgcgagcgacgccgagttcgcgcaggcggtgcacgacgcgttgcaagggcagggggcgtacaagtcgcagtaccaagaagatttcaatcgattcgcgacgctgcgtttcgtggaagacgtggcgaatcaggtgtttaagccgctcgcgcgcgcggcgaggacgacgatgagcaaagtcgtcggcgtccccgcaattgagggcgcggacgaagcggcgcggctcgatttcgcgcctccgtttcgttacccgcccgatgtattgcccgcgggcgaaggcaccaagcgtggatctttcccgctgtccacgcaccacgcgacgcgcctgatcaagcctcgtctggcgctcatcggcgacgccgcgcacgtcgtccacccgctcggcggtcagggcttaaacctcggcttacgcgacgccgagctcttagcgaacgcgatcgccgacgcccgcgcgctcggacaagacatcggcagcgtgaacgctttgaatccgtacgctcgcgcgagcgtcgccgccaacgcgccgatgatggcggcgctcgacggtttacaaaagctcttcgccaacgacacctaccccgtcgccctcgcgcgctcgctcggtctcgccgcggtgaacgccacgggtccagttcgcagaaagatcgcttggtacgccatgggcggcgcgtgagcgcgcattaattcttaatccaaatcatcattcattcgtcgacgcctcgcgccgcagacgtcgcctcgccatgcgcgccgagcccgacgacgacccgagcccttcgtcccgcgcgccgtccacgtccacgcccgacgcttggacgcgatggctcaccgtcgcgaacgccgaactcgcgcgcgagggcgtcgcgcgcgccctgcgaccggttcaaccgcgccggcggcgaatcgaccaaagcgacgcgaacgacgccgcggcgacgtgcgacgcgcgcgagagcacgctcgagcggtggcgaacgaacgatgatgatctcggggagtcgtgcgacggcgcggggacgtcgcgcgcgctgcgcgtgttcagtgggaacgattatttgggattgggcgagcacgcgcggacgcgtcgcgcggcggcgaacgcggcggcggcgtacgggtgcggaccgcggagcagcgcgctcgtgtgtggatacacggacatgcacagggcgctcgaacgcgagctggcgaggatttgcgagacggaagagtgcgtgttgttcccgagcgggttcgccgcgaacgcgacgacgctgccggcggcgtgcggatcggaggattgttgtatatttagcgacgcgttgaatcacg

SEQ ID NO: 522 - DNA, 4000 bp, Escherichia coli
tcgcagcgcgtgaccgcgcgctatcacctacggtccttcaaagaggaagaatcgcagcggtacgtggcgcatcggatggagatcgccggccagcggcagccgatcttcaccaagcaggccgtgcgcgcggcgcaccgcttgtcacagggcaccccgcgcctgctgaacacgatctgcgatcgcgccctgctcggcgcctacgcgacggggcagacgcgggtcaaggaggcggtcgtccgccgagcggccaaggaagtgctgggcgcgcggcgcggccgccgatggctcgcggcgacggcaaccgcggtcctcctggtcgccgcgggcagtaccgtcgcgctgatcgcgacgggcgggctgcgcactctcggcgcgtggccgctcacgcgtgccgagaagagcccgccttcgccagacccagcggttgcggcggcgacgaccgacgagcgacggccggcggcgccgactctgacggcgattctggacgaccccgaggtcagcgccgacagggcgagcgccttcgtgaacctctacgcgctctggggtctcgacgcccggagcgcgactctcgacaccaagagcgcgacccccgatcgcggctgcgagctcggacgcgcggcgggcctgcgctgcctggcccgaacgggaacgtggaccgtgctacggcgtctcaatcttccggcgatcctcgagctcgccacacccgacggccggaagcatcacgtcgtcctggcgagtctcgacggtgagcgggcgacgctcgagatcggctcgcgccgggtcaccctgccgagtgtcgaggtcgagcgcttctgggacggccccttcgtgatgatctggaaatcgccggtgaccgggcccctgccgctccagcccggcatggagggccgcgacgtcgcctggctgcgccagcgactcggcgcgctcgacgggcagcccaccgccgcgaaggccaaccagatctacgacgatgagctcaagcgcaaggtcgctgtcttccagcaggtcgagtcgctgattcccgatggcatcgcgggtgaagagacgctcgtgcgcctggtcgcgacggcgccgggagcgaacgctccctccctcaacggggtacgacagtagggatgtcctacatcctcgacgcgctcacgaaggccgcccaacagcgagaccggcaggctcccgtcgtgcagcgactcctgtcgcccgcgccgcggccgcgatcggcgtggagcctgacgcccggacgtctgctcgcggcgcttgcggtgaacgcgctgctcctggccggcgtgctcttctggtggctccatcctgccccggtcgccgcgccgcctgaaccggttgccgtcccggctccgccggtggagagcccgcgccccctcgtcaagctcgagccgctgccgagccccgagacgaaggttggcaagccgacggcgtcgacgaccgagcgtagcgccgagacaccggcgactccgtccaggccgagcccgccaccatcagcgtcgacaccgagccctcgcgtccagacgccagcgccgccgatcacgccgagtcctcgctccgggacaccgaccgtgcagccgacgcctgcgccggcgacgccgccagtcgcggcctcacgacccgccgcgcccccggaggcgtcggggctcaggctcgaggcgctgatctacgccgacgtccccacggagcgaatggtcttcatcaacggacgccgctaccgtgagggcgatgcgatcgacggccggctacggatcgaggaaatccgcgaagacggcgtcgagctgagcgatcaagggcggcgcttcatgttgcgcgtcgcccgctgacccgcggctgatctccgccagtcctggcgcgcccgcggcattcctgtcacgctcgtccttccccgcatcgcggcgccggctcgccagccccgtctttcatcgcggaaagtctgtcttttccgtcgcggttggttcgccgtttccggtggctcgactcttgcaattatagagtcgattttccgggagggagaaatgcggccacagatatggaggacggcgctcccctgcgtcggcgcgctcgcgatgctcctcgtcgccacgctccacgcggccccgcccgctcgaaccgtcaaggtcgcggtcttgacgccgggactcggcttcggcgaggtcctggcgggattccgtgagggactcggtcagctcggctaccgcgagaacgtgaacctgtcgctgctcgtcgaggacacgaaggggaccggatccgacgtgaaggcgcaggcccaggcgctggtcgccgccaagcccgacgtcctggtcaccgtcggtacctcccacaccgtggcggccaggaccgcgacctcgacgatcccgatcgtgttcacctgggtcggcgatcccgtacgctccgggctggttccgaactacgcctcgtccggcaacaatctcacgggagtgtccgtgtactcgggcccgctctccggaaagcgcctcgagatcctgaaggagatcgcgcccgacgcgcgccgcgtcctgtgcctggtcgccaaggagagcatcgccgagatcagcttcaacgtcgcgcagcgcaccgctgatcagctgggcatgacgctgatccgccgtgacgtcaccagccgggacgacatcacgcgcgagctcggcgcgctccccaagggcgccttcgacgcgatttttcacgtgccctccggcctcctgagcgcccacatcaatctcctcatccagcgtgcgcgcgaggacaaggtggcgttgatggcgcacgaggacgagatggtcgcttccggcgcactgatctcgtacggcgcgaactaccggcggatgggtcagcagacggcgcgggtcgtcgaccgcgtgctcgcgggcatggcgccggccgagatcccgatccagatcccggacaagctcgtgctcgcgatcaacctcgtcacggcgcggacgatcgggttgaagccttcgctcacgctcctcgagcgggccgagcgcatcgtcgagtagctccgcggcgccgatgctccccgcgatcggccctcggctgggaaccctgcgccggcgactgtttctcctgctggcggcggcgagcgtcatcgccgtcgtgggcgtcaacctgatctggctgcccggcgcgctgcgggacgttcacgatgcccggcgtgagctccagctggtcgctgtccgcggcgtgcgggaccagatcgacttctttctcgccgacaaggaggaagggctgacgacggtcgcgcagctcttccgcgccgccgtcatcgacggcgacccgaagggtctcgcgatcgtgggccagcggtttctcgcgcgcgagcgggccttcgaggaggtcggcatcttcgagccgccccggacgtggcgctaccgactgtcgcgccgcgaggtgatggcgagctcggcgaccgacgcacccccggcgctcgacacgatcccgcgaggtcgcggagtggcctggggcgcggtcacgaccaccgagacgtccgagccctggctgacgctcgccgcgccgctctcgggcgccgcggaaggccggctgctcgtcgtcggggtcctgaatctcaaggatctctggacgctgaccgccgagctcagcctgggtcaagacggacgcgcctacatcgtcgaccggcgcggcgggctgatcgccgccgacgacgccaatctcgtgctcaagcggttgtccctgagcggtcggccgttcgttcggagcctcctcgaacaggaccacccgagcggcgtcaccggctcctacacgaacgagcgcggcgtggaagcaatggcgacgggcctgcgcgtggatcgcgtcggctggggcgtggtcgtcgagcacccgcgggccgtcgtgaccgcggcggtgggccgcaagctctggttcttcgccgcgctcaccgcggccggcgtgctggtcagtgccggggcagctcacgtgctgagcgcgcgcctcactcggccgctcgagcgtttgcggctgggcgtgcagcgcttcggccgcg

SEQ ID NO: 523 - DNA, 4000 bp, Escherichia coli
  misc_feature (136)..(136): n is a, c, g, or t
  misc_feature (286)..(286): n is a, c, g, or t
  misc_feature (434)..(434): n is a, c, g, or t
  misc_feature (485)..(485): n is a, c, g, or t
  misc_feature (762)..(762): n is a, c, g, or t
  misc_feature (830)..(830): n is a, c, g, or t
  misc_feature (1037)..(1037): n is a, c, g, or t
  misc_feature (1174)..(1174): n is a, c, g, or t
  misc_feature (1185)..(1185): n is a, c, g, or t
  misc_feature (1245)..(1245): n is a, c, g, or t
  misc_feature (1257)..(1257): n is a, c, g, or t
  misc_feature (1266)..(1266): n is a, c, g, or t
  misc_feature (1281)..(1281): n is a, c, g, or t
  misc_feature (1293)..(1293): n is a, c, g, or t
  misc_feature (1305)..(1305): n is a, c, g, or t
  misc_feature (1341)..(1342): n is a, c, g, or t
  misc_feature (1347)..(1347): n is a, c, g, or t
  misc_feature (1351)..(1351): n is a, c, g, or t
  misc_feature (1363)..(1363): n is a, c, g, or t
  misc_feature (1386)..(1386): n is a, c, g, or t
  misc_feature (1404)..(1404): n is a, c, g, or t
  misc_feature (1503)..(1503): n is a, c, g, or t
  misc_feature (1527)..(1527): n is a, c, g, or t
  misc_feature (1536)..(1536): n is a, c, g, or t
  misc_feature (1695)..(1695): n is a, c, g, or t
  misc_feature (1784)..(1784): n is a, c, g, or t
  misc_feature (1793)..(1793): n is a, c, g, or t
  misc_feature (1826)..(1826): n is a, c, g, or t
  misc_feature (1989)..(1989): n is a, c, g, or t
  misc_feature (1991)..(1991): n is a, c, g, or t
  misc_feature (2013)..(2013): n is a, c, g, or t
  misc_feature (2249)..(2249): n is a, c, g, or t
  misc_feature (2261)..(2261): n is a, c, g, or t
  misc_feature (3583)..(3583): n is a, c, g, or t
  misc_feature (3653)..(3653): n is a, c, g, or t
  misc_feature (3656)..(3657): n is a, c, g, or t
  misc_feature (3661)..(3661): n is a, c, g, or t
  misc_feature (3663)..(3663): n is a, c, g, or t
  misc_feature (3668)..(3669): n is a, c, g, or t
  misc_feature (3671)..(3672): n is a, c, g, or t
  misc_feature (3678)..(3685): n is a, c, g, or t
  misc_feature (3688)..(3688): n is a, c, g, or t
  misc_feature (3691)..(3693): n is a, c, g, or t
  misc_feature (3695)..(3695): n is a, c, g, or t
  misc_feature (3698)..(3702): n is a, c, g, or t
  misc_feature (3704)..(3704): n is a, c, g, or t
  misc_feature (3706)..(3709): n is a, c, g, or t
  misc_feature (3711)..(3711): n is a, c, g, or t
  misc_feature (3714)..(3714): n is a, c, g, or t
  misc_feature (3718)..(3719): n is a, c, g, or t
  misc_feature (3722)..(3722): n is a, c, g, or t
  misc_feature (3724)..(3724): n is a, c, g, or t
  misc_feature (3727)..(3731): n is a, c, g, or t
  misc_feature (3734)..(3734): n is a, c, g, or t
  misc_feature (3737)..(3737): n is a, c, g, or t
  misc_feature (3739)..(3739): n is a, c, g, or t
  misc_feature (3743)..(3745): n is a, c, g, or t
  misc_feature (3748)..(3748): n is a, c, g, or t
  misc_feature (3750)..(3752): n is a, c, g, or t
  misc_feature (3757)..(3762): n is a, c, g, or t
  misc_feature (3766)..(3767): n is a, c, g, or t
  misc_feature (3770)..(3771): n is a, c, g, or t
  misc_feature (3774)..(3774): n is a, c, g, or t
  misc_feature (3776)..(3779): n is a, c, g, or t
  misc_feature (3781)..(3786): n is a, c, g, or t
  misc_feature (3788)..(3788): n is a, c, g, or t
  misc_feature (3790)..(3790): n is a, c, g, or t
  misc_feature (3792)..(3794): n is a, c, g, or t
  misc_feature (3796)..(3797): n is a, c, g, or t
  misc_feature (3802)..(3802): n is a, c, g, or t
  misc_feature (3805)..(3808): n is a, c, g, or t
  misc_feature (3810)..(3813): n is a, c, g, or t
  misc_feature (3815)..(3815): n is a, c, g, or t
  misc_feature (3817)..(3818): n is a, c, g, or t
  misc_feature (3820)..(3820): n is a, c, g, or t
  misc_feature (3822)..(3824): n is a, c, g, or t
  misc_feature (3830)..(3830): n is a, c, g, or t
  misc_feature (3832)..(3832): n is a, c, g, or t
  misc_feature (3834)..(3834): n is a, c, g, or t
  misc_feature (3837)..(3837): n is a, c, g, or t
  misc_feature (3839)..(3839): n is a, c, g, or t
  misc_feature (3843)..(3843): n is a, c, g, or t
  misc_feature (3845)..(3848): n is a, c, g, or t
  misc_feature (3852)..(3853): n is a, c, g, or t
  misc_feature (3858)..(3858): n is a, c, g, or t
  misc_feature (3861)..(3864): n is a, c, g, or t
  misc_feature (3867)..(3867): n is a, c, g, or t
  misc_feature (3871)..(3871): n is a, c, g, or t
  misc_feature (3875)..(3876): n is a, c, g, or t
  misc_feature (3878)..(3879): n is a, c, g, or t
  misc_feature (3883)..(3885): n is a, c, g, or t
  misc_feature (3887)..(3888): n is a, c, g, or t
  misc_feature (3898)..(3899): n is a, c, g, or t
  misc_feature (3920)..(3920): n is a, c, g, or t
  misc_feature (3924)..(3924): n is a, c, g, or t
  misc_feature (3926)..(3926): n is a, c, g, or t
  misc_feature (3931)..(3933): n is a, c, g, or t
  misc_feature (3938)..(3939): n is a, c, g, or t
  misc_feature (3942)..(3942): n is a, c, g, or t
  misc_feature (3946)..(3946): n is a, c, g, or t
  misc_feature (3948)..(3948): n is a, c, g, or t
  misc_feature (3951)..(3952): n is a, c, g, or t
  misc_feature (3954)..(3955): n is a, c, g, or t
  misc_feature (3962)..(3964): n is a, c, g, or t
  misc_feature (3967)..(3967): n is a, c, g, or t
  misc_feature (3969)..(3971): n is a, c, g, or t
  misc_feature (3974)..(3974): n is a, c, g, or t
  misc_feature (3978)..(3978): n is a, c, g, or t
  misc_feature (3983)..(3983): n is a, c, g, or t
  misc_feature (3985)..(3985): n is a, c, g, or t
  misc_feature (3991)..(3991): n is a, c, g, or t
  misc_feature (3994)..(3994): n is a, c, g, or t
  misc_feature (3998)..(4000): n is a, c, g, or t
agaaagcatgcaaaaagcagtagataaaattgctgagcttaaagaacgttataaacgtattcgtgttgcagaccgttcaagcgtattcaataccgatgtgctttacaccgtagaattaggttacatccttgatgtngcacaatctattgccaactctgcaattgaacgtaaagagtctcgtggtgcacaccaacgcttagactacactgaacgtgatgatgtgaattatttaaaacacacccttgcttactacaatggcgatgatgcaccgcgtattgaatacagnccggtgaaaatcactaaatctcaaccagcaaaacgtgtttatggtgctgaagcagaagcggcagaagcggctgcgaaagctaaggagcaagcaaatggctaattcaccagtaatgactgtagaagtattacgctacaacccagaaaangatcaagagccacatttaagctcttatcaagtaccttatgataaccaaacntctcttttagatgcgttaggttacattaaagataaacttgaaccgtctctttcttatcgctggtcttgccgtatggcgatctgcggttcttgtgggatgatggtgaataacaaacctaaattggcttgtaaaacgttcttacgtgattacagcggccatatgcgtattgaaccattagcaaacttccctattgaacgcgacttagtggttgatttaagccactttatcgaaagtttagaggcaattaaaccttatattattggtaacgaagcaccancattagatggtaaaccacatccatcaaaagaattgcaagtaagccgtactaaacaaacgccggcacancttgaaaaatatcgtcaattctcaatgtgtatcaactgtggtttatgctatgcggcttgtccacaatttggtttaaaccctgaattcttaggccctgcagcgattacaatggcacaccgttacaaccttgataaccgtgaccatggtaaagcacaacgtatgccattattaaatggtaaaaacggtgtttggagctgtactttcgtnggttattgttctgaagtgtgtccaaaacacgtggatccagcttctgcaatcaaccaaggcaaagtggaaagtgccaaagattatgttatctcaatgctaaaaccaaaaggctaaggggaagaatatgtcagtaacantaagtaaacgnaaaaaatatgttcgcccaatgacggctacttggtggcaaaaattggatttctacaaagcntatatggtacgngaagcaacntctatctttgctgtntggttctgtatngtattgctttanggtgtactttgccttgcaagcaatcctgtaccaggnntaggnattnttgatttcattngcttcttaagaaatccaattgtngtgttcttaaatatcatnacattaattgcgaccttatatcacactgcaacttatttcgtgatgacaccaaaagtgatgaacatcattgttaaaaatgaacgtttaccacatcacgtnttaagaaatgcactttgggcagtnacagctgtnattagtgttatcgcattaattttagtttatatgtagggagagaaaaaatggtcgatcaaaatccaaaacgctctggtgaaccaccagtatggttgatgtttggtgctggcgggactgtcagtgcgattttcttccctgttgtgatcttaatccttggtntattgttaccatttggattaattgatccacataacttaattacattcgcttattcttggatcggaaaattagttatcttagttttaacnattttcccnatgtggtgtggtttacaccgtatccatcatgcnatgcacgatcttaaaatccacgtgccagcaggcggatttatcttttacggcttagccatgatttacacaatctgggtattatttgctgtattaggtttgtaatttaaaacactaaattgataataaaagtgcggtcaaaaatgaccgcacttttttattctcnangaataaccaaaatattttcttnatctagaaaaacaaaaaacccgacattacgtcgggttttcttttatcaaaaactttgataattattctgcaacaacgataacatctaatgttgcaaatacttcgccgtgaagttggaaacgaacatcgtggtcaccaagagtacggattggaccgtttggtaaacgaacttcgcttttcgcaatttcaacgcctgctgcagttactgcttctgctacatcacgagtagtgattgcnccgaataaacgnccttcctcaccagctttagatgcgatagttacagaacctaatgcagtcacttgtgctgcacgagcttgagctgctgctaaacttgctgctgccgctgcttctaactctgcacgacgagtttcaaagtgttcaatgttagctttagttgccataaccgctttaccttgtgggattaagaagttacgagcgaaaccagatttaacattaacttgatcacctacgttacctaggtgaacgattttatctaaaagaattacttgcatttcctaactccttcttaattgtgatgagaatcagagtaaggtaataacgctaaataacgagcgcgtttgattgcgcgtgctaattggcgttggtacttcgcacgagtaccggtaatgcggcttggtacaattttgccgctttcagaaatgtagttctttaatgtagcgatatctttgtaatcgatttcaacaacattttccgctgtgaaacggcagaacttacgacgacggaaataacgtgccatttggctgtctcctaatctataaattcgatttgctcggcatgcaatactaactgcgttaaaccatttgaggttttatgtgaagttataaaccccaccacaagaagtttactgccgaccgtaatgctttgagttttttctattaactgattgccactgacttgaactggcatctttaaccacgcttggcgtgataaaccactttcgacttgttcggaacgatgttccagccaaaactggcaatgcgcaatcccgttagggcttttgcttcgtttaggtaattgacacactgtgccgattaacgagaagcgattatcaagttttgaattactcttcagcatcctcaaaatcgttgttttcaacttcagctaaaggtttacgttcttctttagccgctttcattggggacgcttcggttacggcgtgcttagtatggataacaagactgcgtaatacagcatcgttataacggaaagtcgtttctagctcgtcgatgacttgttgaggcgcttctacattcataagcacatagtgtgctttgtgtaatttgttaattgggtacgctaattgacgacgaccccaatcttctaggcgatgaacttgaccaccagcttctttaacagaacctgtgtaacgttcgatcatacctggtacttgctcgctttggtccggatgaaccataaacacgatttcgtagtgacgcattactgctccttacgggttaatcagcctttgacgtagattagccaccaatctgcaaaggcaaggaacgaaaaaatgaacgtggctaagggcgctgattatacagatttttttncagacttcaaataatttgtacgcttttcaaacaaaaaaagccgatatcaacatatcggcttttcttttanttnnaaantnacggnnanngaaaannnnnnnnccnttnnntnaannnnnangnnnnanttntacnnttncnttnnnnnccnttnanatannnatntnnnttttnnnnnntttnncannaanannnncnnnnnncncntnnncnntttcnaannnnannnngnanntngnnnttggtnangnttncnaaantnnnncttnnatttnaannnnatnttcntttnncnntttnnncnntaaaattatnntttttttgaccgcactttttncggntntaaannnaaaannggngaantntanncnnttttaannntanannnaanattnaaatngnattttnttnaaannn

SEQ ID NO: 524 - DNA, 4000 bp, Escherichia coli
agccgaacgcgtggagaagtgggacccggacgcgacgtcgtggtcgtgctcgcgtcgtttgccgaaggatgcgaattcgtgggtgtacaaaaacaaaaagcgcgaccagagcgtcgacgagtcgccggcgaagaagacgaaaaagaagaagagtgccggcggcgggctcgcggcgagctttttccgcgattagatcataggtacgggatttcgtattgtaaaatagaacgaacactctaacgccatagcaccagtactcgcactcaacgctcgactacaactcgagggacattcacccctcgacgaagagaaaagaatggtgaactcactgctgggcgcattgaacgccgggttgtccgccgccttcgtcgtcggactcgtattggctttgttgtctgctctcggcttcgcgacgacgcttttcttgctccatatcaacctcgtgcatgttaacctcttccacattttcactctccatgtcaatgctaagctgcggtcgcgcgggtaaaatcttttcgagcgccttgagatcgtcttcggacaagtcgcccggagccggaaacttgacggtgaagtggatgaacaagcgacccttttggaaaggcatggtgtgcttaggcataccttcgtcgaatacagccttgaattgaccgggcttgatgacttcgccctcgtgggtggagatgacgagttgacggccgtcgaggtgatcgacggtcatcttcatcccgcacaacgcctctacgagggagatttctttttccatgaataaatcgtcccccttgcgcgtgaacaccgggtgctccttttgttgcacgacgaagatgatgtcacccggcacggtgtccggcgcttcgtcagcttcgccttggaagaccactctttggttgtgcttcatgcccttttcgatgtgcacctcgagcaccttcttttcttgaacaaccttttgagcgtggcacttctcgcacttatccttctcgctgatcgtctgacccgtgcctcggcaatcgttacagacggtctgcatttgctgcaccatccccggcgcgatttgtcgaacgacaaccttgacgcccgcgcctctgcatccgttgcacgtgccgctcgcccccgacttgctccctttcccatcgcatttttggcaaatcacattcttcgacaggctcagcttcttcgtcaccccgttgtacaaatcatccaatccaagtttcaacccatgcacgacgtcctctccctttcgcacgcgagatctccctcctcctcgtccgccgccgccccccggcccgaacggattccctccgaacatcgcctcaaagatatcaaacggcgatccgcctcctccgcccatgcctccgtccttcagcgcgtcctcaccgtattcatcgtacagctgtcgtttttcgtcgtcgctcagcacttcgtacgcggcggagatctctttgaacttttgttcgtcgccgcctttatccgggtgatgcttcacagccatcttgcggtacgcctttttaatctccgccgccgacgcccccttgctcacgccgagcaggtcatacagcttcgtgtcggtggactgcgtgcgttcgtcgtcgcgcgcgttcgtcagtcgttttccgcgtcgcgcgtcgcgcgcgtcggggcgtcgtcgcggcgtcgccgccgccgagtttcgcgaggcttcgaacgcgagatcgcgcgcggggcgccgcggcgaggcgacgcgcgcgccgcggcgaggtcgcgatgggcgaggcgcgcttcgaggctatcggcgcgcgcgcgcaccttgcgtccgggctggcggccgaacatggcgcgcgcgaatctgacgcgcgcgcgaccgccgtcgcgttgacggtgacgtgacgggataaataaagaaactcggacatttggtcatacagtgaggattatttgttcgatgtgcgtgcgtgcgggctgtgtgcgcacggcgcggggaaggatcgagacgctcacgcggagaagcgcgagacgacgtgggcgcggccgaaacgctcggtcatcacggccatgatgcgcgccgcggtctcttcaactcccttgtgcgtgacgtccaagactttccacgtcgggtttcgccggaataaggcttcggcgaggtcgagctcttggcgaaccacggagaggtccgagtaggaggagcggcgcgacgccgcgcgattggagacgcccgtggcgtcgctcctggcctgggattcggcctcggtgacccccatcgtcctgaggcggtgcgcgcggatggcgtggagaacgtcgggggagattttgaggccgaagatgcggtttggatcgacgtcggcgatgtaggacgggattcgtaattcgccgttgacggggaccaagggtaaattcgcgactttgtatccgcgctgtccgagaaagatgctcagcggagtttttccggtgcgactgatgcctagaatgaggatatcggcctctttccacttcgcgctcgacgcgccgtcgtcgcactgtcgagtgtattccacggcttcgatcatacggtagtaatcgctcgacaacaacgccgccgacacgctcgcgctcgacatcgagttcgtcgatccgctcgaacgaatcggtcgcttgatcatcggtagattcatcgaaggcatctccaaatgcccctccatttgacgcaaaagtgtgccccagacgttgacggcgtcgacgcccgccgcggcggccatccgcgccatgctttctgacatctcaacctccgccagcgtgtacacgatcatcgccccgtcttctttcgcctgagcgacgatggtcgcgagctctttattgtcgttgatgaatctgaaaacttctaaattcgtcggataggaaatatccatgcacttttcaaattggccgagcgcagcttgcaccgcctgcgtcgccgtggcgcccgtcgaatcgctcacgacgaatatgggtttcggcaatttgctatcactcggcgccgcggtcataccctctggtatcggcgtatcgcgcacgaacttgctcaccacctcgcgcaccgatgcggtcgaggtggacgtcgtcgtctccgtcgtcgtctccgtcgtcgtctccgtcgacgaacctcctcgcttcttactagacaacgaccgcgcgcgagacaacttccgcagcgccgccgtccctcgtcgcgcacccgcgcgtcgaacctcgtctggatcgctcgcttgcaccgccggctgcctcaacggccacgtcgtcgctccgttcgcgctcgcccgcctcagctcggcgagatccgcctcggcgcgtcgcaacccgtcccgcagcgcccccgccttggcctccgccgcccgcagctccgccgcgagcgtgctattctcgacgtatccattccctggcatcacgcgccgcagcgcttcaccgctcaccgtcacctccagccccgtcacgcgatccagcgtctcccccgtcggcgcccgccacagccgcgacaccttcgtcttatccaatttcgctcgaatccgcgcccgctcgcgcgccatccgcgcgtgcgcgtcgctcgcgtttcgagacatcgtctccgcgtcgctcggcgcgtcgctcgccctcgtcgccgcgtcgtcgtcgcgccgcgcgtcgtcgcgcgtcgacgtcgcgacggttagaggcgtcccgttcggcgcgtcgaccgtcggaccgcgccccggcgcgcgtcgaccgcgtcgatcgcctcgcggtcgcgcgcgcggaccccacgcgcgcgtccgcgtcgcccgcgcgcgcattcgatcgccgcgcggcgcgcgcgcgcgtctgcgggcgtcacatcgcgtcgacgacgccgtccgatgtcccggtcgtggctcgatgatttgcgacgcgcgtgcgcggacacgcgcgcggacgccgcggcgctcgacgcgcgcgcgcgagacatgggcgcgcacgccggcgcgcggccggacgcggtgtgcgcgccgcgaacggtcgaggaggtggcggcgatcgtccggacgtgcgcgaggcaccg

SEQ ID NO: 525 - DNA, 4000 bp, Escherichia coli
  misc_feature (942)..(942): n is a, c, g, or t
  misc_feature (1983)..(1983): n is a, c, g, or t
  misc_feature (1987)..(1987): n is a, c, g, or t
caattgctcatgaaatatttcatcattggtttggtaatttagttacctcagaaagttggagtaacctagctttaaatgaatcatttgcaaactacagtcaatatttatggagagaatataaatatggcaaaaccaatgctgacgctcatttatatgaaaatagtaaagcctattttgataattccgataattttaataaaaaattagtgcgttattattatgatgataaagaggatatgtttgatctaattagttataataaaggtggaactattcttcatatgttgagaaattatcttggtgataaagcctttttttcaggattaaaaaaatatttaattgacaatcaatacaaatcagctgaagtttctcatttacgcttagcttttgaagaggttagtggtttagatttacaatggttttttaatcagtggttttatggagcaggacatcctaatattcaagtttcttacgattataacctattagaaaagacagtcacagtaaattttgttcaaacccaaacaaatgagttcaaatttccaatggctatcgatatttttgaaaatggaacaaaaacaagacatcatgtttttgtggacagcagagatagttcctttaaatttgtttttagcagtaaaaatccagatttgattcaagtaaatgccgatggtgttttattagcgaacttctcagagaataaagttttgagtgattatatttttcaattaaaaaactcaactaattatcagcacaaaatagaggcattgtcaaatgtatcagagaatcaagaccaaaagaaagcttttaacgctgttgcaggggctgtaaacgacgatttttataaaataagaatacttgcgttagaaaaaattaatttaattaataaatggtctaaaaaatcagtaattaatactattaaaaatatagctaataatgatnctaaaacattagttcaagctgcagcaattgaaacattaggtaagctaactgatccagaattaaaatcaatatttgaaaaaggcctcgccagtgattcctatactgttattggaaaatcattagtggggatgtactatatagacaaacaactagcagtaaaaaagtctaaagaactacctgtagaagtaaaaaacatcatcgcaaccccattaactagaatatatattgaggaaaaagatgattcggaaatggattttgtggcaaataatgtgttggcgggaatgtatttaaataacaaccctaaaatacaggaaatttataagaatgcatacgaacaaattgcagtaagtaataacactaaggctattcaaaatttagttaaagatattgtagctaaggggaaacaatacaaacagtataattttgatcaaatagggataagtttgctgaggcaattagttcaaaaacaaaaaactgctaatttgtcaaataagtataaaaatattaagataattagagagggaattgcagagctaattcaataattattttttttatactcttcaaatgtcccgtcttcataaaaaacaactattctgttcattttttttgatgacttcgaattacttgtttctattatagatgactcattaggtgaaaaaaccttattggttggtccttgttctttagggaattcacctttcccatttaaaagccaataaatatcaacatcagtgaacgtattggtaaccttcaatataaaatctaaactaggtttatttctacccgatagtatatgagagatactggatcgttgaacaccaattttatcagcaaagagagatgctgttaattggtggtaattgagtattttttttaatctatttgtaaaatctaaaatgttcaccattgtaaactaatatatagattacaaatgtaaaattactataaatagattccaaattaaaataaacagaaattcaaacgacttattattatttaaactaatactttataaataattaataaaatactgatttntagngttatatgtaattattaataatttatgtagattgtttgaaatgaagctgtatttacaattgtaacctactgcaattgtgattacatttataacaattgaatgaattttcattacacaattgtaacattattaagtacatataaaaattataataggttaatactaaaatgattcttgtatttttgtcaatgatatttacaagatgaatacaactttagatttagactatattaaagggattataaaaaaccacaaagagaattctatttgtggaaggtggataagattatctgatgtagaaaagatactatctaaatttgaagatttatctaatttttcgtccagaataattggtgtttctgaagaatcaagaaatatacatgaggttacgtttggaaaagggccaaaaaaaatacttgtttggacacaaatgcatggaaatgaaagcacaggaacaaaagctgtaatagatttatttaattacatacataaaacaaaagataagataactttacaaatcctttcaaacgctacaattaaagtaattccaatcttgaatcctgatggagccgaatattatactagatataatgctaattctgtagatttaaacagagatgctgtcaataaagatgctgcagaaagtaaattgctgagaaaagtattagatgattttaaacctgacttttgttttaatcttcatgatcaacgtacaatatttggagtagagggtgaaaataaaccttctacaatttcttttttagcgccatcagaagaaagttcaagaaaagtgactgatacgcgaattaaaacaatgaatgttatttgttctatgaacaatttacttcaagaaatcattcctggtcaagtaggtagatattcagatgagttttatccatcagcaacgggtgataactttcaaaaactaggctatcccaccatattaatagaatctggacatttcaaagatgattatcaaagagaagttgtaagaaactttacttttatgtctatacttcaaggtatttatcatatatgttcagttaaaaattttaatgattatcaagattattttaaaattcctaacaatgtcaaaatttttggagatttattacacatttatccaaataaagaaaatgtaggctatacatacgaagaaattttagaagaaaatttgataaaatttattccgaaaatgataaaagaggatatttctaatctattttttcataaagaaatcgatttcgttcgttaaaatattgaatatttctcataataaagcttaatatattcaattaaatgtatacttttgtttaaatctttgaattaaataaaaatatgaaaaagtttatattagacgaaatagatcatcaaattttagatattctaattgaaaatgctagaactccatttaccgatattgcaaaaaaattattggtctcagcaggaactattcatgttcgtgttaaaaaaatggaagatgagggtattatacaaggctctacattaactcttaactacgaaaaaatgggatattcattcatagcccatgtaggtgtgtttttagaaaaaacatcaatgactcagaatgttatttccaatttaaattcaataccaaatgtaacagttgcctacgtaactgcaggtaaatataatatcttttgtaaggttagagcgaaaggaaccaatgatgcaaaagacatcatttatcagatagatgaaattcctggtgtaagcagaacagaaactatgatagctttagaagaaagtattaacgataaaaaaagaatgatgcatgcaattttcaaagaattgtaaacaaattatttaaaagatatataacttaaaccttatcattatttgataaggttttttttatgatacaacttataaattgaagatttaactctatttttaatactaacaagattttaaataaattataatcatatttatatatgaaaatagtattttcgtcatgcttacttaaagatgtaatggaaataattttat

SEQ ID NO: 526 - DNA, 4000 bp, Escherichia coli
  misc_feature (6)..(6): n is a, c, g, or t
  misc_feature (438)..(438): n is a, c, g, or t
  misc_feature (1177)..(1177): n is a, c, g, or t
  misc_feature (1462)..(1462): n is a, c, g, or t
  misc_feature (1645)..(1645): n is a, c, g, or t
  misc_feature (2497)..(2497): n is a, c, g, or t
  misc_feature (3037)..(3037): n is a, c, g, or t
  misc_feature (3208)..(3208): n is a, c, g, or t
  misc_feature (3251)..(3251): n is a, c, g, or t
  misc_feature (3289)..(3289): n is a, c, g, or t
  misc_feature (3294)..(3294): n is a, c, g, or t
  misc_feature (3316)..(3316): n is a, c, g, or t
  misc_feature (3328)..(3328): n is a, c, g, or t
  misc_feature (3356)..(3356): n is a, c, g, or t
  misc_feature (3413)..(3413): n is a, c, g, or t
  misc_feature (3446)..(3446): n is a, c, g, or t
  misc_feature (3473)..(3474): n is a, c, g, or t
  misc_feature (3476)..(3476): n is a, c, g, or t
  misc_feature (3479)..(3480): n is a, c, g, or t
  misc_feature (3485)..(3486): n is a, c, g, or t
  misc_feature (3488)..(3491): n is a, c, g, or t
  misc_feature (3493)..(3493): n is a, c, g, or t
  misc_feature (3497)..(3497): n is a, c, g, or t
  misc_feature (3499)..(3499): n is a, c, g, or t
  misc_feature (3501)..(3501): n is a, c, g, or t
  misc_feature (3504)..(3504): n is a, c, g, or t
  misc_feature (3511)..(3511): n is a, c, g, or t
  misc_feature (3514)..(3516): n is a, c, g, or t
  misc_feature (3518)..(3518): n is a, c, g, or t
  misc_feature (3520)..(3521): n is a, c, g, or t
  misc_feature (3524)..(3527): n is a, c, g, or t
  misc_feature (3530)..(3534): n is a, c, g, or t
  misc_feature (3536)..(3536): n is a, c, g, or t
  misc_feature (3538)..(3538): n is a, c, g, or t
  misc_feature (3541)..(3542): n is a, c, g, or t
  misc_feature (3544)..(3544): n is a, c, g, or t
  misc_feature (3554)..(3559): n is a, c, g, or t
  misc_feature (3561)..(3562): n is a, c, g, or t
  misc_feature (3565)..(3565): n is a, c, g, or t
  misc_feature (3568)..(3569): n is a, c, g, or t
  misc_feature (3571)..(3571): n is a, c, g, or t
  misc_feature (3574)..(3575): n is a, c, g, or t
  misc_feature (3577)..(3579): n is a, c, g, or t
  misc_feature (3581)..(3581): n is a, c, g, or t
  misc_feature (3583)..(3585): n is a, c, g, or t
  misc_feature (3587)..(3587): n is a, c, g, or t
  misc_feature (3590)..(3590): n is a, c, g, or t
  misc_feature (3593)..(3596): n is a, c, g, or t
  misc_feature (3598)..(3598): n is a, c, g, or t
  misc_feature (3602)..(3602): n is a, c, g, or t
  misc_feature (3604)..(3604): n is a, c, g, or t
  misc_feature (3607)..(3607): n is a, c, g, or t
  misc_feature (3611)..(3612): n is a, c, g, or t
  misc_feature (3614)..(3622): n is a, c, g, or t
  misc_feature (3624)..(3624): n is a, c, g, or t
  misc_feature (3628)..(3628): n is a, c, g, or t
  misc_feature (3630)..(3630): n is a, c, g, or t
  misc_feature (3632)..(3635): n is a, c, g, or t
  misc_feature (3640)..(3647): n is a, c, g, or t
  misc_feature (3649)..(3651): n is a, c, g, or t
  misc_feature (3655)..(3658): n is a, c, g, or t
  misc_feature (3661)..(3664): n is a, c, g, or t
  misc_feature (3667)..(3670): n is a, c, g, or t
  misc_feature (3672)..(3673): n is a, c, g, or t
  misc_feature (3675)..(3677): n is a, c, g, or t
  misc_feature (3679)..(3687): n is a, c, g, or t
  misc_feature (3693)..(3694): n is a, c, g, or t
  misc_feature (3696)..(3696): n is a, c, g, or t
  misc_feature (3698)..(3698): n is a, c, g, or t
  misc_feature (3701)..(3701): n is a, c, g, or t
  misc_feature (3705)..(3705): n is a, c, g, or t
  misc_feature (3707)..(3707): n is a, c, g, or t
  misc_feature (3710)..(3710): n is a, c, g, or t
  misc_feature (3712)..(3713): n is a, c, g, or t
  misc_feature (3715)..(3715): n is a, c, g, or t
  misc_feature (3717)..(3717): n is a, c, g, or t
  misc_feature (3719)..(3719): n is a, c, g, or t
  misc_feature (3723)..(3723): n is a, c, g, or t
  misc_feature (3725)..(3726): n is a, c, g, or t
  misc_feature (3729)..(3732): n is a, c, g, or t
  misc_feature (3734)..(3740): n is a, c, g, or t
  misc_feature (3742)..(3742): n is a, c, g, or t
  misc_feature (3744)..(3746): n is a, c, g, or t
  misc_feature (3750)..(3751): n is a, c, g, or t
  misc_feature (3753)..(3753): n is a, c, g, or t
  misc_feature (3755)..(3762): n is a, c, g, or t
  misc_feature (3764)..(3766): n is a, c, g, or t
  misc_feature (3768)..(3769): n is a, c, g, or t
  misc_feature (3772)..(3773): n is a, c, g, or t
  misc_feature (3775)..(3777): n is a, c, g, or t
  misc_feature (3779)..(3779): n is a, c, g, or t
  misc_feature (3781)..(3781): n is a, c, g, or t
  misc_feature (3783)..(3784): n is a, c, g, or t
  misc_feature (3787)..(3787): n is a, c, g, or t
  misc_feature (3789)..(3793): n is a, c, g, or t
  misc_feature (3795)..(3795): n is a, c, g, or t
  misc_feature (3798)..(3799): n is a, c, g, or t
  misc_feature (3801)..(3808): n is a, c, g, or t
  misc_feature (3811)..(3813): n is a, c, g, or t
  misc_feature (3815)..(3816): n is a, c, g, or t
  misc_feature (3820)..(3820): n is a, c, g, or t
  misc_feature (3825)..(3827): n is a, c, g, or t
  misc_feature (3829)..(3829): n is a, c, g, or t
  misc_feature (3832)..(3834): n is a, c, g, or t
  misc_feature (3836)..(3836): n is a, c, g, or t
  misc_feature (3838)..(3841): n is a, c, g, or t
  misc_feature (3843)..(3852): n is a, c, g, or t
  misc_feature (3854)..(3854): n is a, c, g, or t
  misc_feature (3856)..(3857): n is a, c, g, or t
  misc_feature (3859)..(3863): n is a, c, g, or t
  misc_feature (3866)..(3868): n is a, c, g, or t
  misc_feature (3870)..(3870): n is a, c, g, or t
  misc_feature (3872)..(3875): n is a, c, g, or t
  misc_feature (3877)..(3879): n is a, c, g, or t
  misc_feature (3881)..(3881): n is a, c, g, or t
  misc_feature (3883)..(3884): n is a, c, g, or t
  misc_feature (3886)..(3888): n is a, c, g, or t
  misc_feature (3890)..(3899): n is a, c, g, or t
  misc_feature (3901)..(3904): n is a, c, g, or t
  misc_feature (3906)..(3911): n is a, c, g, or t
  misc_feature (3913)..(3913): n is a, c, g, or t
  misc_feature (3915)..(3918): n is a, c, g, or t
  misc_feature (3920)..(3929): n is a, c, g, or t
  misc_feature (3931)..(3940): n is a, c, g, or t
  misc_feature (3942)..(3942): n is a, c, g, or t
  misc_feature (3944)..(3951): n is a, c, g, or t
  misc_feature (3953)..(3955): n is a, c, g, or t
  misc_feature (3957)..(3957): n is a, c, g, or t
  misc_feature (3959)..(3966): n is a, c, g, or t
  misc_feature (3968)..(3973): n is a, c, g, or t
  misc_feature (3975)..(3980): n is a, c, g, or t
  misc_feature (3982)..(3983): n is a, c, g, or t
  misc_feature (3985)..(3992): n is a, c, g, or t
  misc_feature (3994)..(3995): n is a, c, g, or t
  misc_feature (3997)..(3998): n is a, c, g, or t
  misc_feature (4000)..(4000): n is a, c, g, or t
tgaccncggccccctaaaatgttctctctgggcaggcgaaggttttcaattttgatttccgagtggctgccgccgagctttaagcctaggtccgtgtgcggttgcatggtctcgatgttgcgcagaatttcgtagccagggttggggagctcgactaaaaacgtgctgtactgttcatgacggggtgcatcagggtcggtcttggccatgacgagggcaatatcggcaacgctcgctgaggaggaaaaccatttctcgccgttgaggacccattcatcaccgtctagaacggccgtggtttgcatccccgttgcatcggcgcctgcagctttctccgtcatggaataacaaatgcgcttctcaccattgaggagtggttttagaaatttttctttttgatggtcggtgccgtgctcgagcaaggtcagcatggtggcntcatcgggcccttgggtattcatcgacagtgctccgagaaagctctcgccaagttccatctggactagggcattggctagtggtcgtaagcccataccgccatgttcttctggaacgaacgggcaccaaagaccctggccgcgcgctttaacacggagttcgctgagtacggtctcgaagttatcagcggtgcaaatctcttctgccggatggcattcgctttggacaaaggcgcgcaccttgtcacgcaccaaacgggcatcttcggggatttcaaaatcaatcatggctctactcttttgtgaaaacgtcgctcgactataacagctcgagatgaaaattgaaggcagtcggatcgaagaaccttaccggcccttcggcccgcttgaccaaagtggtttggctggctataactttcagtcaaggacctgcgagcaggttgcatcgtggtgattttacgcgcgttatttcggcgctgaagacaaccgcccatctttatctttcatcaggaatggcaagcgtgaaaatactgacccgtgatcaaagcgcccgctatcataaaaagggctattgcgccgcggaaggactggttgacagcacctggcttgcgagacttaacgccgtaacccatgactttatcgaagaaagtcgtggggtaacggcgtccaatgcgcgatttgatcttgagcccgatcataccgccgctgcgccgcgcctcagacggctcaatgccccggtngaccagcacgagacgtattgggagtttgcatcaaccggaccttttgccgatatcgcggaagaccttttgggtccgaacgtgaaattccatcactcaaaactcaatttcaaatggagtggcgggggcgaatcggtgaagtggcatcaggatatccagttctggccccataccaattatgatgttttgaccattggggtttacttaagcgatgtcacgcaggacatggcgccgatggggattattcctggaagtcatgatcatgacctgtttgatttgtacgatgcncaagggcgctggaccggccacattcgggatgaggatttgccggcgctcgatgtggatcaagctgaatatctgatgggcccggccggcacgattacggtgcacaattgccgagccgtccatggctctcctccgaatcatagtgcaagtcctaggccgttattgttgtgcgcttactccgcgagngatgcgatgccgatcacgacactcaccgcaggaagcccgcacgctgaagtcgttattcggggtgagcgctcgaagtgggcccgctttgacccgagacccgtcctgatgccgcccgactggtcaaaaggctataagtcgatttttcagtatcagcagggcgaagaggctggataagggtctgatgtggcgatcgcttgaagggctttaatccagctggatgcgcaggcgtttgctgttgcacgcctcgcgctgcacagatccattcgctgccgtgccttttgcatgctcgatcgataacagagtaggatctaggcgtctttggctgctgcgtgaagttaagcgcagagcatgcgctcaagggcaagaaacggtctgcgtcagcaggtaagcaataagccaagttttttaaagtcttggtaaacacaaggagttctattcaatggcattagggattgttgcgacgttacaaattaaaccagatcagatccgtcattttgaaacccattttctgaagttggctgaggttgttttaacagaagagcccggttgtcgattgtatgccttgcatcgctcgagagcggcggaaaacacctatgttgtgctagagcaatatgatgatgaagccgcgtttgccctgcatggcaaatatgaagccttcaagacggccaatgtccctttgaaagattgcttggcgggcccgccaacggtcgaattgctagatggggtcgaggcctcatcgacatcaaccaccgaggaggcattgtaatggccgcatttggcgtacaaatttttccgacggatcaaaccattcagccgattgcccttgccaaagcggtcgaggaacgtggcctngattctttattctttccagagcacacccacattccaacctctcgcaagacgccgtttccaggcggcacagacctgccagagtggtattggcggactcatgatccgtttgttgcgttggcggccgcggcggccgtgacctcacgcattaaattgggaaccggtatttgtttggtcatcgagcgcgacccgattgttctggcaaaagaatgtgcctcgctggatatgatttccggcgggcgcttgatcttaggcattggcgctgggtggaacgtcgaggagatggcgaatcatggtgcctcgttcgaacaccgttgggcgattgttcgagagaaggtcttggcgatgaaagccatctggacggaggatgcggccgagtttcatggcaagcatgtcaatttcgatccgatttggtcctggccaaaacccgttcaaccgggtgggccaccgatttggttgggtgccaattcgaaatgggtgttcgatcgggttgcagattattgcgagggctggatgcccatcggcggcgcgggctctggtgcnatggaggcgatgtctgcggcgctagccaagcgggatcggtcgatggcggatctggacgtggccctgttcggcgcgcccgcgaatgtcgaacaagcaacgaatcgattggaacaaggcttcacgcatttggtttttggactgcctcagcgttctgagcgcgaggtgctgacncagttagattcgattgcgaaactggtggaaaccctgcggtaancggtttttccaacaggttgattctgggtaggcggcgcngtcanggggtaaaaaggtaacggagcntaatctgaatcnttgcgtggatcgcgggttttaaccttgngcgcaagcgccccgcgagcccacgagctcagaacgaagttaaatgaggcagcagganaacgtcgcttaaatcgttgaaaagcgtagtatnaaaaagcgtagtatcaaaaagcgaagnntnaannagagnngnnnnangaangntngancaaaggntannngngnnccnnnnagnnnnnangnttnnanggttgaatgnnnnnntnntgntgnntngcnngnnncngnnngncanaannnncnaatncnggnctcnngnnnnnnnnncnccangncnnnnggctnnnnnnnngnnnttgnnnnttnnnnggnnnnanntnnngnnnnnnnnnccgacnngntnaantgcnanatncnnancncnaaancnncannnnannnnnnnantnnngaanntntnnnnnnnntnnngnngtnngnnngngntnnatngnnnnntnganncnnnnnnnntcnnngnngcgncttgnnncnttnnntntnnnnannnnnnnnnncngnncnnnnngcnnntntnnnnannntngnngnnntnnnnnnnnnngnnnngnnnnnntngnnnntnnnnnnnnnncnnnnnnnnnncncnnnnnnnnannncncnnnnnnnnannnnnnannnnnnanngnnnnnnnntnnanngn

SEQ ID NO: 527 - DNA, 4000 bp, Escherichia coli
  misc_feature (60)..(60): n is a, c, g, or t
  misc_feature (119)..(119): n is a, c, g, or t
  misc_feature (285)..(285): n is a, c, g, or t
  misc_feature (358)..(358): n is a, c, g, or t
  misc_feature (476)..(476): n is a, c, g, or t
  misc_feature (1181)..(1181): n is a, c, g, or t
  misc_feature (1992)..(1992): n is a, c, g, or t
tccctctttttggtggtgtgccagtgaatcactggtcatcgagttctgtcttcatccttnctacttaaggacatcgcaacaaatgacaagcaaaagccatggggagactgagagagcantatccgaagcacgctatgtggcagcgataggttgccagcaactctggcgattcaaagatgtaccccaaacaactcaaccaagaatatacgattgccttgaggagtccgaatgaaccgaatcaatccagcgaaattactgcacagcaaatggacggctgttgagccnaaaaataaagaaaagcattttttggttgttgagattgactacgatgaggatggtattgtgatcgattgccttntcgaagcagtcatgagtcgccgaaaaacctctgttaactggcgagatctaaccaatagcgaccactggaaacaaggctggaaatgaatcagtgatgttgagtgcatggcgagcgtcgngataccgctttacgggtcaaatgaagtttgttgcgcaagaagatattgaaagatttgttcggatccggagggtgttcgatgtgtccatatctggcttttgactgcgttccagttcgcgtctttagagtcgtttaaagtcgatatcaaagaactagcgtcgtagcgttgaacaggcagaccagaacaggtttcaggtccatctaagtgaaatgttgccaataaagcgtagccaccgggtcggaccgctcgatgaagagagtgcagatagtgctgaatggatgtgtgatccatttgaaagtgaaagactgctcgatcgtgccagagatcaatgagcgctggtggttgccactgattgagatctcccacaaaccaggtgatgtgagacgcttgatccttgagttgatgttgtaatgcctgcgaagcacactgagaccattcaacgtgagttaaattgcgatagccagcatcgagtagtgcgggcaataacattgacctacctgcaccaatgtctgcgattgacgccgatcgggggagggtttcacgaatccattgttgcgataatgattgcgcactctctgtccacgagagactttggtcgccatgttgctcgtagcggctttcccaatgatgttgagtggcatggctcgattggtgaggttgatgccgggcgtccttcatagcgttgtctcgggtttggtcgatggncagatagtaatctgatctttgccatgatgcatagacgactgaagtatcgctttatgatgaagaattgagacgattgaggtttggatgaggcgattgaacgtttagcggttgtctttccgtgcgagttcgatcacttgatctttcttgatcgagacgctttggcctggattgtcctcaaattggacaataatcgtttcgcgttttttcccgataaaaccagtgacggttcctttcctttcgggtgcgccgatggtgatccgatcaccatatttatagggtgtattaaggcttaagcttgaccaatattcgttagacacctgatgtccctctgacggatgaaaaagctacgccagaatggcgtagctttagcagtaaactcagctttcgaggctgatgttcgttgcagaggttttaccgcgctcttcttgcaactcgtaagagactttttggccatcattcaaagttcgaatgcctttcaacgacagagccgagatatgtacgaagacatctttcccgccgtcatctggagtgatgaaaccaaaacctttactcgtgtcaaaaaatttaacaacacctgtgctcataataattttctcatatagaagatagtttttgccccacagcattgatgccgggaggtccgtagatttcaaagaggaattcgaagaaaagtcagaaactgcgctaggaagatctaatgaaagcctcggcagtagaacacactgtttaggtaatagatactttttgttcacgatgcgcttaacctgttcgcgtcaaattggctttttcgtcgctgaaatgttaccgtctnccagtgctcagggatgtacgtacgacttgcctgttggactggatatttgagacaaggtggtttcaactccgttcagttcttcgacggttcacaggggctgatcggcgtgattcgttccatctagtatcccgggtagacgatgtcgagcgcgcaaatttggttgatagcttccttgaaggtcgcgaaagtcttcactgactaaatcagcgccggtccacctcctatatacacagccagaacttcttcgagctcttctcttgctaccccgaggccgatgagcgctttcatacggaatgcgatgcaggccgagcagtgctggctaatcccaagggctagtgcttacatcaattcagattactcagaccgaatttctcatcaagtggatgggcccaggagctgcttggccatccagtcaatcacaaactgcctggcaactcgaccgccgcgcccgccacgcccaatcgcaaatcggtttgcctcaatcgccatagtctcggagaattcgggaaggtcgagattttgtcctaattcacggtaccagtgtttgacaattgtgatgtaaacctcctgagaataggggtaaaacgacagccaaagaccgaaacgatccgatagagaaacccgttcctcaaccgcgtcgccctgatgaatttctccatgaacaacggttgcctgttgattatcgctcattggctcagagaccaagtgtctgcggttactggtgcagaccactaaaatattgctgccaaactcctccagggtgccatccagaacagtcttcagacctgagtattcgcgctccccatcttcaaaggtgaggtcatcgcaatagatcaaaaattgaaacggttgtgacctgacgtgttcgacgattgcgggcaaatcgccgaggtgtgctttttcgacttcgacgattcttagaccacgatcgtgataggcgctgagcgcggcccgcaccatcgacgatttgcccgttccgcgcgccccccacagaagagttgcattggctggaaggcctttaaggaacaattcaaggttggccttgaattgattggcctgctggtctacaccgatgagaccgtcgaacgtttgatcaagtcgaggctttagagcacgcaaatgacccatattggctcgatcatggacccaacgcgcgcacagcgtttcctgccattgaatttcgggtgcgggggctggcagtgtgtcgaggaggcggttcgccaaagtcagtagcgttgagcgtaagtttgtcatcatggtttcttgatcaaagtccttgtgtttcgatgtgacagtagccacattcataccgaaccaaggagtatacaatgatcgacctctattactggccgaccccgaacggcaataaaattacgatgatgttagaagagtgcgggctcgactacaccattcatccgatcaatataactgcaggcgaccaatttcaaccggagtttctcaagttgtccccgaacaaccggatgccagcgattgtcgatcacgatcccaacgacggtggtactcccatcgatctgtttgaatccggcgctattcttctttatctggccgagaaaacggggcagttctatccaacagatctcagagaacgttattcggtgttgaaatggttgatgtggcaaatgggtggtcttggaccaatggccggtcagaaccaccatttcgggcgctttgcggcagagaaaatcccctatgcgatcgagcgttatcgatcagagaccgcccgactctacggggtcttaaatgaagcgcttgatggccggtcctttatcaccggcgattactccattgctgatatggcatgctacccatggattgcccggtatgagtggcaagagatggatttgggcgagtatccaaatgtgcagcgttggtatgagcaaatcgccgcacgtccagcgacacagacggcctatgccaagggtgaagcggttcgcaatgcttgatcttgcgcaactcctgacgcatctcgtgttgaacagtgcagaga

SEQ ID NO: 528 - DNA, 4000 bp, Escherichia coli
  misc_feature (2)..(3): n is a, c, g, or t
  misc_feature (5)..(5): n is a, c, g, or t
  misc_feature (7)..(14): n is a, c, g, or t
  misc_feature (20)..(20): n is a, c, g, or t
  misc_feature (22)..(26): n is a, c, g, or t
  misc_feature (30)..(30): n is a, c, g, or t
  misc_feature (32)..(32): n is a, c, g, or t
  misc_feature (36)..(38): n is a, c, g, or t
  misc_feature (41)..(45): n is a, c, g, or t
  misc_feature (47)..(47): n is a, c, g, or t
  misc_feature (49)..(49): n is a, c, g, or t
  misc_feature (53)..(54): n is a, c, g, or t
  misc_feature (56)..(56): n is a, c, g, or t
  misc_feature (58)..(59): n is a, c, g, or t
  misc_feature (62)..(62): n is a, c, g, or t
  misc_feature (64)..(68): n is a, c, g, or t
  misc_feature (70)..(70): n is a, c, g, or t
  misc_feature (72)..(73): n is a, c, g, or t
  misc_feature (75)..(77): n is a, c, g, or t
  misc_feature (81)..(82): n is a, c, g, or t
  misc_feature (85)..(88): n is a, c, g, or t
  misc_feature (92)..(96): n is a, c, g, or t
  misc_feature (98)..(99): n is a, c, g, or t
  misc_feature (101)..(102): n is a, c, g, or t
  misc_feature (105)..(106): n is a, c, g, or t
  misc_feature (108)..(111): n is a, c, g, or t
  misc_feature (114)..(114): n is a, c, g, or t
  misc_feature (117)..(118): n is a, c, g, or t
  misc_feature (120)..(121): n is a, c, g, or t
  misc_feature (123)..(124): n is a, c, g, or t
  misc_feature (126)..(128): n is a, c, g, or t
  misc_feature (131)..(134): n is a, c, g, or t
  misc_feature (136)..(141): n is a, c, g, or t
  misc_feature (143)..(155): n is a, c, g, or t
  misc_feature (159)..(162): n is a, c, g, or t
  misc_feature (164)..(164): n is a, c, g, or t
  misc_feature (166)..(174): n is a, c, g, or t
  misc_feature (176)..(178): n is a, c, g, or t
  misc_feature (180)..(181): n is a, c, g, or t
  misc_feature (183)..(183): n is a, c, g, or t
  misc_feature (185)..(185): n is a, c, g, or t
  misc_feature (188)..(188): n is a, c, g, or t
  misc_feature (191)..(191): n is a, c, g, or t
  misc_feature (193)..(193): n is a, c, g, or t
  misc_feature (195)..(197): n is a, c, g, or t
  misc_feature (200)..(202): n is a, c, g, or t
  misc_feature (204)..(205): n is a, c, g, or t
  misc_feature (209)..(212): n is a, c, g, or t
  misc_feature (214)..(217): n is a, c, g, or t
  misc_feature (220)..(220): n is a, c, g, or t
  misc_feature (223)..(224): n is a, c, g, or t
  misc_feature (226)..(226): n is a, c, g, or t
  misc_feature (228)..(229): n is a, c, g, or t
  misc_feature (231)..(234): n is a, c, g, or t
  misc_feature (236)..(239): n is a, c, g, or t
  misc_feature (241)..(241): n is a, c, g, or t
  misc_feature (243)..(245): n is a, c, g, or t
  misc_feature (247)..(253): n is a, c, g, or t
  misc_feature (255)..(258): n is a, c, g, or t
  misc_feature (260)..(265): n is a, c, g, or t
  misc_feature (268)..(274): n is a, c, g, or t
  misc_feature (276)..(290): n is a, c, g, or t
  misc_feature (292)..(293): n is a, c, g, or t
  misc_feature (295)..(302): n is a, c, g, or t
  misc_feature (304)..(317): n is a, c, g, or t
  misc_feature (319)..(323): n is a, c, g, or t
  misc_feature (325)..(327): n is a, c, g, or t
  misc_feature (330)..(339): n is a, c, g, or t
  misc_feature (341)..(344): n is a, c, g, or t
  misc_feature (346)..(346): n is a, c, g, or t
  misc_feature (348)..(356): n is a, c, g, or t
  misc_feature (360)..(362): n is a, c, g, or t
  misc_feature (364)..(370): n is a, c, g, or t
  misc_feature (372)..(375): n is a, c, g, or t
  misc_feature (377)..(385): n is a, c, g, or t
  misc_feature (387)..(388): n is a, c, g, or t
  misc_feature (392)..(392): n is a, c, g, or t
  misc_feature (396)..(397): n is a, c, g, or t
  misc_feature (399)..(404): n is a, c, g, or t
  misc_feature (407)..(408): n is a, c, g, or t
  misc_feature (411)..(414): n is a, c, g, or t
  misc_feature (416)..(416): n is a, c, g, or t
  misc_feature (418)..(436): n is a, c, g, or t
  misc_feature (438)..(439): n is a, c, g, or t
  misc_feature (441)..(441): n is a, c, g, or t
  misc_feature (444)..(446): n is a, c, g, or t
  misc_feature (451)..(451): n is a, c, g, or t
  misc_feature (456)..(458): n is a, c, g, or t
  misc_feature (460)..(460): n is a, c, g, or t
  misc_feature (462)..(465): n is a, c, g, or t
  misc_feature (467)..(469): n is a, c, g, or t
  misc_feature (473)..(474): n is a, c, g, or t
  misc_feature (476)..(477): n is a, c, g, or t
  misc_feature (480)..(480): n is a, c, g, or t
  misc_feature (482)..(483): n is a, c, g, or t
  misc_feature (486)..(487): n is a, c, g, or t
  misc_feature (489)..(492): n is a, c, g, or t
  misc_feature (498)..(500): n is a, c, g, or t
  misc_feature (503)..(504): n is a, c, g, or t
  misc_feature (508)..(513): n is a, c, g, or t
  misc_feature (515)..(515): n is a, c, g, or t
  misc_feature (517)..(518): n is a, c, g, or t
  misc_feature (520)..(520): n is a, c, g, or t
  misc_feature (522)..(522): n is a, c, g, or t
  misc_feature (524)..(524): n is a, c, g, or t
  misc_feature (526)..(527): n is a, c, g, or t
  misc_feature (529)..(532): n is a, c, g, or t
  misc_feature (534)..(534): n is a, c, g, or t
  misc_feature (537)..(539): n is a, c, g, or t
  misc_feature (541)..(542): n is a, c, g, or t
  misc_feature (544)..(544): n is a, c, g, or t
  misc_feature (546)..(546): n is a, c, g, or t
  misc_feature (548)..(553): n is a, c, g, or t
  misc_feature (555)..(560): n is a, c, g, or t
  misc_feature (562)..(563): n is a, c, g, or t
  misc_feature (567)..(568): n is a, c, g, or t
  misc_feature (572)..(572): n is a, c, g, or t
  misc_feature (574)..(575): n is a, c, g, or t
  misc_feature (577)..(577): n is a, c, g, or t
  misc_feature (579)..(581): n is a, c, g, or t
  misc_feature (584)..(586): n is a, c, g, or t
  misc_feature (589)..(589): n is a, c, g, or t
  misc_feature (591)..(592): n is a, c, g, or t
  misc_feature (594)..(596): n is a, c, g, or t
  misc_feature (598)..(598): n is a, c, g, or t
  misc_feature (602)..(603): n is a, c, g, or t
  misc_feature (605)..(605): n is a, c, g, or t
  misc_feature (607)..(608): n is a, c, g, or t
  misc_feature (610)..(610): n is a, c, g, or t
  misc_feature (614)..(621): n is a, c, g, or t
  misc_feature (623)..(625): n is a, c, g, or t
  misc_feature (628)..(629): n is a, c, g, or t
  misc_feature (631)..(632): n is a, c, g, or t
  misc_feature (634)..(636): n is a, c, g, or t
  misc_feature (638)..(638): n is a, c, g, or t
  misc_feature (643)..(643): n is a, c, g, or t
  misc_feature (647)..(648): n is a, c, g, or t
  misc_feature (650)..(653): n is a, c, g, or t
  misc_feature (655)..(655): n is a, c, g, or t
  misc_feature (657)..(660): n is a, c, g, or t
  misc_feature (662)..(662): n is a, c, g, or t
  misc_feature (665)..(665): n is a, c, g, or t
  misc_feature (667)..(668): n is a, c, g, or t
  misc_feature (670)..(672): n is a, c, g, or t
  misc_feature (674)..(676): n is a, c, g, or t
  misc_feature (678)..(679): n is a, c, g, or t
  misc_feature (682)..(685): n is a, c, g, or t
  misc_feature (689)..(691): n is a, c, g, or t
  misc_feature (693)..(694): n is a, c, g, or t
  misc_feature (698)..(702): n is a, c, g, or t
  misc_feature (705)..(707): n is a, c, g, or t
  misc_feature (711)..(712): n is a, c, g, or t
  misc_feature (716)..(717): n is a, c, g, or t
  misc_feature (720)..(720): n is a, c, g, or t
  misc_feature (722)..(723): n is a, c, g, or t
  misc_feature (725)..(725): n is a, c, g, or t
  misc_feature (727)..(730): n is a, c, g, or t
  misc_feature (732)..(735): n is a, c, g, or t
  misc_feature (737)..(737): n is a, c, g, or t
  misc_feature (740)..(740): n is a, c, g, or t
  misc_feature (742)..(742): n is a, c, g, or t
  misc_feature (744)..(747): n is a, c, g, or t
  misc_feature (753)..(755): n is a, c, g, or t
  misc_feature (757)..(757): n is a, c, g, or t
  misc_feature (760)..(760): n is a, c, g, or t
  misc_feature (763)..(763): n is a, c, g, or t
  misc_feature (766)..(773): n is a, c, g, or t
  misc_feature (775)..(776): n is a, c, g, or t
  misc_feature (778)..(786): n is a, c, g, or t
  misc_feature (788)..(788): n is a, c, g, or t
  misc_feature (790)..(790): n is a, c, g, or t
  misc_feature (793)..(793): n is a, c, g, or t
  misc_feature (797)..(797): n is a, c, g, or t
  misc_feature (800)..(800): n is a, c, g, or t
  misc_feature (804)..(809): n is a, c, g, or t
  misc_feature (811)..(811): n is a, c, g, or t
  misc_feature (813)..(814): n is a, c, g, or t
  misc_feature (816)..(821): n is a, c, g, or t
  misc_feature (823)..(824): n is a, c, g, or t
  misc_feature (826)..(826): n is a, c, g, or t
  misc_feature (829)..(830): n is a, c, g, or t
  misc_feature (832)..(832): n is a, c, g, or t
  misc_feature (839)..(840): n is a, c, g, or t
  misc_feature (844)..(845): n is a, c, g, or t
  misc_feature (849)..(849): n is a, c, g, or t
  misc_feature (851)..(851): n is a, c, g, or t
  misc_feature (853)..(854): n is a, c, g, or t
  misc_feature (858)..(862): n is a, c, g, or t
  misc_feature (865)..(869): n is a, c, g, or t
  misc_feature (871)..(873): n is a, c, g, or t
  misc_feature (876)..(876): n is a, c, g, or t
  misc_feature (878)..(881): n is a, c, g, or t
  misc_feature (884)..(885): n is a, c, g, or t
  misc_feature (888)..(888): n is a, c, g, or t
  misc_feature (891)..(892): n is a, c, g, or t
  misc_feature (895)..(895): n is a, c, g, or t
  misc_feature (897)..(897): n is a, c, g, or t
  misc_feature (900)..(902): n is a, c, g, or t
  misc_feature (905)..(905): n is a, c, g, or t
  misc_feature (907)..(907): n is a, c, g, or t
  misc_feature (913)..(913): n is a, c, g, or t
  misc_feature (916)..(916): n is a, c, g, or t
  misc_feature (921)..(922): n is a, c, g, or t
  misc_feature (925)..(925): n is a, c, g, or t
  misc_feature (927)..(928): n is a, c, g, or t
  misc_feature (932)..(933): n is a, c, g, or t
  misc_feature (936)..(936): n is a, c, g, or t
  misc_feature (938)..(940): n is a, c, g, or t
  misc_feature (942)..(942): n is a, c, g, or t
  misc_feature (944)..(944): n is a, c, g, or t
  misc_feature (946)..(946): n is a, c, g, or t
  misc_feature (950)..(951): n is a, c, g, or t
  misc_feature (953)..(953): n is a, c, g, or t
  misc_feature (957)..(957): n is a, c, g, or t
  misc_feature (963)..(967): n is a, c, g, or t
  misc_feature (969)..(973): n is a, c, g, or t
  misc_feature (975)..(975): n is a, c, g, or t
  misc_feature (977)..(978): n is a, c, g, or t
  misc_feature (980)..(980): n is a, c, g, or t
  misc_feature (983)..(983): n is a, c, g, or t
  misc_feature (985)..(985): n is a, c, g, or t
  misc_feature (987)..(988): n is a, c, g, or t
  misc_feature (992)..(993): n is a, c, g, or t
  misc_feature (996)..(998): n is a, c, g, or t
  misc_feature (1001)..(1001): n is a, c, g, or t
  misc_feature (1003)..(1003): n is a, c, g, or t
  misc_feature (1006)..(1008): n is a, c, g, or t
  misc_feature (1010)..(1011): n is a, c, g, or t
  misc_feature (1014)..(1015): n is a, c, g, or t
  misc_feature (1017)..(1019): n is a, c, g, or t
  misc_feature (1021)..(1022): n is a, c, g, or t
  misc_feature (1024)..(1026): n is a, c, g, or t
  misc_feature (1028)..(1028): n is a, c, g, or t
  misc_feature (1032)..(1032): n is a, c, g, or t
  misc_feature (1035)..(1038): n is a, c, g, or t
  misc_feature (1040)..(1042): n is a, c, g, or t
  misc_feature (1044)..(1045): n is a, c, g, or t
  misc_feature (1047)..(1047): n is a, c, g, or t
  misc_feature (1049)..(1050): n is a, c, g, or t
  misc_feature (1052)..(1053): n is a, c, g, or t
  misc_feature (1061)..(1061): n is a, c, g, or t
  misc_feature (1063)..(1066): n is a, c, g, or t
  misc_feature (1070)..(1070): n is a, c, g, or t
  misc_feature (1072)..(1072): n is a, c, g, or t
  misc_feature (1074)..(1075): n is a, c, g, or t
  misc_feature (1078)..(1080): n is a, c, g, or t
  misc_feature (1082)..(1082): n is a, c, g, or t
  misc_feature (1084)..(1099): n is a, c, g, or t
  misc_feature (1101)..(1101): n is a, c, g, or t
  misc_feature (1104)..(1107): n is a, c, g, or t
  misc_feature (1109)..(1110): n is a, c, g, or t
  misc_feature (1112)..(1113): n is a, c, g, or t
  misc_feature (1117)..(1118): n is a, c, g, or t
  misc_feature (1120)..(1122): n is a, c, g, or t
  misc_feature (1124)..(1125): n is a, c, g, or t
  misc_feature (1128)..(1130): n is a, c, g, or t
  misc_feature (1132)..(1132): n is a, c, g, or t
  misc_feature (1134)..(1141): n is a, c, g, or t
  misc_feature (1143)..(1144): n is a, c, g, or t
  misc_feature (1148)..(1148): n is a, c, g, or t
  misc_feature (1151)..(1151): n is a, c, g, or t
  misc_feature (1153)..(1158): n is a, c, g, or t
  misc_feature (1161)..(1161): n is a, c, g, or t
  misc_feature (1163)..(1163): n is a, c, g, or t
  misc_feature (1165)..(1169): n is a, c, g, or t
  misc_feature (1171)..(1171): n is a, c, g, or t
  misc_feature (1173)..(1173): n is a, c, g, or t
  misc_feature (1177)..(1179): n is a, c, g, or t
  misc_feature (1181)..(1181): n is a, c, g, or t
  misc_feature (1183)..(1183): n is a, c, g, or t
  misc_feature (1185)..(1186): n is a, c, g, or t
  misc_feature (1190)..(1192): n is a, c, g, or t
  misc_feature (1194)..(1194): n is a, c, g, or t
  misc_feature (1196)..(1199): n is a, c, g, or t
  misc_feature (1203)..(1206): n is a, c, g, or t
  misc_feature (1208)..(1208): n is a, c, g, or t
  misc_feature (1211)..(1214): n is a, c, g, or t
  misc_feature (1216)..(1216): n is a, c, g, or t
  misc_feature (1218)..(1218): n is a, c, g, or t
  misc_feature (1221)..(1221): n is a, c, g, or t
  misc_feature (1223)..(1223): n is a, c, g, or t
  misc_feature (1225)..(1227): n is a, c, g, or t
  misc_feature (1229)..(1229): n is a, c, g, or t
  misc_feature (1231)..(1232): n is a, c, g, or t
  misc_feature (1234)..(1235): n is a, c, g, or t
  misc_feature (1237)..(1238): n is a, c, g, or t
  misc_feature (1240)..(1244): n is a, c, g, or t
  misc_feature (1246)..(1246): n is a, c, g, or t
  misc_feature (1250)..(1250): n is a, c, g, or t
  misc_feature (1252)..(1253): n is a, c, g, or t
  misc_feature (1255)..(1257): n is a, c, g, or t
  misc_feature (1270)..(1270): n is a, c, g, or t
  misc_feature (1273)..(1273): n is a, c, g, or t
  misc_feature (1275)..(1275): n is a, c, g, or t
  misc_feature (1277)..(1279): n is a, c, g, or t
  misc_feature (1281)..(1292): n is a, c, g, or t
  misc_feature (1294)..(1297): n is a, c, g, or t
  misc_feature (1299)..(1301): n is a, c, g, or t
  misc_feature (1303)..(1317): n is a, c, g, or t
  misc_feature (1319)..(1328): n is a, c, g, or t
  misc_feature (1330)..(1331): n is a, c, g, or t
  misc_feature (1333)..(1340): n is a, c, g, or t
  misc_feature (1342)..(1347): n is a, c, g, or t
  misc_feature (1349)..(1353): n is a, c, g, or t
  misc_feature (1355)..(1355): n is a, c, g, or t
  misc_feature (1357)..(1357): n is a, c, g, or t
  misc_feature (1359)..(1361): n is a, c, g, or t
  misc_feature (1365)..(1366): n is a, c, g, or t
  misc_feature (1368)..(1370): n is a, c, g, or t
  misc_feature (1372)..(1374): n is a, c, g, or t
  misc_feature (1376)..(1379): n is a, c, g, or t
  misc_feature (1381)..(1384): n is a, c, g, or t
  misc_feature (1386)..(1400): n is a, c, g, or t
  misc_feature (1402)..(1403): n is a, c, g, or t
  misc_feature (1405)..(1413): n is a, c, g, or t
  misc_feature (1415)..(1418): n is a, c, g, or t
  misc_feature (1420)..(1423): n is a, c, g, or t
  misc_feature (1425)..(1426): n is a, c, g, or t
  misc_feature (1429)..(1430): n is a, c, g, or t
  misc_feature (1432)..(1434): n is a, c, g, or t
  misc_feature (1437)..(1440): n is a, c, g, or t
  misc_feature (1442)..(1442): n is a, c, g, or t
  misc_feature (1444)..(1444): n is a, c, g, or t
  misc_feature (1447)..(1447): n is a, c, g, or t
  misc_feature (1451)..(1451): n is a, c, g, or t
  misc_feature (1453)..(1456): n is a, c, g, or t
  misc_feature (1458)..(1468): n is a, c, g, or t
  misc_feature (1471)..(1471): n is a, c, g, or t
  misc_feature (1473)..(1474): n is a, c, g, or t
  misc_feature (1476)..(1484): n is a, c, g, or t
  misc_feature (1486)..(1489): n is a, c, g, or t
  misc_feature (1491)..(1492): n is a, c, g, or t
  misc_feature (1494)..(1495): n is a, c, g, or t
  misc_feature (1497)..(1510): n is a, c, g, or t
  misc_feature (1512)..(1513): n is a, c, g, or t
  misc_feature (1515)..(1516): n is a, c, g, or t
  misc_feature (1518)..(1518): n is a, c, g, or t
  misc_feature (1521)..(1528): n is a, c, g, or t
  misc_feature (1530)..(1531): n is a, c, g, or t
  misc_feature (1533)..(1533): n is a, c, g, or t
  misc_feature (1537)..(1537): n is a, c, g, or t
  misc_feature (1540)..(1544): n is a, c, g, or t
  misc_feature (1547)..(1549): n is a, c, g, or t
  misc_feature (1551)..(1553): n is a, c, g, or t
  misc_feature (1555)..(1558): n is a, c, g, or t
  misc_feature (1560)..(1562): n is a, c, g, or t
  misc_feature (1564)..(1565): n is a, c, g, or t
  misc_feature (1567)..(1568): n is a, c, g, or t
  misc_feature (1570)..(1570): n is a, c, g, or t
  misc_feature (1572)..(1577): n is a, c, g, or t
  misc_feature (1579)..(1581): n is a, c, g, or t
  misc_feature (1583)..(1591): n is a, c, g, or t
  misc_feature (1593)..(1595): n is a, c, g, or t
  misc_feature (1597)..(1598): n is a, c, g, or t
  misc_feature (1602)..(1604): n is a, c, g, or t
  misc_feature (1606)..(1613): n is a, c, g, or t
  misc_feature (1615)..(1616): n is a, c, g, or t
  misc_feature (1618)..(1620): n is a, c, g, or t
  misc_feature (1622)..(1623): n is a, c, g, or t
  misc_feature (1625)..(1625): n is a, c, g, or t
  misc_feature (1627)..(1628): n is a, c, g, or t
  misc_feature (1630)..(1631): n is a, c, g, or t
  misc_feature (1633)..(1635): n is a, c, g, or t
  misc_feature (1638)..(1650): n is a, c, g, or t
  misc_feature (1652)..(1652): n is a, c, g, or t
  misc_feature (1656)..(1660): n is a, c, g, or t
  misc_feature (1662)..(1675): n is a, c, g, or t
  misc_feature (1677)..(1679): n is a, c, g, or t
  misc_feature (1682)..(1685): n is a, c, g, or t
  misc_feature (1687)..(1687): n is a, c, g, or t
  misc_feature (1691)..(1691): n is a, c, g, or t
  misc_feature (1694)..(1695): n is a, c, g, or t
  misc_feature (1698)..(1700): n is a, c, g, or t
  misc_feature (1703)..(1704): n is a, c, g, or t
  misc_feature (1710)..(1711): n is a, c, g, or t
  misc_feature (1715)..(1716): n is a, c, g, or t
gnncngnnnnnnnngcggcnannnnngcgncnaaannngcnnnnnancnagcnntnannctngnnnnnancnntnnnggcnncannnngggnnnnnanngnntcnngnnnngtntcnngnngnntnnncannnntnnnnnnannnnnnnnnnnnnttcnnnngntnnnnnnnnngnnncnnantnggnaancnannnggnnntnncaannnncnnnncancanncngnnannnncnnnnanannngnnnnnnntnnnngnnnnnntcnnnnnnncnnnnnnnnnnnnnnncnncnnnnnnnncnnnnnnnnnnnnnngnnnnngnnntcnnnnnnnnnntnnnngncnnnnnnnnnggcnnnannnnnnncnnnngnnnnnnnnncnntttncaanncnnnnnnaanngcnnnncnannnnnnnnnnnnnnnnnnncnncnggnnnaaccncaggnnnancnnnngnnncagnngnngcngnngcnntnnnngccgcnnnatnngcgnnnnnntnanngncngngnnannnncngcnnnannancngnnnnnncnnnnnnannggcnntttnanngncnnnttnnncgncnncnnngncggnngngnngncggnnnnnnnngnnncanncnngnnntnaagcncgcnntnnnngncnnnncnttngnngnnncnnntnntgnnnncacnnntnntttnnnnnttnnntggnncatnngcngnngntnnnncnnnntntgntncnnnnttggcnnncncgntgncannnnnnnngnncnnnnnnnnnancngcntttncanccgnnnnnnangnnannnnnnannanatnngntttcaanngtgnnttcnancnngcgnnnnntcnnnnncnnngtntnnnncannttntcnntcncnttnnnaancncattcngancggcnnccngnncggnnccngnnngngncnagcnngntccnagctgnnnnncnnnnngntnnanttngngnngatnntgnnnaananccnnncnnatnncnnncnngnnntnttcnagnnnntnnntnngntnntnntggcgtgntnnnngggngntnncannngncnnnnnnnnnnnnnnnntngcnnnncnntnngccnncnnntnngcnnncnannnnnnnncnnccancancnnnnnnacnancnnnnnantnatcnnntnantnnccannncnannnnaaannnnangannnnantnatntntnnnananntnntnnannnnntnttangnngnnnttaggcaaaaaanagngnannnannnnnnnnnnnntnnnncnnntnnnnnnnnnnnnnnnannnnnnnnnncnnannnnnnnncnnnnnncnnnnntntncnnntganncnnnannngnnnnannnncnnnnnnnnnnnnnnngnngnnnnnnnnngnnnngnnnngnnctnngnnnagnnnntngncangaanannnncnnnnnnnnnnncgncnngnnnnnnnnnannnncnngnntnnnnnnnnnnnnnncnngnncntcnnnnnnnncnncnatgnttnnnnncannntnnngnnnncnnncnngnnancnnnnnngnnntnnnnnnnnncnnntnnctcnnngnnnnnnnnanngnnntnnananngnnannnacnnnnnnnnnnnnntnagcnnnnntnnnnnnnnnnnnnntnnntgnnnngnttgntgnnctnnntgnngcactnnctgnngcactgcctgatgcactgcttgatgaactgccagaggcactgtcaccagcaacatttgacgcggtctcacaggcggtaaagagaaaagctactgcgcaaatagcgaggagtcgttgaaacatctgaatgctcccaaattgtttgtccggcacaccggatggtttctatttcgcgttattaggtgaccacataaataacttgtcatctaaatgtcacgacattcatctaacggacgcacccacgaaggctggtcttatccggcctaaatactgaatcctcaatagcgcaaaatctttgcaattgaaaccaaaaaattgaccaatcacttataaaaccggaattttttggaaagaccgcttatctgctcgtcaattgacatgatgatcactaccgcatccaaacatcagcggacaaaccaaagaccctttgccaaagcttacaaacaaagatggtaaaattattgtcaacgcgtcaaatctgttgagtttagcgcaaaataggcgaccatgccggatcagatgcgtctgatggcgtgatgatgcgcttttcgttaaaaccggtgatatcgatgcggtaaacatgcgtatcaccgccgctaccatcggtttcaaagggctgttgcttgaaatacatcaagacgcggccatttggcgcccatgtcggcccctcaacaagaaacccgtttgcaagaagtcgttcaccagatccatcaacattcatcacaccaatgtaaaattggccattcgccattttggtaaaagcgataatatcgccgcgtggtgaccaaaccggcgttgcatagcggccctgattaaagctaatacgccggacattggcgccattagcatccatcacatagagctgctggctgccgccacgatcagaattgaaaacgattttggcaccatcaggtgaataggatggcgatgtatcaatcgacgccgattgcgttagccggttaatcgcttgggttcgcatatccatttcatagatgtcggtcatgccattttgcgcaaggctcatgatcaatttatcacctgacggcgcaaagcggggtgcaaaggtcatgcccggaaacgaaccaagccgttcggtacgccctgtcgcaatttcaaatagatagacattcggttcatcattgaaatagttaagataggcaatttcattggctgtcggtgaaaagcgcggggtcagaaccagatcagcgcctgaggttaaaaactgatgattatgtccatcttgatccatgatggccaaccgctttaaacggcggctttgcgatccggattcagcaacatagacgacgcgcgtatcaaaatacccgctgtcacccgtaaattcttcataaacaaaatcggcaatctgatgtgaaatccgccgaattgcattttgatcggcattgccaccaccaccggtgatattgcgctggatcacgacgtcccatagcacaaattccacctgcagcatccccgccgcgtcaacataggccgacccaacaagaagccccttgacccccaaagggctccaattggtgaaatttggccggattgatggcgcttttggcggctcgatgaaggctgcgctatcaactggcgcaaacaggcccgaactttccagatcttctgaaataatctgggcgatttgtttgccaacttcagatacggcgccatcagggccagtaaaattggcgatcgctatcggtgttggcgcgacctgaccttcggtaatatcaatgcgcagctgcgcattggcgatattgccaaaaaggccaaaacaagccgcaatcacagtcactaatcgcaaaaacatcatcatagtgaacctattcccatctatttacctgccgatatgcgccgtctggcgcaaaccatgccacatcattatcgcgttaaaaatttcggatcaaacccgaagataaagcttttccattgttcatatttatccaaaggcaccggcaaaggcgaacatttaaacattgtgcgaatggcctcgtctgcggcaacacggtatgtgcggtcggtggcaagtcgcatcttattatcaacctcggctgtcaaaacctttccgtccctatctaacgtgacaattatgtcaacaattagcgtgtttgcacccgccgtgccaattggcggcgaccagcatgatgacacatgctggcgaatacgatcaatgtcggacaggccaagcgggccaacaaccggcttttgcggggcgcgaacggcattaccagccgccgttgtcaaattgctggtcaaagtctcagccgcttctttgcgttcctttt

SEQ ID NO: 529 - DNA, 4000 bp, Escherichia coli
  misc_feature (509)..(509): n is a, c, g, or t
  misc_feature (779)..(779): n is a, c, g, or t
  misc_feature (1985)..(1985): n is a, c, g, or t
gcgatgtgtttttcgtgaggttgaggtactggttgcccagcggtgggaggcttacccggaacgcttggggaagaatcacacggcgcaacatggtggagcgccgcaaaccgatggcctgagccgcttccgtctgacctttcgggacggcaagaatgcctccgcggacgatttcggcgatgaatgcggcggtgtagaggacgactccgaagaacacggccgcgaaaccctgcgtgaggttcaggcccgatggccccatgttggcgaagttcccgcgcttttcgatgtcgggcatgctcacgctgaatggggggttgtcgctcacactgccgcgtccctccccgaatttgttggcgagcacatcgaagagatcacgccccgagttcaccagccaactcgagagtccgggccacaacacgaggaaaacgacgcacgcgagcgctgccgcaaccccggcgaagatgactcggaaccaatcgtcgtcggtgagcttcgccgaatcgccgggggtncggcgtgcatcgaagaagcgcttgatccacagtccggctgcgacgatcgccgctgcacacagcagcagttggaccaggttcggaggtgttgcaccgatcaggtcccgaatcggggcgaagacggcgtcgcccacaaagccgaagatcggatggatgaaccagccgacggcaccgaacgccgtgacgacgccgagcgcagtgagcacggggtaggcctcgcggccggttcgatcttgcgcggcgtggcgttgcctggcgatccagcgcgcngcgaagcagccgagcaccatgatgatcgtccactggtagaagccgtcgtcgatgtggactctcggtaccgagaagcctttgttcgagacatggagtacgccgctccacggcccctgggtgacctcaccgctcaccgggtcgacgtcctcgccgaactccgggaacaccacggcgatggtcacgaagaacaaaatgatgtgcacgagaagcgggatgttccgcatgtactcgatgaatgcactggccagcttggccacgagccagttgctggagaggcgaccgatcccgatcagcgtcccgagaatggtggcgagagcgatgcccgcaacggccatccgaatggtgttgaccatgccgacccagagggcgcgcccgccggttgccgggtcggtgtcgatgccctcgcccagtgagatggctggatcgacctccagaaagccgaaaccggtctggatcgactttgcccgcagactgtcgcccgcttctcggacgaggaaggcgatggcgaagagcgtcaccgcaagtgtcgcaacctgaaccagccacttgacgacggttgcgtcacggtagaagggcggcttggccgacgcagcgacctgaagtgacggttgtgtgtcggtcaccgagaagccccccaagacagctctgtcagacgcgcgacaccgtgttcggtggtatcgcaccggtcacggctgcccggcaacatgaccgaagcgtccgaacgcactcccgggccggtttcgacccggaagtgcgttcgggatgtgttcgtacctagcggatcagcgcgccggcggcgggtacatgaggccgccgttggtgtgcagatcgttgaccgtgccctcgaggctcaggccgaggggtgcgaggtgacgctcccacaggtcgctgtaggaaccaacctgcttgatgacctggtagaaggcgtccggggcaatgcccatggcggactgcacctcgtcgtcaccgacaccgaggattcggccgagctcgccctcggcatcgaggaagctgtcgacgttggcctggttcacgccgtactcatcagcgatgagcattgcgtacacggtccagttgacgacgtccgcgaagcgggactggttctggccgtaggtcgggccgagcggctccttggaaatcggagcacccgggaagatgacccactcctcaccggcgggctgctgttcggccttccgcccgacgagntgggagccgtcggtggtgatgacgtcacacgcgccgtcgatgaagttctgcgtgacgatgtcgaagtcttcgaacgtgttgagcgtgatggtgatgcccagcaggtcggcagcctcggcgatgttcttctcggtcgtggtgcctgcgttggtgcacacgactgcaccgtcgatgtcggcaacgccgcttgcgttcgagaagccgtcgcttgctcgtgccatcaactgctgaccgtcgaagtacgtcgtgggaccgaagtccataccgacgtcggagtcacggctctgggtccacgtggtgttgcgatggagcaggtcgacctgaccggtctggacggcggtgaagcgctccgcagccgtcaggccgatgatgttgatcgccccggcatcgccgaggatcgccaccgctgtcgcacgacagaagtcggcgtcgaagccctggtagatgccgtcggagtcctgaacggcgaagccgatcgagacggtcgagacaccgcagttgagttcgccacggtcctggatctcgacaagcaggtcgctgtcgccctgcgttgcctcgacggtgtcgtcgctgctgtcgtcagccgcgtcgtcagccgccgcgtcaccgccgtcaccgtcgtcgtcgctgcatgcagcggcaacgagagtgaatccgagaatgacggccagaagccggagcaagaagtccttgcgcatagttgcattcctccagtgttgtcccactcgggacagctggaggatagtcccagaatcgggcgagcgaaaccgggtgcgtgtccccgcccccggtacccgagtcgtgtgggggcgatctgcggcgctggctagaggtattggccggtcgtgacagagtcgatcgactttccgcccccagcatcgtcgtcgttgctgatcagcgtccgcacatagacgattcgctcacccttcttccccgagatctttgcccagtcgtccgggttggtggtgttgggcaggtcctcgtgctccttgaactcctgtcgaatcgaggtcaggaggtcctcggttcgaatcccgcgactgccggtggcgatctgccgtttgattgcgagtttcttgccgcgacgaacgatgttttcgatcatggcgccggaactgaagtccttgaagaacatgacttccttgtccccgttctgataggtgacttccaggaatcggttggcgtcgtcgtcccggtacatctcccggacggtctcttcgatcatcgcccgcaccgccttgtcgggatcgccacccccgatcgtctcgaccatcccggcatcgatcggaaggtcggcggtgagatagcgaccgaagatcgacgaggccgcttcctcgtcggggcgttcgatcttgatcttcacgtcgaggcgaccggggcgcagaattgcgggatcgatgaggtcctcgcgattggacgcaccgatgacgatcacgttgcggagtgtttcgacaccgtcgatctcggccagaagttgcggaacgatcgtggattcgatgtcggagctgatgccgctgccccgagtgcggaacaaggactccatctcgtcgaagaaaacgatgaccggccacccctcctcgctcttctcgcgagcacgctggaacacgagccggatctggcgctcggtctcaccgacatatttgttcagaagctccgggcccttgatgttgagaaagaagcttcgggcctcgtcaccgcccgacacctcggccactttctttgcgaggctgttcgcaacggcttttgcgatcagcgtcttgccgcagccagggggcccgtacaacagaattcccttgggagcgggaaggtcgtactcggcgaagagcgcctggtggaggaacggcaactcgacggcatcggtgatctgctcgatctgggcatcgagtccacccacgtcggtgtacgacacgtcgggcacctcctccaggacgaggtcctcgacctcgggccgagggagccgctcgaggacgatgccggcgcggggctcgatcaggacggtgtcgccggagcgcagt

SEQ ID NO: 530 - DNA, 4000 bp, Escherichia coli
  misc_feature (1641)..(1641): n is a, c, g, or t
  misc_feature (2223)..(2223): n is a, c, g, or t
gacaaaggatgaagtcattcttctcattaaattatatgaggtgagtaaacgaagtaatgcccagatgaataatttgctcactaccactttgggtaaaatcggggatgataaggtgattcctatattaatggaaattgccaaaaataaaaatttaccggtgaacgttcgcagccgtgcagtggatgtattatctaaaaaacaagcccctgaattggttgacttttttgttgaaatgctgggagatccagtttcccgagataaggtcaacgaatttgcatttgacgtgatgggagaaatgccggaagagagaatgttgatggcacttttagaagcctatcaagttggaaggcataaatactattccctgctcaatacaataattaactctcttgacaattttgataatcctgaaataaaatctctgtatttggaaattgcacagaccaaagatttccccagtaatatccggctgaaagcctttaggggattaactcgtttctctgacccagaggttgtggatggaattgtggaattactaaatgatccagcaaattatatctattataatgaaattgtggggatgctccatgagtttggtgtttatgataattatcaagataaacttagaatggcggcttttaaagctatgaagaaagaagctggatttattgggtttgctaatgattagatccctatcattattaattatactgataatttctctttttcaattgggatgcgggaggaagaaaaacgcagatccagactctcagattgaaacaccaatccaaaccgaaatcacagaaatatttgctgatagtgctgccgttgttcaaatagataagttttttgaattggaacaaactatggaggatattcagaaagaggttgaattgcttcgaaataaggtattggattatgagtacaaaccacctgaaacggattataccaaacaattgaaagcactcattgataatcctccggcagcacataaaatatcattgaaaaatggttctatcattgaaggcactattaaaaaagataagttagattatctcctggtaaatacagatgtaggattattaactctaaataaatctgatataaagggcattgaagatttaatacttcccacccctgatttagttttcattggtcatggacaagaagaagcctttgattcatttagacttttcaccggaaaggttatgaatcagggcaatcgcaggggagattttgtaagggtcatttataatctatgggggggaaacacgcaacttctgggatctgattccactttcattgaaggatctcaaattatttaccgttccgggattgttaccgacaccgttttagaaccaaaccaatctgctcaatttagtgtaacggttgctgtaccggattctatttcagtcacttatgtcacccgagatgtgcgctgggaaatgtttgactaattattcaaaggtttgcgtccgactttacctttaatttttctacatgttaatcaaattaattttctccattttgatattggtatttctgcaatcctgcggacaagataaccatattcggacctatcaattagctaaaactaaagcacctgttaacaaacctcgggttgagactcctgaaaaaaantctacaggatttagctggacaaaaccaggaagttggattgcgtcttcaggttcctccatgagactggcaagttttgatgttcccttttctggaggaatgggcgatttatcggttattcaattaggcggcaccggaggcagtattgaagccaatgtaaaccgttggagaagacaattaaatctggattcccaatcacttttcgaaattgaaaaagaaatgatcgattataaagggggattaggggattacaaaataattcgaataattaatgaagagttggattctgcctttctctgcgctatcctccctgcaggtaaccagaccttatttgttaaactatccgcgggccctaagggtattcgtgaaatcgagaccgactttatttccttctgttcatcccttataatctcaatttaaaaaaagactgtataatttatgcgtattaaagatatcatcaattttttaaagcagcccaagatttttgtattcgccataatctggatgatgatgctggtagttttgggtacactggcgcaaaaagatatgggtttatatgctgcccaaaataggtatttctcagcntggattacctggttttggtttatacccatgcccggtggccgactcactctcattatcattctgattaatttgtccttcttctttttcaaaaaaagtatctggaaaattaaaaaattgggaatagtgattttacacctgggcggaatactgctattggttggtggtggattaactgccatgttcagttctgaaggcaatatggtcattgaggagagcgctcaatcaaatcatgtagaagattaccattttatggaattagccattataaatacatctgcaagcagctttgatgaatttaccatttttgatcaacccttattaaaaagaaaccaggtacttgcacatgcaaacctgaattttgaaattgaaattataaattacctggaaaattgtgaacccactaaaaggaattcccctgcgggcatacaacataaaggtatgttgaaaaattttatgctgagtgaattaaaaccagaaaaagaggataattggaaccgtcccggaatgatttataaaatcagtaattcgggaacaaatgcggatggaatgtatggcatttttctggggcagcctatatcccagactgtttctgtaaacaataaagattatacaattatacttcgccggaaacgcacctatctccccttttcaattgaactcttagattttaagaaaatcctgcatccgggaactgacattccaaaaagttacagctctgatataaacttaatagaaaatggcgctgtccggaagattctcattcaaatgaacgaacccctaaggcataagggatacactttttttcagtcttcatttattgagggtccaaacagtgaaacaacggtactggcagtagttaaaaattatggacgccttttcccctatatttccagcatcatcatgtgtattggattattatttcatctgtctcaaaaattacctgacctttttaggaaatcaaaagaaaagattgctgtatgaaaatccataatctgacattatcattcattatattgctttgtggaattctacttccccgagattttgatcaacgtgatattcccatacatgaaaacgggcgcattaaacccctagatacatttgtgagaaaccaacttctggttatttacggtaaacggtctattaaacccaaagcattaccagaagaattaaattctaaaggattatcagcaattgattggttttttgatatagctataaatccagacgagggagataaatacagagtcttcaacataagcaaccctgaggtggtagcgagcctgggactttattgggatccgagtcatttatataatcgaaaggaaatattatccggattaaaaaatcagattgattatatcacaactattcagggaaaaccggaagccgaactcacccaatttgatatacacatgctgaaggtttacagcaatgtaatccaataccagacgctcagttacagtctttcctgtctacttcctttgatacagattaaccataaaaccatcgcccaatctttatctgtcaattccggagataaactcagttattaccaattaatgaggaaggcgaatcaactcagtccccttatggaaagattgctgaatcgggaaaaaaatgagtggttagaatcagactatgagctgcagcatataatgggtgttttaaatgagatagatcaggataaattcgcccggatattgaaaattatacctcctgaaagtggaaaccagaatgaggaatggcagtctccctgggaattaatggaaagtag

SEQ ID NO: 531 - DNA, 4000 bp, Escherichia coli
  misc_feature (119)..(119): n is a, c, g, or t
  misc_feature (641)..(641): n is a, c, g, or t
  misc_feature (818)..(818): n is a, c, g, or t
tggcagcacagactttttgtgtggctgcggaagaaaaaggattaggtatatgttatctgggtacgacgacttacaatccgcaaatgataatcgaagccctggagttaccggaattggtntttcctattacaacagtgacggtaggttggcctgccgaggagcctgcacaggtagatcgattgccgctggaagctattgtgcatgaggagacgtatcatgattatactcctgaagatatagatcgcctgtatgcctataaggaatctttgcccgaaaataagcaatttatttttgaaaacaacaaagaaaccttggctcaagtctttacggacgtacgttataagaaagaagataacgaagtaatgtcggagaatctttggaaagtaataaaaaagcagggtttttaaccctgcttttttaatgatgcttggatatcatctatttctgcgcggaaagttttgtctacttcccgtaattctttaatggttttgcaggcgtgcaatacggttgcgtgatctttgtggcctattaatgcgcctatcttagccgtcgaaaaatctgtataggatttagcgagaaacatggctatctggcgtgcctgtaccacttcgcgttttcgtgatttagtatggatggtagcngtatccagtgagaaatgcttgcataccacgttgatgatgtcatcaacggtaatagatttactttcactttttactaccttccgtacaatgcgttgcgtcagttccagatcaatttccttattatatatagtagaatgtgccatgatggagatgacgataccttccaggtcacgcacnctgtcacccacattttctgcaatataatcgattacttccggagggaactgtaaaccgtcacgatgtatcttattgcgcaggatgttcttgcgtaattctacggttggtctttccagttcagctaccataccccatttgaaacgggtgatgagtcgttcttccatgccttgcaataatacgggagcacggtctgaagtcaggataagctgtttaccgttttggtgtaagtgattaaagatatgaaagaatgtattctgtgttttggtaacaccggcaaattcttgaatatcatcgataatcaatatgtcaattgattggtagaagttgataaaatcgtttgtagtattgttacgtacagagtcggtatattgtacctggaacagatgtgccgatacatatagcactctcttgtccggatagagttctttgatttttgtgcctatagcatttgcaaggtgcgtctttcccacgcccgatgctccatagaaaaacagcggattgaaaattgttttcgccgggttttgagcgacagcttctgctacgctgcgtgaaagtttgttgctatagccttctataaatgtttcgaagttgtattcaggattcagatgaggatctaaatctgcaataggagcttgcggtatttctctgccgattacctttttctgtggaataatagtgcggggagtagattcgagattgacggtagtacgtgaactcttatccaccataacattatacaataacttggtgccatcaccaataactttatatagagttttacgcaacaagtcaacaaacttgtcctccaaaaactcatagaagaactggctgggtacctgtacgaccagcgtcttgtcctcatattttaaaggtatgatggggagaaaccatgttttgtatgtctgctccggaacattgtctctgatgatttcaagacagcggttccatagcccgacatgatttaattcactcataacggctttaaatacatttattaattaagcaaaacttctacgcatgcaaaattcgcaatcttatttgagaaaaacaaatgtgttttttcttgctttttatctaaaaacaataatctctttactttcaactacttatcttgtttcatgtaaatagccccacagggaggctattgcatttttataagtatctgtattctagggtgatatataagaaaggaataagttttttaacttttcaaataatctgacagatgggaatactttagtttctacatggacttactgaggctttttcttccaattctgtttgctcctattatttagacttattctatttaaagagatttttcctacttatcttttttgccgaacagggagaaatgaacataccttttcggatgtgatttcaggtcttcaagaaggctggcagcattggctgttgtagcattcaaattattgtaaagcgatggatcgtttaacaacaagccgattgtattgtctttcctgcctaattggtctgtaatcatttttgcatttgctaaagtcgaatctattctggcaaatgcggcagcgtaatctatttctttcagattatcactgacagtgacgaaattatctcctatggtgttcagctttttagtaagctggggaatatctttactcataatggcctgtaactgtctgctggtgacttccatgcttgccattgtgttttgcacgctgtgcagtgtaccgggaattgccgggtctccaaggattgtattcagtgaagcaaggatagagtctagcttgggaagcatcttttctacctgaggcatgatggtggctacctggtccattacaccattgttgacattgccttgtagggtatcacctgtcagatacttctcgcgtggattattggcaagtagtaagttcatttttacaccacccatcagttcggaggctaattcggcggtactgcctttaggaatacgcagttccgggtctacatctatttccgctaccacttttcccggttcattgtagtcataataaaggtcgcgtacaatacctacacgaaagccatcggcaaagaccggactcgatttggtcaatccattaatgttatggaacttgacgtagaaatagttggtaggcttaaacatatgaatgcctttcaggtagttaataccatataccaatatgcagagagcaataatgcccgcaattcctattctaacttctttagtaagatacttcatcatgatgttatagtcttattatttatttcttttctttttaaattcttcgatagcagcgctgacgcttgtcttctttccgtttttgaaagcaatgataaatgcgtctttgaattttggtgctatctcccgtttagttcgtaataccttattataatcggtcgatgcaccgtatgtgtatttacaaagtccgccttcctgataatactctacacctttcagcccttttagtcgtttgtcattggcggcaagcggacgggaagaagtaagtatctgtattttaaacactggagcagcactatcggtttgcctgtcagctactttttctgtattttgtttggtttcggtgttattggaaacgggggatgcaggtatctcttcttctaccctaccggcatccgtatcctccggtagtagggtgcggctgcttcctgtcatccgtatttcatgttcacgtttataagacaggaaagcacggaatattccgttggcaagtgtggtggttcccgcttccgaattgagataacgttcttcttccggattggatatgaaaccgagttctaccaggatgctgggcatggcacttgctttcaatacaaggaacccagcctggtgtacaccacggtctgcacgcttacaggtatggcggaattctttctgtaccaatgaggcaaggtgtacgctctgagacatgtatttatcttgcatgaattcaaagatgatataagattcggctgagtttggattgaatcctgcgtaccgcgtcttgtaatcactttcgtataaaattacggagttctcccgtttagcgacttctaaattggcatccgacttggctaaaccgagcgtccatgtagaggctcctttaactgttttaccgcccgctacggaattggtatgaatggaaatgaataaatcagctttagcattattggctatttccgcacgtctgtcaagtgggataaat

SEQ ID NO: 532 - DNA, 4000 bp, Escherichia coli
  misc_feature (27)..(27): n is a, c, g, or t
  misc_feature (48)..(48): n is a, c, g, or t
  misc_feature (133)..(134): n is a, c, g, or t
  misc_feature (165)..(165): n is a, c, g, or t
  misc_feature (177)..(177): n is a, c, g, or t
  misc_feature (859)..(859): n is a, c, g, or t
  misc_feature (1435)..(1435): n is a, c, g, or t
  misc_feature (1604)..(1604): n is a, c, g, or t
  misc_feature (1644)..(1644): n is a, c, g, or t
  misc_feature (1649)..(1649): n is a, c, g, or t
  misc_feature (1781)..(1781): n is a, c, g, or t
  misc_feature (1784)..(1784): n is a, c, g, or t
  misc_feature (1817)..(1817): n is a, c, g, or t
  misc_feature (1826)..(1826): n is a, c, g, or t
  misc_feature (1869)..(1869): n is a, c, g, or t
  misc_feature (1886)..(1886): n is a, c, g, or t
  misc_feature (1961)..(1961): n is a, c, g, or t
  misc_feature (1979)..(1979): n is a, c, g, or t
  misc_feature (1985)..(1985): n is a, c, g, or t
  misc_feature (1991)..(1991): n is a, c, g, or t
  misc_feature (2021)..(2021): n is a, c, g, or t
  misc_feature (2045)..(2045): n is a, c, g, or t
  misc_feature (2210)..(2210): n is a, c, g, or t
  misc_feature (2382)..(2382): n is a, c, g, or t
  misc_feature (2452)..(2452): n is a, c, g, or t
  misc_feature (2610)..(2610): n is a, c, g, or t
  misc_feature (2643)..(2643): n is a, c, g, or t
  misc_feature (2646)..(2646): n is a, c, g, or t
  misc_feature (2679)..(2679): n is a, c, g, or t
  misc_feature (2682)..(2682): n is a, c, g, or t
  misc_feature (2817)..(2817): n is a, c, g, or t
  misc_feature (2883)..(2883): n is a, c, g, or t
  misc_feature (2940)..(2940): n is a, c, g, or t
  misc_feature (3078)..(3078): n is a, c, g, or t
  misc_feature (3132)..(3132): n is a, c, g, or t
  misc_feature (3138)..(3138): n is a, c, g, or t
  misc_feature (3153)..(3153): n is a, c, g, or t
  misc_feature (3474)..(3474): n is a, c, g, or t
  misc_feature (3478)..(3478): n is a, c, g, or t
  misc_feature (3484)..(3485): n is a, c, g, or t
  misc_feature (3487)..(3487): n is a, c, g, or t
  misc_feature (3491)..(3497): n is a, c, g, or t
  misc_feature (3499)..(3502): n is a, c, g, or t
  misc_feature (3505)..(3505): n is a, c, g, or t
  misc_feature (3509)..(3509): n is a, c, g, or t
  misc_feature (3512)..(3512): n is a, c, g, or t
  misc_feature (3515)..(3517): n is a, c, g, or t
  misc_feature (3523)..(3529): n is a, c, g, or t
  misc_feature (3531)..(3532): n is a, c, g, or t
  misc_feature (3534)..(3534): n is a, c, g, or t
  misc_feature (3536)..(3537): n is a, c, g, or t
  misc_feature (3540)..(3543): n is a, c, g, or t
  misc_feature (3545)..(3545): n is a, c, g, or t
  misc_feature (3548)..(3549): n is a, c, g, or t
  misc_feature (3552)..(3553): n is a, c, g, or t
  misc_feature (3555)..(3557): n is a, c, g, or t
  misc_feature (3559)..(3559): n is a, c, g, or t
  misc_feature (3561)..(3561): n is a, c, g, or t
  misc_feature (3566)..(3566): n is a, c, g, or t
  misc_feature (3569)..(3569): n is a, c, g, or t
  misc_feature (3571)..(3571): n is a, c, g, or t
  misc_feature (3573)..(3574): n is a, c, g, or t
  misc_feature (3578)..(3579): n is a, c, g, or t
  misc_feature (3581)..(3581): n is a, c, g, or t
  misc_feature (3585)..(3585): n is a, c, g, or t
  misc_feature (3587)..(3587): n is a, c, g, or t
  misc_feature (3591)..(3592): n is a, c, g, or t
  misc_feature (3595)..(3598): n is a, c, g, or t
  misc_feature (3600)..(3603): n is a, c, g, or t
  misc_feature (3607)..(3608): n is a, c, g, or t
  misc_feature (3610)..(3610): n is a, c, g, or t
  misc_feature (3614)..(3614): n is a, c, g, or t
  misc_feature (3616)..(3616): n is a, c, g, or t
  misc_feature (3618)..(3621): n is a, c, g, or t
  misc_feature (3623)..(3623): n is a, c, g, or t
  misc_feature (3625)..(3625): n is a, c, g, or t
  misc_feature (3627)..(3628): n is a, c, g, or t
  misc_feature (3631)..(3632): n is a, c, g, or t
  misc_feature (3636)..(3636): n is a, c, g, or t
  misc_feature (3639)..(3639): n is a, c, g, or t
  misc_feature (3645)..(3645): n is a, c, g, or t
  misc_feature (3651)..(3654): n is a, c, g, or t
  misc_feature (3658)..(3659): n is a, c, g, or t
  misc_feature (3663)..(3664): n is a, c, g, or t
  misc_feature (3667)..(3669): n is a, c, g, or t
  misc_feature (3671)..(3673): n is a, c, g, or t
  misc_feature (3675)..(3676): n is a, c, g, or t
  misc_feature (3680)..(3682): n is a, c, g, or t
  misc_feature (3684)..(3684): n is a, c, g, or t
  misc_feature (3686)..(3688): n is a, c, g, or t
  misc_feature (3693)..(3693): n is a, c, g, or t
  misc_feature (3696)..(3699): n is a, c, g, or t
  misc_feature (3701)..(3701): n is a, c, g, or t
  misc_feature (3703)..(3703): n is a, c, g, or t
  misc_feature (3706)..(3706): n is a, c, g, or t
  misc_feature (3708)..(3715): n is a, c, g, or t
  misc_feature (3717)..(3717): n is a, c, g, or t
  misc_feature (3724)..(3725): n is a, c, g, or t
  misc_feature (3727)..(3730): n is a, c, g, or t
  misc_feature (3732)..(3732): n is a, c, g, or t
  misc_feature (3736)..(3736): n is a, c, g, or t
  misc_feature (3739)..(3739): n is a, c, g, or t
  misc_feature (3741)..(3741): n is a, c, g, or t
  misc_feature (3743)..(3743): n is a, c, g, or t
  misc_feature (3745)..(3745): n is a, c, g, or t
  misc_feature (3747)..(3748): n is a, c, g, or t
  misc_feature (3755)..(3756): n is a, c, g, or t
  misc_feature (3761)..(3761): n is a, c, g, or t
  misc_feature (3763)..(3763): n is a, c, g, or t
  misc_feature (3765)..(3765): n is a, c, g, or t
  misc_feature (3768)..(3768): n is a, c, g, or t
  misc_feature (3771)..(3772): n is a, c, g, or t
  misc_feature (3774)..(3774): n is a, c, g, or t
  misc_feature (3776)..(3779): n is a, c, g, or t
  misc_feature (3782)..(3782): n is a, c, g, or t
  misc_feature (3784)..(3784): n is a, c, g, or t
  misc_feature (3790)..(3791): n is a, c, g, or t
  misc_feature (3793)..(3793): n is a, c, g, or t
  misc_feature (3795)..(3795): n is a, c, g, or t
  misc_feature (3797)..(3797): n is a, c, g, or t
  misc_feature (3799)..(3799): n is a, c, g, or t
  misc_feature (3801)..(3801): n is a, c, g, or t
  misc_feature (3805)..(3806): n is a, c, g, or t
  misc_feature (3808)..(3808): n is a, c, g, or t
  misc_feature (3810)..(3810): n is a, c, g, or t
  misc_feature (3812)..(3812): n is a, c, g, or t
  misc_feature (3814)..(3816): n is a, c, g, or t
  misc_feature (3819)..(3819): n is a, c, g, or t
  misc_feature (3821)..(3828): n is a, c, g, or t
  misc_feature (3832)..(3832): n is a, c, g, or t
  misc_feature (3834)..(3834): n is a, c, g, or t
  misc_feature (3839)..(3839): n is a, c, g, or t
  misc_feature (3842)..(3843): n is a, c, g, or t
  misc_feature (3846)..(3846): n is a, c, g, or t
  misc_feature (3848)..(3848): n is a, c, g, or t
  misc_feature (3850)..(3850): n is a, c, g, or t
  misc_feature (3854)..(3856): n is a, c, g, or t
  misc_feature (3861)..(3862): n is a, c, g, or t
  misc_feature (3865)..(3867): n is a, c, g, or t
  misc_feature (3870)..(3873): n is a, c, g, or t
  misc_feature (3875)..(3875): n is a, c, g, or t
  misc_feature (3877)..(3878): n is a, c, g, or t
  misc_feature (3882)..(3885): n is a, c, g, or t
  misc_feature (3888)..(3890): n is a, c, g, or t
  misc_feature (3893)..(3896): n is a, c, g, or t
  misc_feature (3902)..(3907): n is a, c, g, or t
  misc_feature (3909)..(3909): n is a, c, g, or t
  misc_feature (3912)..(3914): n is a, c, g, or t
  misc_feature (3916)..(3916): n is a, c, g, or t
  misc_feature (3918)..(3923): n is a, c, g, or t
  misc_feature (3926)..(3926): n is a, c, g, or t
  misc_feature (3929)..(3929): n is a, c, g, or t
  misc_feature (3932)..(3932): n is a, c, g, or t
  misc_feature (3934)..(3934): n is a, c, g, or t
  misc_feature (3936)..(3939): n is a, c, g, or t
  misc_feature (3945)..(3947): n is a, c, g, or t
  misc_feature (3951)..(3951): n is a, c, g, or t
  misc_feature (3955)..(3955): n is a, c, g, or t
  misc_feature (3957)..(3957): n is a, c, g, or t
  misc_feature (3959)..(3959): n is a, c, g, or t
  misc_feature (3961)..(3961): n is a, c, g, or t
  misc_feature (3963)..(3966): n is a, c, g, or t
  misc_feature (3972)..(3974): n is a, c, g, or t
  misc_feature (3979)..(3979): n is a, c, g, or t
  misc_feature (3981)..(3981): n is a, c, g, or t
  misc_feature (3983)..(3984): n is a, c, g, or t
  misc_feature (3987)..(3988): n is a, c, g, or t
  misc_feature (3992)..(3992): n is a, c, g, or t
  misc_feature (3995)..(3996): n is a, c, g, or t
  misc_feature (3998)..(3998): n is a, c, g, or t
  misc_feature (4000)..(4000): n is a, c, g, or t
gttaaaatcgatggtgaaaaactattngtaggtttcaaattcgataanctatataatcctgatgatgatgaaactactcatggtgctaaaaagaaagatcaaaatgctccagctaaacctcatgatttggaannaaatccttactctgatgaatctgtagcatancgtaaatactantctatggatcttcctaaaccagctgattttgatgtaaatccatattctgatgaggctattgtgtatgctcgattttatgatttgggaattaagaaacctgatgatttcgatacaaacccatatacagatcaatctgtagcatatcgtaaatatcatttcatgcaattgcctaaaccagaagatactacatctcctacattcgaacatgataatattgtatggcatcattattatggtattggtatgcctagtccagcagaaccaccagaagaagaaccaacagtaacacatgaagaagctccagtagaaaaagaaccagacactgttgctcctactgatcatctataagatcaagaaaggttaattaatatggaaggtaaaagtcttgttttagttaaagataagttccatataaatcttaagaaatcaatcaataatatcttagtagtaccagtagtattcgatagtaaaattcatgctatagaaatacttaatgatcttcttagagaaaatagaattgataaaggtattgaagaaggaacaattcaatctttaataacagatttccatattgaccttaaagattactattgtttctgctataaaaacaatactaaagatttagtagttggatataaaattgtagaaatgattgatacaagatctgaatattaaaccaaantccatagagtcttaattgactctatggattactttatcacatcattataatacaaaatttagctaaattttttataaagattgggggctacaaaatgccagatatcgagaattttgatgaaaccaatcgaatcagatttaaacagaatatattaaaaggagagttcttctttgtaggtggttggcatgcgtacgatgttccagcgcaagtaaaggttaagaacaattcttatgtgcaatatatttctatgatcaaaggtaaacttacccatgtaccaacagatgtcgttaaagacctccaaggtgatttcactattggtaagaaatatatcgatgatctaaatcagatcgatattaatggtgacattgatctagaagagtctacatttagactattccctgaccttaaaggtcaaatgatatttgataaaggtgtaagtgaaacagatctagaatctacagttaaactacatgcaaactttattgaagatattaataatccagatattgatcaagataaggttggatttacaagttctgttacagtaccagctgtaagagcattagatattcttangaaatgtaatctagattacgttcaagcagaattagaagaaactgaaaagaatactattatatctcaaattacagtaaaagatttctggtctacaaaagatctagattctacagttaatatcaatgcagatacttttggtagaactttatttgttgtagatgatcttatntatttaggaactatcgataactatgatctagattgtaatntaganattagtgataaaaatctaaaacaattatatctctatggtagatgctgtattcaatctaacagatatccatattccatctattctaaattagtagtaccttgtacttctaatacagaattcttggcagctgtnacngtagatgattatatcaaagaattattatgtgangtagatatngatccagaatacgaagactatgatatcttagatggtgtagttnatatgcatgactatatnacatcagaaatcaatggtgctgttgaattagagcattatcatacattcagacaattctctggtatgattgatatnattcttcctagcaatacngatatngatgcntctgttacagttcctgtaattgttaatggntattataaagatcttcctggaaangttactactggtaatagacaattagaagatatctattctgaaattcatgtaataaatacaagatatgtaaaaccagaacctactgatgattttatgattgtagatacaatgaatgatcttctagaaatgcctagagaattattaagacctggaatgaaagtctangttaaagaaactaaacgagaatatagacttgctggaggtcgaagaagagatagaaaggaaaataatcatgaataagtgttgttgcggagataagctaagtaaagaagatgaattcatgcttaactggtttgatgtaacagccgaagctgaattctcttgttctatcaatgtncaaggaaatcctaatcctattatggataattggactaattgtgaatgtggtggaaatgtagcaaaagctntaactcctaaagtatatggtagagtagctattgtagtagatcctttatggagatatgaagcatacgttgttactagatcattaactacattctttgaaagatattatagaagaatgaatttagaagttatctatggaggatctccaagatctgatttngatgtagaaaagattgctcatatgtatggtgtngantataatagaatgcataaatctccattaatttcnganccaagaaatcctggagctatgagacatagtatctctgatttcttatgtgctttacaaaacttccatccattttctaatacttctaaattagatagagttattatctttatggataacaatgttgcttatagagcntctgctgtatatccaattattaaattatgcagagagaataatatcccttgtgttctaatccatagngatggtcaatatgatgaaataaatgaaccattctatgatggatattggtatgacccnaatgctaataaactcatcatgggtacagaaagataccaaagattcaatcctggaaatgtaattcatgagattcatgaatgtcatccaagaagcagatctaattatgtttatgctcctaaatctcctaaagaagattgnggatgttgctgtgaacatggtagagtatgtagacctcaattatatccaccttcntatgantacgaaagtagaganaatggttggagaggtgaatattatggtggaccatatcatcatcatagaaatggtggtactcatcatctaatgtatgattatgatgatttatatgattcatacatggacccttgtggtagactttataactctcataaattggttgattaatacttctaattcatgccctagagccgtaatggttctagggtttctctttaattttatataatttcactgacttttttataagataaatatttatatagctttatacctttattaagaggagaagtattaaaatgggactaataaacaaaatcacagatatagttaaaggtnctcncacaanngntgannnnnnnannnntanaaanaanatnnngaaaannnnnnnannantnnttnnnncnccnnaanntnnnanantagangtntntnntaanntntatntnctcnncannnntnnnngagnntntgtngnannnntncntnntgnngganatnataaanaaaaannnnattnntctnnaannngnnnannaggnnntnannntcctnttnnnnanantantnnnnnnnntnttattannannnntncttntantncntntnnaacaaannatatnangnatntgnnanannnnttntnatatannananantntngagnntntntnannnaanannnnnnnntttntnttatnatnnttntnantggnnnatcannagnnnttnnnnanannattnnnnaannntcnnnngaaaannnnnntnttnnnanannnnnnaanatnatntntnnnncttttnnnaaanaaanantntntnnnnatattnnngaagntntnnttnntganganntntn

SEQ ID NO: 533 - DNA, 4000 bp, Escherichia coli
  misc_feature (1929)..(1929): n is a, c, g, or t
  misc_feature (1935)..(1935): n is a, c, g, or t
  misc_feature (1947)..(1947): n is a, c, g, or t
  misc_feature (1974)..(1975): n is a, c, g, or t
  misc_feature (1977)..(1978): n is a, c, g, or t
  misc_feature (1989)..(1990): n is a, c, g, or t
  misc_feature (1992)..(1992): n is a, c, g, or t
  misc_feature (1996)..(1996): n is a, c, g, or t
  misc_feature (1998)..(1998): n is a, c, g, or t
  misc_feature (2001)..(2002): n is a, c, g, or t
  misc_feature (2004)..(2004): n is a, c, g, or t
cagagaaggtcaaacttggcaaacacaatacaggtaaaaagaggcgcaaacgcgtcactcccgacgcttaacgccggcgaattcgggttcagcacggacactaagcagatctatattggtgatggggccgcgaatcacgaactgggcacagtatcccatcatgtccctattgcttcgtcaggggacttcacgatccccacgggccgcagcttcatcggcggggatgaatatagcgtggaaggaactgatattttagagattcagggaacgggcatgatgatactcgtaggataaggagcaactatgtcaaggataatattagaagaacaagccgcgccgggtacaccatcaaccgacaaaatagctatttacccgaaagcaggtggggggatatataaaaaggatgatgcaggggtagaggtgcggctggatagcggtaatatggtttccgaatcggtggctgatgatgcagagatcgtgctgactacagccgtttccggctggggacaagcgatggccggggataacgaggaatatattgaatttcggtttaccgcagcgggagtcgtaacggtgatatctaactcggccaacgcggtcggggcggatacggatggcaacctttgcgtgtatgatgcgggtacagggatagcaatcaaaaacagattgggagccacaaaagatattagatacgttgttaattactcataaggaggcgatataaatgcgtggatatcctaaacatatagcgaacaaacgagattttaacaacctgatggacatgccggaatataaaacgcaggcattggcggacctgaaacgattacaggtgattgatgacgctaaagtaatcagagttgtctcaggttcggaagaagacaaaaatctcgtcacggaagaaatagacaatccgaatccggtgtggaaacagaaaggatttgcaactaaaaaagctgtggatgatctggtgacggagaaggaggtggtgacagatggcaaatagactgataacacagattgaatcgcagaacgccctactcggggctgttgtagcgaacttcatgctgaacaagctggatcggatcatcgaatataaagatgctgacgaggtcacggtcaagggggcgaatcgaatccccttactgattaatgacaagtggttttacatcgatacagacacggatctggacaccggggcggatctggacaccggggctgttgcggcggggacggattattatgtgtatgcgtgtgacaattcagggtctctggtctttctcatttcagcggccagcacctatccaagcggttataatgccaacacgagccgtaagatcggtgggtttcatacgatctgtgctgcggctgggacgattggcgggcatacactgaccgaccatcctgcaaacgggatattgccacaatcggtctgggacctgaaacaccgggccaggtgcggaagcaatgcgggtatggtctggagtgaggaagctcaggtctgggtggacatctatctggcaagcggaacaggggcttctactgtgagtgtcaatggcggaacgatttcagacacccgtaactggatggatttcgtggatgattacggggccgttggaaagcgaatgctgagagatccagagtttcagttgatcgctggcggaagcaatgaggaaaccaatattaatggtgactctgatcccgtaaccacgggtgggcattctgatagcgcatctcgccggatgatcagcaatatcggctgtgaggactgttgtggggctctgtatcagtggttggtcactccagctgcaaggcttgatgatggaactcatgctggagactgggtcgaccttgatggagctaaggggtctttttacacttatgggattgcccctaattattatggcaatactcagctgcgtgcgggcggtnattggnataatgggacgnattgcgggtcccgctgtcgtaatgcgnntnnctatcgctggnntncgantncgnntntcggcgggcgcggttgcgcggagccactataacgatgtcactatatcacgtatcacgagcgcgccgcaggcgcgttatcacggctggtaggtcgtgcggctgcatgcaggcggtaattggaataatgggacgaattgcaggtcccgctgtcgtaatgcgaataactatcgctggaatacgaatacgaatatcggcaggcgcggttgcgcggatacagggtttgagcaaaactcctggctggatctaccggccatgtttcggggcgtaagccacggagcaaaatacatgacggagggcgaggggagttagtaggtaaaggccgaaagctccctgggccattacaccatgagacgacacggaaatctttggggccaaataacagatatccacaatatctacgaggcatataaggccgccaggaaaggaaagacctggcagaataccatcaagtattttgacatgaaatttgatgagaacatgttcaatattcaacgtctcctggtcaataaaacgtttcgtaccgcgccatacaaagagaaaaagatctacgaaccaaaagaacgtacgatttatatattacccttcaatcctgaccggatcatccagcacgcactcatgaacattatagaaccgatatgggatgccatgttcattcacaactcgtatgcctgccgaaaaggcaagggaatacatgccggaagcaggaagactatggaatttgtcagaaaatacaaatattgccttaaattagatatctccaaattctatccatccgtaaaccacgacatcctttatgagatagttcggcggaaaataaagtgcaaagacacgttgtggctgatcaagaacatcatctattcattccccggccggaaaaacgtcccaatcggtaattttaccagccaatggtttggcaatctctatctgaatgagttggatcaattcctgaagcacgaacaccacgtcaagaactatatcagatattgtgatgatttctgcctgttccatgatgacaagaagtacctcaacgatatgatgcggatcatcagggattttatattgacaaggctaaagatgacatttagcaagtgtgacctattccctgtctcaagaggtgttgacttcctgggctaccggcattttccgaaatatatgttagtccggagatctacggctaaacgggtcaagaaacggttgaaagccctaccgtggctattagctaagggaaagatcacaatagatcaataccgtggatctctggcgtcgacaaagggctggctcaaatgggccaatgcccataacctgacaacatacctgcaaattgagcagttggaggcaagattaaattgtgcctaaaagaaaacagtttaaggattttgcaggagatcaccggccccttgatggcgctaaggtcaagattgcagacgtgtttaataaagagattcaagtgctgggctatcggatacagccgagtagatatcataaaacattgccatgccttcagctacagtttgagatggataaggaacaccatgtgttgttcacaagttcaacggtcttggtcgaacagatcgaggcgtataaggatgagttgcctttttatacaacggttaagcaggtagggaagtattttacattcacataaggaaaaacaggagaacaaatcgagggatattatgacagccgcagcggatcgcccgccatgcagtatgcacacgggagtagataaagcgattgaaaatttggagaaaagtcgagaagatcacgacgctacggccatacgcgtctggtcggcgattgagaaaaaagtctccacaaaactctttctcaccatattgaccattgcggtcgggattgtaggcattttcaacgcgattttcttttacagccaggaccggatattcacgagttacgatagcacattggccaaaatatcagacaagcaggacaagttgatgactcaggtgaccgacctgcgtctcgatattcggaacgg

SEQ ID NO: 534 - DNA, 4000 bp, Escherichia coli
  misc_feature (65)..(65): n is a, c, g, or t
  misc_feature (434)..(434): n is a, c, g, or t
  misc_feature (526)..(526): n is a, c, g, or t
  misc_feature (565)..(565): n is a, c, g, or t
  misc_feature (868)..(868): n is a, c, g, or t
  misc_feature (1625)..(1625): n is a, c, g, or t
  misc_feature (1992)..(1992): n is a, c, g, or t
  misc_feature (2410)..(2410): n is a, c, g, or t
  misc_feature (2524)..(2524): n is a, c, g, or t
  misc_feature (2578)..(2578): n is a, c, g, or t
  misc_feature (2659)..(2659): n is a, c, g, or t
  misc_feature (2662)..(2662): n is a, c, g, or t
  misc_feature (2674)..(2674): n is a, c, g, or t
  misc_feature (2772)..(2772): n is a, c, g, or t
  misc_feature (2776)..(2776): n is a, c, g, or t
  misc_feature (2935)..(2935): n is a, c, g, or t
  misc_feature (2947)..(2947): n is a, c, g, or t
  misc_feature (2959)..(2959): n is a, c, g, or t
  misc_feature (3073)..(3073): n is a, c, g, or t
  misc_feature (3431)..(3431): n is a, c, g, or t
  misc_feature (3440)..(3440): n is a, c, g, or t
  misc_feature (3482)..(3482): n is a, c, g, or t
  misc_feature (3540)..(3540): n is a, c, g, or t
  misc_feature (3711)..(3711): n is a, c, g, or t
  misc_feature (3771)..(3771): n is a, c, g, or t
  misc_feature (3954)..(3954): n is a, c, g, or t
  misc_feature (3987)..(3987): n is a, c, g, or t
cggtatatttctttgggtcagctaaacgcttcttatcaagagcttctttggctgttaaaacctgnaatacaggttgtgttccatcttctgtaacgtgagttcttagcaccttacgaataccatctttgctccagtctgttagctttaaacatgaaggatcatcatactttggaatacctttaatataataaagcttgttatctttagctagatataatgtaattgtgtaagattccttacttacagatttgtctgcgtcatttacattcttgtcgttactaggcatacttaactccattgattggggttttgccaatgacgtacagaccataaagaaagtgatcaaaagcatcatcatgtccaccatcggtgtaaagtctacacgggtgctcatctttttctgcttgccacctttgccttcgcttaaatctacntccattgttaatcctcctgtgtttttaatgaagttataagatagtaacgattctcttgcatgtcttgaagttcagacatcaccttcttgatnactttataaggagttccttcgtcagctttaatcgcaagnttaatgtctttattgacattctttgcagacttaacccaaagttggaattcactcattttgccatcaatactatctgtagggattccttgtccactgatttccttagccatatctgcttcatcaagatttagataagcgctaagtttgtccattggaacaccccacataggatctttctggaacttctcttgctgtttaccagtaagagacacaccgaatgtacctgtcatatctgagagtacttcagcaacctgaagttggttgtccatgctcataaacactttaccttgcttatcaacaagnatgtttagaacatctttctcaggtactttgatctcagaaaccgagttaggcgtaagcactttcactggttcattctttacgaatgttgatgtcaacataaagaatgtaagcaaaagcaccatcacgtccgacatcggagtcatgtcgatccaagtggattgctttttaatttttactttacccataatgataaatgttttaaagggttagcaaaaattaagcttcttctgtgtggttagcttcaaatgtctgagcaatagaataaccaacctcatcaagagcgtatgtcaacttatcaatcttgtttgtgaaagtgttgtaagaaacaacagcaaaccaagatgttgcgataccagacgcagtgttaaccaacgcttcagaaataccttctgacaaagccaaagagtcaccaccaccaccagctgcaagcgctgcgaacgaacggatcataccgataacggtaccaagaagaccggtaagtgtacccaatgttacgatagaagcgataattggaaggttcatttgcaatgtaggcatttccaattgagttgcttcttcgtgagcttgttgaatcttagaaaccttttggcttagttttaaacctttagagttttccatttctttgtaagcattcaaagatgcagaaacaacgttagctacagaacctttttgtttgttgcaaaggtcttgtgctttagcgaagtcgtttgcattcaacgctgctttgatgtttgcaacgaatttagaaagagaaccnttaccaaatgctgtgttaagagccaaccaacgctcaacagaaagagctaatacagtaagcaataaaccttggatgataggcacgataaatccacctttgtacatcaaacctaggatgttaccttcttttactgctgcagtaggatcgttattaacgaagttgtctgggttacccaatacaaacttgaaaatacatactgcaataatgaaacatacaacgatcacccagaacgctgctctgattccttgaaagccctgtgatttctttgggctggctgcttgttttgttgttgccataatttttgagttactttagttattaataattttaattgttattattcgtcatttatatttttcttaagacngatgttttattgatattaatcaaacttagtccgtcaaaagaataacgcaaagataattattttatgcagaaacacagcggtcattaagaagttttaacggcattacgatatatttctccgttctttcttcttttttgccaccgtttttctattttactattgtagcttagccaaagccacctttattctattaagagcttcggttattgttttatcatctgttgcgtagctcattctgaaataatcaggagctccaaaggcatctccgctcactgttgccacatgtccttcttcaagcaagtacatagcaaagtcggtcgagttagagattttatatttgccatattcctttccaaagaatgaagaacatttagggaagagatagaatgcgccttcaggaacattcacttctaatccnggaatatcttttgcaagctttacaattagatttcttctgcgttcgaaaaccaagcgcatatcttctacacattgttgacttccagtgtaagcagcctctgcagccttttgactnacagagcaaggaccacttgtatattgtccttgtagcttgttacagccttttgcnatccattcaggagcagccaagaaaccaattctccaaccagtcattgcataagctttcgacacaccattaataataattgtncgntctctcattccngggaactgcgcaattgattcgtgattgcctatataactaatgtgttcatatatctcatcagacacaacataaaggttttcgtgtttcttaatcacctntgcnaaagcttcgagttcatctttagaataaaccgaacctgttggattacttggagaacacaatatcaacatacgtgttttctcagtaatagcattttctaattgttctggagtgattttgaagtttgttgaaagatcagtatcaatatacaccgactttccncctgcaatctcnaccatttcaggntagctcacccaatatggagcaggaataatcacctcttcacctgggttcaccaatgcaagaactgcattacacacacattgtttcgccccatttgatacagaaatttcagtaacnccatattctaattgattttcgttctttagcttttcaacaattgctttacgaagatctacatagccaggaacaggagaatagcgagagaagttatcgtctaccgctttctttgctgcttctttaatatggtcaggggtattaaaatcaggttcgccaacactcatattaatgacatcaatgccattagctttcatttcattactcttttgagacatggcaagtgttgccgaaggagacagtctttttaaacaatctgataattgtgtcattattttaagattataaattaataccgcaacaaaaataataaaataatttgttatttaagataaaaggtaaaacttttaagtttttgcangacaaaaanatgcaatttgcaagagaattgttctctaaagcaaactgcatntcttctaacaggataaagaagtagtatttcttcttcacctatttatatataagggcantgatataagacgagtgtcttatgcccctttttctcttattctaatgaaagagtgtgacccatacggtcttttttggtcttcaaatacttgtagtcgtatttggttggagcaatttcaattggcacattctctacgatttcaagtccataagcctccaaaccaactcgtttngtaggattattggttatcaagcgcattttatgtattcctaagtgacgcaacatttgcgcnccatagccataatctctttcgtcgggtttgaatcctaagtgaacgttagcctcaacagtatccattccttcttcttgtagtttataagccgccatcttgttcattaggcctatacctctaccctcttgttggatataaataatcacacctttgccttctttctcaatcatttgcattgctttntgtagctgttcgccacaatcgcaacgctgactncccaagatgtcgc

SEQ ID NO: 535 - DNA, 4000 bp, Escherichia coli
  misc_feature (243)..(243): n is a, c, g, or t
  misc_feature (256)..(256): n is a, c, g, or t
  misc_feature (1821)..(1821): n is a, c, g, or t
ggacatcgcgccagccgaggtgatcgctattcagctcaatggattgcaatataacgatatgccggaaactgatgccggcattcgccagacatgggcattcgcgcatccgcgtaaccgcgcggcgaccggcccgttgccacgatttaccatgatgctgaaaggccccggctatgagatgatgctgaaccatgcctcgcatgagattaggccggcaaaaatcggcgaagggtggcggcaatttgntgtgtttatggangctggcaatggcgatgtcatgcagtttgcatggatcgtcgaaaaagtcaccgaagggcgctatcgggattgttggatgacggtagcggtgtcagcaccgcgtctgagcggccaaggcagttagtaaactggcagttagcaaactggcagttaggtgttggcaattagatgttggcaaaaatgagcgtggttgtgaccgtcaataaaatgcgaggcaacgggttattttgccgataattttaccgtttattttgccagctctgttgcggctgttgatgtgatctcccactccaccggtgccagcccatgccggacaagataatcattcgctttggaaaaaggtgcgctgccaaaaaaaccgttatgcgcggccagcggcgaggggtgcgcgcttgccaaaaccaaatgtcgctgccggtcaattttggcacctttttcctgtgctttgcggccccacaacataaacacaagatgttgtctgtgctgattgagctgatctatcaccgcatcggtaaattgttcccagcctttcccgctatgcgcggccgcctgtccatcacgcacggtcaaacagctgttcagaagcaaaacaccagcttgcgcccaatcttcaagattgccatgcggtggcggcgcaatgccaagatcggcgtgcaattctttgaaaatattctgcagcgatggcggtttcggcacgccgtggcgtacagaaaagctgaggccatgtgcctgacccgggccatgatagggatcctgacccagaaccaccacttttaccttgtcaaaaggggtcagcgcgaaggcgttgaaaatctcactgcccggcgggtagatttttttgccggcggctttttcggcgcgcagaaactggcttaaccgctgcatataatcggcggaaaattcagtgccaagacgcagtttccagctggtttccagtttaatttcgggcatggcgacactccatcatgccgatgcagtctagcgcctttaaaatcgttttgaaatggtgcgccggggtttattcggctgcggtctgcttatcccaggcctctgccaccttgatgcaatgctctatcaccgcttttttggcgcgcgacacgatcgcttccgggtcgttggcaaggccagtggcgtcaataaatgacaagtgattaatgcccatgaatttcatcatgaattccagatagggcgtggcaaaatcatcagccgcattggccatggtgtaattcgatgtcacaatgatcaaggcttgcttgtttttcgacttgccgctcaggtcacgggcgcgggcgccatcgacattgtcgcggcagatcagatcaatccatgatttcagcgctgccggaatgctaaaattgtaaatcggcagggcgatcagcagcaaatcagcattctcgacttcactgatcaatgcttctgattgcgccaaaagcgcccggtcttcagaagagcgtgcctcgcccggggtcaggctggcattgcgccaggcactcgaaatattgccaatgccgctgcgcgtgtcgcgcaatgtcagattgaccacgccgaactgttcctgcagcgtgntaacggcaagatcgctcaatgaccggctgaccgattcatgccgccttgtgctgccgtcaatgcgcaatattttcggagccatcgccgtcatatgtctatgcaccaccagttcagatcaaataggaaggccatgggaggggggaggactcccatggcatgtctagtggtattattatcaatcacggaaataaacagggagaaatacaaaatataattctcatttgtggaaaaataggatagaatgcgcaaccatgagtcagattgaagaattgcgtgcctttgtgaccatagtcgaaactggcagccttacccaagccgcggatcgtttgggcattgcggtttccgccgtcagccgtcgtttgcgcgaccttgaattacggcttggtgcggcacttattcaacgctcaacccggcggctgtatctgaatgaaaccggacaggtttttttcgaacggtgcaaaattatcctcagcgatcttgaagatgcacaacaggaagtcaccaatgctggcggctcgctaagtggcgttttgcgagtcagcgcgccgctgtcctttggtttggcgcatatgtcatcggcgattgcgcaattcatgcatgccaacccggaagtgcgcatcgagatggatttaagcgataaacgcgttgatctgattgccgaggggtttgatgttgccattcgtattggcacgcttaccgattcaagcctgattgcccgcaaaatatccacagtgcgttttttaccggctgcagcaccactattggttgatcaacttcctgtgttgcaatctccggaagatcttcaaaatgtgccagcgctggcctattccaatgaccggaacccgcaagagtggcattatacggatccggatggcaaaaccggtgtgttgcgggtaacgccgaaaatgtcggcgaataatggtgatgtgttgcgcgaacttgccattgccgggcatggtatgattaatttgccgcagtttttgcattatgaagcggtgaaccgggggttgctgcggccgttattcgcaaattatatctgggcaaattttgatatttttgcggtctatccgaaaaccacgattctgcccaaacgcacccgcgcttttgttgattttatggcaacattatatgggcctgaaccttattggcataagctgaatccgcagtaaggttgcttttgcagcgatatcctcaattgacacatcaggggcaatcaggcgggcctgtgcagccatgttgaaaattcaaaatctgtcatttgccattgatggcaagccattattcgacaatgcttcggcggtgatcccgaccggccataaggtcggtattgttggtcgcaatggcactggcaaaacgaccttattccgattgatccgcaaagaatgggaagtcgatggcgggcagatcgaagtgccgtcggattttcgcatcggcggtgtcgatcaggaagcgccggccagcgacatcagccttcttgatacggttctggcagccgatctggaacgtcatcagttgctgcgcgaagcggacaccgccaccgatgctgaccgtattgggcagatccatgcacggcttgttgatattgacgcctatagcggtgaagcgcgggctgccagcattctggccggacttggatttgaccagacggcgcagcaacgaccctgccatgaattttccggtggctggcgcatgcgggtggcgctggcggcggtgctgtttgcccagcctgatctgttgctgcttgacgagcccaccaactatctcgatctggaaggtgccatctggcttgaatcatttatcgccaaatataaacatacggtgttggtgatttcgcatgaccggacattattgaaccgttcggtcaccggcattctgcatctgatggatgccggcctgacatactacaccggcagctatgatcaatttgataccgagcgccggatgaagctggaacaacagcacgccatgcggcaaaagcaagaggcgcaacgccagcatattcagacattcgttgaccggtttcgctataaggcatcaaaagcgcgtcaggcacagtcgcggctaaaacagctggaaaaaatgcaaccgattgcggcgatttcggaacgtgttgtgtccggatttaattttcccacaccggatgaattgccgccgccgcttctggtgcttgatcatgtcg

SEQ ID NO: 536 - DNA, 4000 bp, Escherichia coli
  misc_feature (144)..(144): n is a, c, g, or t
  misc_feature (150)..(150): n is a, c, g, or t
  misc_feature (171)..(171): n is a, c, g, or t
  misc_feature (255)..(255): n is a, c, g, or t
  misc_feature (258)..(258): n is a, c, g, or t
  misc_feature (312)..(312): n is a, c, g, or t
  misc_feature (315)..(315): n is a, c, g, or t
  misc_feature (318)..(318): n is a, c, g, or t
  misc_feature (327)..(327): n is a, c, g, or t
  misc_feature (330)..(330): n is a, c, g, or t
  misc_feature (333)..(333): n is a, c, g, or t
  misc_feature (336)..(336): n is a, c, g, or t
  misc_feature (348)..(348): n is a, c, g, or t
  misc_feature (354)..(354): n is a, c, g, or t
  misc_feature (363)..(363): n is a, c, g, or t
  misc_feature (385)..(385): n is a, c, g, or t
  misc_feature (411)..(411): n is a, c, g, or t
  misc_feature (423)..(423): n is a, c, g, or t
  misc_feature (761)..(761): n is a, c, g, or t
  misc_feature (880)..(880): n is a, c, g, or t
  misc_feature (886)..(886): n is a, c, g, or t
  misc_feature (979)..(979): n is a, c, g, or t
  misc_feature (1019)..(1019): n is a, c, g, or t
  misc_feature (1060)..(1061): n is a, c, g, or t
  misc_feature (1069)..(1069): n is a, c, g, or t
  misc_feature (1201)..(1201): n is a, c, g, or t
  misc_feature (1222)..(1222): n is a, c, g, or t
  misc_feature (1288)..(1288): n is a, c, g, or t
  misc_feature (1291)..(1291): n is a, c, g, or t
  misc_feature (1339)..(1339): n is a, c, g, or t
  misc_feature (1802)..(1802): n is a, c, g, or t
  misc_feature (1983)..(1983): n is a, c, g, or t
  misc_feature (2013)..(2013): n is a, c, g, or t
  misc_feature (2028)..(2028): n is a, c, g, or t
  misc_feature (2040)..(2040): n is a, c, g, or t
  misc_feature (2049)..(2049): n is a, c, g, or t
  misc_feature (2064)..(2064): n is a, c, g, or t
  misc_feature (2073)..(2073): n is a, c, g, or t
  misc_feature (2202)..(2202): n is a, c, g, or t
  misc_feature (2287)..(2287): n is a, c, g, or t
  misc_feature (2301)..(2301): n is a, c, g, or t
  misc_feature (2314)..(2314): n is a, c, g, or t
  misc_feature (2319)..(2319): n is a, c, g, or t
  misc_feature (2322)..(2322): n is a, c, g, or t
  misc_feature (2325)..(2325): n is a, c, g, or t
  misc_feature (2337)..(2337): n is a, c, g, or t
  misc_feature (2340)..(2340): n is a, c, g, or t
  misc_feature (2349)..(2349): n is a, c, g, or t
  misc_feature (2352)..(2353): n is a, c, g, or t
  misc_feature (2358)..(2358): n is a, c, g, or t
  misc_feature (2364)..(2364): n is a, c, g, or t
  misc_feature (2421)..(2421): n is a, c, g, or t
  misc_feature (2607)..(2607): n is a, c, g, or t
  misc_feature (2619)..(2619): n is a, c, g, or t
  misc_feature (2733)..(2733): n is a, c, g, or t
  misc_feature (2781)..(2781): n is a, c, g, or t
  misc_feature (2851)..(2851): n is a, c, g, or t
  misc_feature (3264)..(3264): n is a, c, g, or t
  misc_feature (3270)..(3270): n is a, c, g, or t
  misc_feature (3279)..(3279): n is a, c, g, or t
  misc_feature (3301)..(3301): n is a, c, g, or t
  misc_feature (3312)..(3312): n is a, c, g, or t
  misc_feature (3321)..(3321): n is a, c, g, or t
  misc_feature (3327)..(3327): n is a, c, g, or t
  misc_feature (3420)..(3420): n is a, c, g, or t
  misc_feature (3443)..(3443): n is a, c, g, or t
  misc_feature (3480)..(3480): n is a, c, g, or t
  misc_feature (3492)..(3492): n is a, c, g, or t
  misc_feature (3516)..(3516): n is a, c, g, or t
  misc_feature (3552)..(3552): n is a, c, g, or t
  misc_feature (3567)..(3567): n is a, c, g, or t
  misc_feature (3600)..(3600): n is a, c, g, or t
  misc_feature (3684)..(3684): n is a, c, g, or t
  misc_feature (3720)..(3720): n is a, c, g, or t
  misc_feature (3765)..(3765): n is a, c, g, or t
  misc_feature (3798)..(3798): n is a, c, g, or t
  misc_feature (3807)..(3807): n is a, c, g, or t
  misc_feature (3870)..(3870): n is a, c, g, or t
gctagaaacatcttaatctccagtaacttacgtttagttgtatctatcgctaagaaatatgttggtagaggtatgttattcctagatttaatccaggaaggtaacatgggtcttgtaaaggcagttgagaagttcgactatacnaagggnttcaagttctctacatacgcnacatggtggattcgtcaggctattacacgtgccattgcagaccaagcaagaacaattcgtattccagtacacatggtagaaacnatnaataagttaacacgtgtacagcgtcaattggtacaggaattaggacgtgatccntcngcngaagaaatnagncancgnatggaaggtatntctccngaaaaggtnagagaaatccaaaagattgccntagaacctgtatcacttgaaacaccnattggtgaagangatgattctcacttaggtgactttattgaggataaggaagcactcagtcctgatcaatatgcaagtaatcagttattgaaggatgaaatcaatagcgttctcagtggtcttacagaacgtgaagaaaaggtattacgcttacgttttggtttatatgatggacgtacacgtacacttgaagaagtaggacgtgaattcaacgttacacgtgaacgtattcgtcagattgaagcaaaagcactacgtaaattgaaacatccatcacgctcaaagagattaaaggatttctttgacaaataagatgaatttacgtatccagaaaattgcggatatgatanacaaaggcgtggtcttggcagatattggtacagaccatgcctttcttcctatcctagcaatcaaacataaaaaggtacaaaaagcctacgcttgtgatattgcaaagggaccattaganattgcnaaacgcaatatccaagcggaaaaccttgatggtcaaattgaaacaatcttatccaatggctttgaccatgtaccacaagacgtcgatgttgtngtgattgcaggtatgggctactataccgcaaaagatatcntagaagctgcaggggaaaaacgtttacgtacatgtaaacanntgattgtngaagtcaatcgtaaaccagagctattacggaaatggattagtgatcatcactatacgattgatcaagaagagttaattacagagcgtgattttgattatatcgcaattagttttacaacagattatcatgantcatatcgtgatgatgagatnctctgtggagtttatctccaacaaaaaaaggggaaagaatatctttcctattgtgatcgacagatngcntttattgatggggttttagcaaaatatccacatgatgatgactatcgnaaagaattattacaacaaaagaagtattggttagaggcaaaataaaaacgcggttcttagagccacgttttttatttctgaatggaattgacagccttagcgagtcttgacttctgacgagcagcatagttgttattcttgatatgagatacaactgccttgtctaagcacttatttgctgtgttgtaagcagcagtagcagcttcaacgtccttagcttctacagctaaaagaaccttcttgattgctgtctttagttcgctcttctgtccagccttcgcattctgtcttttcagattagttagtgcgcgcttcttctgtgacttgatatttgccatgagtacacctcctgtccacttattagcattaggattatatcaaagtgaagtgtaaaatgcaatgaaaaccccaaaaaagtagggtataatatcacggtggaggtatgagagatgaaacagacaanaattatattttttggtacaacagaatttgctagcggtatattacagaccttaatcgatgaaggatataacgtcgtagctgttgtttcccaaccagataaaccggttggaagaaaacataccatccagatgacaccaacacatgctttagcagatcaatatcagattccggtgatccaaccngatctcttgaaggaacatgtggatgatgtnttacgatatgaaccngagttaatcttnacttgtgcntatggacaatttgtnccagtacgnattctagaatatccacgtcttggttgtattaatgtacatccatcacttttaccaaagtatcgtggaggtgcaccaatccatcatgcagttatgggtggtgaaacagaaactggtgtaagtctcatccanatgacaaaagctatggatgcaggagatatctatgctagagttacaacaccgcttggtaaagatgaaacgatggcagaattaaacnagcgtttacttgtnttaagtaagcaantagtnaanganaatttagaagantanattgcaggnaanntagtnggaganccacaggatgatagtaaagtaatccttggattaaatattacaaaggaagaagagaangtacagtttgcagtagaggatgtacaaactctgtataaccacattcgtggtttaattgattggccaatgccatatggtgtggttgatggaaagcgtatgaagttctgtaaggttagaatgagaaaagaagaccatcaagctaaacctggagaaatcttaggcttcaagaatcatgcgatggaagtngcaagcattggnggtattatcgaagtttatgaactacagccagaaggcaagagcagaatgacagcagatgcttatgccaatggtgcaggtagaaatatgatagggaaggtatttgagtaaatggancaaaagcacatacgaaatttctgtattattgcccatattgatcatggnaaatcaacattggcagaccgtattcttgaaatgacagaaacggtaaaagaacgtgatatgaaagctcagnttctggatgaaatggatctagaaagagaacgtggtatcaccattaaactaaatgcagtacagctaagctataccgctaaagatggacaagagtatctctttaacttgattgatacaccaggtcacgtcgactttacatacgaagtatcacgctcactagcggcttgtgagggtgcgattttagtcgttgactctacccaaggtgtacaagcccaaaccctcgcaaatacctatctagcattagacaataacctagaaattctacctgttattaacaaagtagatatgatgaatgcacaacctgatgtcacaatccgtgagattgaagatatcatcggcttggattgtagtaatgcgccactcatctctgcacgtagtggattaaacgttgataaagttttagaacaaattgtntctcanatccctgcnccaaatggagatgaaaacgcancactacaagcnttagtattngactcnttctatgacccataccgtggaatcatcgcattaattcgtatccgtgagggtagtctttcggtcggtgataagattcgctttatggcaacaggngcagaatatgaagtactagaggntggtattcgtaatccacgtgaagtaaagatgaatacnttaatgtgtggngacgtaggttggtttgcggcttcnatcaagtccatccaagatgtacgtgttggtgatacngtaacgaaagtaganaatccagcagagaaacctttatctggatatcgnaagttaaacccaatggtatattgtggtctatatccaacagatgcggcaaagtatggtgacttacgtgaagcgttagataaactncagttaaatgacgcatccttgcaatatgaaccaganacatcccaagcattaggctttggttatcgttgtggattcttaggncttctacatatggatgttatccaggaacgtttngaaagagantataacctcgatctaatcgcaactgcaccatctgttatctatcatgtctacctaacggatggntcaatgattgaaattgataaccctgcaagaatgccagatgcggctagaattgaccgtgtcgaagagccatatgtaaaagcaagtattatggtacctgacacatatatcggtgccatcatggacttatgcc

SEQ ID NO: 537 - DNA, 4000 bp, Escherichia coli
  misc_feature (91)..(91): n is a, c, g, or t
  misc_feature (156)..(156): n is a, c, g, or t
  misc_feature (175)..(175): n is a, c, g, or t
  misc_feature (232)..(232): n is a, c, g, or t
  misc_feature (601)..(601): n is a, c, g, or t
  misc_feature (652)..(652): n is a, c, g, or t
  misc_feature (819)..(819): n is a, c, g, or t
  misc_feature (914)..(915): n is a, c, g, or t
  misc_feature (919)..(919): n is a, c, g, or t
  misc_feature (949)..(949): n is a, c, g, or t
  misc_feature (1212)..(1212): n is a, c, g, or t
  misc_feature (1218)..(1218): n is a, c, g, or t
  misc_feature (1226)..(1226): n is a, c, g, or t
  misc_feature (1280)..(1280): n is a, c, g, or t
  misc_feature (1283)..(1283): n is a, c, g, or t
  misc_feature (1290)..(1290): n is a, c, g, or t
  misc_feature (1295)..(1295): n is a, c, g, or t
  misc_feature (1321)..(1321): n is a, c, g, or t
  misc_feature (1339)..(1339): n is a, c, g, or t
  misc_feature (1410)..(1410): n is a, c, g, or t
  misc_feature (1413)..(1413): n is a, c, g, or t
  misc_feature (1464)..(1464): n is a, c, g, or t
  misc_feature (1483)..(1483): n is a, c, g, or t
  misc_feature (1488)..(1488): n is a, c, g, or t
  misc_feature (1517)..(1517): n is a, c, g, or t
  misc_feature (1616)..(1616): n is a, c, g, or t
  misc_feature (1945)..(1945): n is a, c, g, or t
  misc_feature (1957)..(1957): n is a, c, g, or t
  misc_feature (1985)..(1985): n is a, c, g, or t
  misc_feature (1992)..(1992): n is a, c, g, or t
  misc_feature (2027)..(2027): n is a, c, g, or t
  misc_feature (2188)..(2188): n is a, c, g, or t
  misc_feature (2190)..(2190): n is a, c, g, or t
  misc_feature (2192)..(2192): n is a, c, g, or t
  misc_feature (2195)..(2196): n is a, c, g, or t
  misc_feature (2198)..(2198): n is a, c, g, or t
  misc_feature (2532)..(2532): n is a, c, g, or t
  misc_feature (2700)..(2700): n is a, c, g, or t
  misc_feature (3662)..(3662): n is a, c, g, or t
  misc_feature (3929)..(3929): n is a, c, g, or t
gactttcatcatatttacttcggcagtctttgctttatccaaataattttttcaagcataaacagcattagtcttagcaatatttaaaatnttttctttttttcctttaactggatgtaaaaatttaaccgttggaaataataattttaaatcagnaatttctatttctttaggnaagtaaatttcttttggtaaagtatttttattataaagttgagtacaataatttcgnacaaaatcttgaatatccaaaaaattattaacactaacattttcatcttttgcttgcaatttaccattacgataaaataaagtaacaatactaattaaatcatcttcttttaaataattaataaaatcacgatcaccaaaatcttggaactcaactacttgttgtgataaaaataaatcaatcttttctaataaaatcttaatccgattagctgcttcatattgtaagttttctgaactaatattcatactattttgtaattgttttttaatatcagtaacattacctttgaaaaattgattgattttattaatttgattttgataataacttcaaggaacttctttaaaacaagcacccgaacattgncctaaatgataatacaaacaaggtttacctaaattaccagcacatcttcgnaatggaaaaattctttctaataattttaaaacttcccttgctcctgtgccatcaggaaatggtccgtaataaatcccttgatctttacttgctcgacgaacataacgatattgtggatctttttcatttgtaatttgaatataaggatatcttttatcatcagctancaaaatattatattttggatgatattttttaattaaagtttgttctaaaatcaaagcttctttttcattgtttgttgcaataaaatcaatatcannaatntcatttactaattgcattgttttaaaattncctactttagtaaaataactattaactcttttttttaatgattttgcttttccaacataaattaattgctgatttttatctttatacaaataacaaccagaaacatttggtaaattcttaacttgttcaagcaacatttgttttttttccattattcaccaagcaattaattttgattcttttaataattatattatataattttctcaaaataaccgaataaaaagcaaaaaacaattgtatttcaacaataattggtactnctattnttcttacnattgcagggatttttaataataagttctgctatattattattttatagtaatantgnaaaagantgctnattaggtataatgggaattattcctngtgtaaaatgagggagcnattaaaagtgacagaaaaatttcaaaaaccttttaataaacaatataaagaagttagaattgctagtcganttngaattggtgctggaattgtatttcttttaattgcaataactcaaatgactnccaatgcaattgatcctcncagtntcgtttgcttagtttttagtattttgttnttattttatagttcaattttatcccttttatattgaaaatgtgctcaataccaaaaaaagcaacaagaaattccaaaatcatttcgcattattactggnttacttttaatcctttatttaactttttatcaacttgatcaaaaaaaatatcgttcctatcttattttaaaagaatgaaaatttcatattttattatgattattttgtggtgctattattgtcttatctaatctttataataccattcataatggaaaaatattttgaatgttaatatctttattaattgcaacgatagtttttattattaatttaagtctaatgatttcaatttgaaagtatcaaggaactaataataaactttttattttcttaacaatcttgacactaaattatcgcaattatcgtttttacaaagaaataattanacttaatcaaancaaagaaactatttaaaagccttctagnttattcntagaaggctttaattatttttttagtttcaatcangtttttaactcttattaaatttcttattccacttcatctggtgttatttcaaccttttgtgtgacatctttttgaacttgaccaaatggcgttaaattaccactttcctttaaaacattttggattaatagttgttgattttctgattttttcgatgatgnantnganntnttaattggtggctcatctttaatttctttaactttaatttcagttgtcttttgtacttgagtttttgttactttaggactaggcttttgtgctactcgctcttgtggtaatgatttttggctaattttttcaactttttgtttttggaaataattaactaatggcttaacaaaaaagaataaaattgttgtaaagaaaaatcaaggtttattaaaaaataatcatgaaaaactaattacaagtaacaagaaatttaaaattaaattagtaataaaagttccataactagtaattacaagtaaacaattactaataattcctcccgctgcaaaantaggaaaaaaactattaacactagttcaatcattaaaagcaattggtcgaccaaaaaacccatgataatttttaataatagtactttgtcatcaattattaaagtaattattaaaactagtaaaattataagaatgaaaactaagtcaaattttatgatttgatatcncaattaaattaatattattaacaagtcaagaaaccgcaattaaactaaaaatcattgcaaaaacaaatgaaaatctaatcttaaaataataattaaaacaaattggaattgtcaaaccaaacaagattaagtaaactaaatacttacttcaaccaaataaaaataggaaaataaaatcatcaaataatttaccaacagcaaataaacggaaaaaactaacaaataaaaaaattagaaacaataaactaaaaaataataccgcaatttcatcaccacgaattttaagttttttaattttaattggttctaactttttcgactttttcataactcaccctaaagattaaatctcattaataactggtaaaatcattggaatcttgccagtctcttttttcataaagtcttgcaactcaatcttgattcgattctttatttctattgtactaaaattattactcttttgtgctttttcgactatattgataataatattttgaatattttttaacattgcttcattatttaccaaataaacaacaccacgcatttgtgcatcaatcaatgaagtaatttgttttgtttttcggtcaattgttaaaccagtaattaaaacaccatcactcattaatcttcgtctttcttcaataacaattgctccaatatcaccaacaccaataccatcaacataaatatcaccagtattaacaacatttggattatctttattacgattagaattatgatgactaacatcagataaaacgccattattaaatgtcacaatctcaccattatcttgaattagagcattattatgaattactccagcttcaattgcagcatttctagcactatttaaatctttatataaacctttaactggtaagaaatattttggttctaacatattagttaataacttaatgtcttcataagatgcttgtaaacttcaagcttgnttctcagaaatactaattactttaacatcagttcgtgccaattcatctaaaactccagcatgtgctaattcatttcccggaattggtggtgttgccaaaataacagtatcatcaggcaataaatttaattcatcatcactatttgtagcaattttattcattttggcaaataatcgttcaccactacctgtgacaataatgacattatctttgctttttgttgctgcttgtaaaggaataattctaattttatttttatcaggatcnttaagattaaaagtaacattaaatcctttaagatttatttttgtttgtgttttatcattattcaatgccat

SEQ ID NO: 538 - DNA, 4000 bp, Escherichia coli
  misc_feature (777)..(777): n is a, c, g, or t
  misc_feature (837)..(837): n is a, c, g, or t
  misc_feature (849)..(849): n is a, c, g, or t
  misc_feature (969)..(969): n is a, c, g, or t
  misc_feature (1296)..(1296): n is a, c, g, or t
  misc_feature (1721)..(1721): n is a, c, g, or t
  misc_feature (1862)..(1862): n is a, c, g, or t
  misc_feature (1985)..(1985): n is a, c, g, or t
  misc_feature (1988)..(1988): n is a, c, g, or t
  misc_feature (2148)..(2148): n is a, c, g, or t
  misc_feature (2189)..(2189): n is a, c, g, or t
  misc_feature (2192)..(2192): n is a, c, g, or t
  misc_feature (2225)..(2226): n is a, c, g, or t
  misc_feature (2267)..(2267): n is a, c, g, or t
  misc_feature (2342)..(2342): n is a, c, g, or t
  misc_feature (2495)..(2495): n is a, c, g, or t
  misc_feature (2549)..(2549): n is a, c, g, or t
  misc_feature (2588)..(2588): n is a, c, g, or t
  misc_feature (2660)..(2660): n is a, c, g, or t
  misc_feature (2702)..(2702): n is a, c, g, or t
  misc_feature (2769)..(2769): n is a, c, g, or t
  misc_feature (2772)..(2772): n is a, c, g, or t
  misc_feature (2933)..(2933): n is a, c, g, or t
  misc_feature (3458)..(3458): n is a, c, g, or t
  misc_feature (3491)..(3491): n is a, c, g, or t
  misc_feature (3509)..(3509): n is a, c, g, or t
  misc_feature (3682)..(3684): n is a, c, g, or t
  misc_feature (3687)..(3687): n is a, c, g, or t
  misc_feature (3689)..(3689): n is a, c, g, or t
  misc_feature (3691)..(3691): n is a, c, g, or t
  misc_feature (3693)..(3693): n is a, c, g, or t
  misc_feature (3695)..(3695): n is a, c, g, or t
  misc_feature (3697)..(3698): n is a, c, g, or t
  misc_feature (3702)..(3703): n is a, c, g, or t
  misc_feature (3707)..(3708): n is a, c, g, or t
  misc_feature (3710)..(3710): n is a, c, g, or t
  misc_feature (3712)..(3715): n is a, c, g, or t
  misc_feature (3717)..(3718): n is a, c, g, or t
  misc_feature (3720)..(3723): n is a, c, g, or t
  misc_feature (3725)..(3725): n is a, c, g, or t
  misc_feature (3727)..(3738): n is a, c, g, or t
  misc_feature (3741)..(3744): n is a, c, g, or t
  misc_feature (3746)..(3754): n is a, c, g, or t
  misc_feature (3756)..(3756): n is a, c, g, or t
  misc_feature (3758)..(3764): n is a, c, g, or t
  misc_feature (3766)..(3768): n is a, c, g, or t
  misc_feature (3770)..(3776): n is a, c, g, or t
  misc_feature (3778)..(3779): n is a, c, g, or t
  misc_feature (3781)..(3782): n is a, c, g, or t
  misc_feature (3786)..(3786): n is a, c, g, or t
  misc_feature (3788)..(3788): n is a, c, g, or t
  misc_feature (3792)..(3798): n is a, c, g, or t
  misc_feature (3800)..(3808): n is a, c, g, or t
  misc_feature (3810)..(3812): n is a, c, g, or t
  misc_feature (3814)..(3817): n is a, c, g, or t
  misc_feature (3819)..(3820): n is a, c, g, or t
  misc_feature (3822)..(3823): n is a, c, g, or t
  misc_feature (3825)..(3826): n is a, c, g, or t
  misc_feature (3828)..(3832): n is a, c, g, or t
  misc_feature (3834)..(3840): n is a, c, g, or t
  misc_feature (3843)..(3846): n is a, c, g, or t
  misc_feature (3848)..(3863): n is a, c, g, or t
  misc_feature (3865)..(3902): n is a, c, g, or t
  misc_feature (3904)..(3929): n is a, c, g, or t
  misc_feature (3931)..(3941): n is a, c, g, or t
  misc_feature (3943)..(3949): n is a, c, g, or t
  misc_feature (3951)..(3969): n is a, c, g, or t
  misc_feature (3971)..(3976): n is a, c, g, or t
  misc_feature (3978)..(3990): n is a, c, g, or t
  misc_feature (3993)..(3996): n is a, c, g, or t
  misc_feature (3998)..(4000): n is a, c, g, or t
gctgttactgttcttctcagtgactttgttatacatattagtctgtaagtacgtgatgcctatacctgtttctgtgacagggaacacggttcaagagatcaatgacgctgaggctgtcttatccgatcaacaaaagatggccgagcagatgaaggctctcaagaccgatatcgactcccttaactttgatattcagcagacgcaacgtatcggagagataaaggacaggatgtcgcagttacagaacaattacagacaacactcctacaatacgaagtatctatattgtatgcaggccttcaagaccattcaagcctactttgacatcaagcagaacttgtattgggcatcgaagaccaaagaggatagaaagcgtattctggaagaactaaagactcaaattcaataaatataattatgactgaaagacaaaaaatcattttggcaatcgtctcgggcttggctattgtggggcttgtgattgctttgctgcttccttcaaggacggtagacaagaatctggatttctatatccaagatcagaatgtgaacaatcagttggaagtaaatgagccactgaaattcattgttaacgactcgtctgccgttgtggataagcgagttctatggaagatgggtaatggggatagtattgttggtaatcctaatatcagctatacctatcatcaagcgggccgatacctcatcaccttgcaggttgatggtaaggttgtcaaggagaagacgattgatgttgtcaagctcacaaaggacacngtggccgttgactcagtccctaagattgtcggaccaaagcagggtttcgtaggcgaaagncttgtcttctcngctgatggcgatggtatgacaagttggttatgggagtttggcgagagcggaacgattgacgccttcgaacgtcaggtcgtttataagtatgataaaccaggtaaatacctcgtgaagctnaagactaacaccacactctaccctgtttctcaggttgttaccatccttgataaggtagacgcagtgcctgctgacatgggagaagaggaacaggctgaaccgcaagaacctattgacacgttggcattggtgcagaacgacattaaacgccgcctacaggcaatagccaatgcaggcgcaagagaccaagaggcagtgcgctctaacatgggttatatcaatgatacctacctcagaggcaatggtggaagggtgattgtacaggtgaatggcgaacgctataacctattccctgactactgtcaaggccttcattatctggaaagnaaccgttatagtcgtgtcagcatagatgatgttaaggtggatgacttccatcgtattactaaaatagaagtaactcaaagaaatataggaaaatgaagaaaggatttataaagacgttatatgggttgtctggacttgtcttctgccttgctttaccgcaatgtctcactgctcaagtggctcggtatgacaagacgaagaccgttggtcataccagtttcaattacccagtgggtggagcaggggctcaacaggttcgtgataataacgatattcatatcgtattctccgacagaagccataataaagcatacgctgaaccctacgcacagcgtgtgttaagcgagcagaagatgggctctcctttctatgtcatcggtgagaagaatggttattataaggtggttgcagccaaccaagagctncttggacagcctaagggactctttgcacccctttacagtggccgtactcactttaaggatgctaagaagtcgcctttcgtaggctggattgacaagaatgcggtcttggagttcaatcattcttttgtgtcaaaagacaanaacttcccgcttcgctatcgtgttggtgctacaagggctgcacgcttgtccgaccttaagacgttcttcacaaaggactcgctcaatctctataacgaccccttcttccttgagaagaccaanggnaagttggtagatgggcaaatcgtctatgcttataagtatgatgtcagccgacaggccgtacttgttgcggaccgtccagcactgtctgattccttgcgaacagtcttgggatgggtgccatccgacctcattgcgatggtaggacagaaccgtgttttcntgctcgactcgccttatcctgtctttggcaactatcagctnggntctaacctgctcttcacttctgacggcaactanntgggcaactatgaagacccacgtgttgctatcaatatgccnctcgctctttgggacagaaagaagtcgatgatggttaatgctaagggtgaggatgtgtcggttgccgacctcgancagctgattgagaacagtaagaagatgaatatccatctgatattctatagtcaagaccgcatgcaggtgcgcaacttgctcaatgccttacagggcttggagggtaagtttggcaaggccagtcaggtcagattttctgctacagccgtgtcngataagggcaacaaacaccttgcgttgacatccgactttggtagttggattganttcttggctaatgcaacagcacccaacacgctccctgtntctggtggcgcaggtttccatgctgccatgaacaagatattctctgagactccttatactaagttcgagaanaatgtgtttatcatcttgggtacagatgagttccctacgttnacttctgagattaacgcagagatgtacacacgttctgctaccttgttcttagcgcagatgcttggtngantgacgccttcttaccagagcttcatactacagtcaaagaccttgttagacaataacacctctgagtatatgagttatgcgaaggactatctatgtgcttctgactggtcgaagggtggcttgtttaccgatatcagtactgagagcgagaacgctttcgtnttggatgcaccgaagaacggcattgtgacgggtggtttcgtctatcctcgtcttgatacagagctgacgaacactggctttgcaagggtcctcgactctctcttcgtacgtattgatgagcgcaaccagaaactggtagcggtctctaccgacgctgagaaccaatacggtgcactgcgtgctatcccaacacaagagatggttaacaccactaaagatgctggtgttcctgttgagagcatagagaagaacaacatcaacgacctctatttcaaggagatgttaatctctcctatggagttgtcaacctacgatgagggttatctctttgatgctgttgagttgaaaaacctccttgaaggctatcgcgccctcatgccttatttccatgccgactctctttctaatcagcaactgtttgagttgagaaggaactttaagctgcagagcgacttagtcaaccgtctttcttaccgcacagtactgaagaataagtcgtctatctcgtctgtcttctatcatcgnttgagtgtcccaagctctgacgtattgaataanatcgtacgagtaaagganatcacacgtaagaaatgtgatgagagtaaatgggaggcagcctataaggagatgcttgacaggctcgtcgaccttgagagtcgcttcaagtctggccgcttaaggaccgtccttgtggctggtaagacttattactttgtgccgattaaggaggttccttaatcggatagggnnnggngntngngntnngtanngggnngncnnnntnngnnnncngnnnnnnnnnnnnccnnnngnnnnnnnnngngnnnnnnncnnntnnnnnnngnngnngggnangggnnnnnnncnnnnnnnnngnnngnnnntnngnntnncnnnnntnnnnnnnttnnnngnnnnnnnnnnnnnnnntnnnnnnnnnnnnnnnnnnnnnnnnnnnnnnnnnnnnnncnnnnnnnnnnnnnnnnnnnnnnnnnnannnnnnnnnnnannnnnnngnnnnnnnnnnnnnnnnnnncnnnnnntnnnnnnnnnnnnngtnnnnannn

SEQ ID NO: 539 - DNA, 4000 bp, Escherichia coli
  misc_feature (1925)..(1925): n is a, c, g, or t
  misc_feature (1934)..(1934): n is a, c, g, or t
  misc_feature (1939)..(1939): n is a, c, g, or t
  misc_feature (1942)..(1943): n is a, c, g, or t
  misc_feature (1964)..(1964): n is a, c, g, or t
  misc_feature (1972)..(1973): n is a, c, g, or t
  misc_feature (1976)..(1976): n is a, c, g, or t
  misc_feature (1984)..(1984): n is a, c, g, or t
  misc_feature (1990)..(1991): n is a, c, g, or t
  misc_feature (1993)..(1993): n is a, c, g, or t
  misc_feature (1997)..(1997): n is a, c, g, or t
  misc_feature (1999)..(1999): n is a, c, g, or t
  misc_feature (2379)..(2381): n is a, c, g, or t
  misc_feature (2384)..(2384): n is a, c, g, or t
  misc_feature (2386)..(2386): n is a, c, g, or t
  misc_feature (2389)..(2389): n is a, c, g, or t
  misc_feature (2391)..(2391): n is a, c, g, or t
  misc_feature (2395)..(2396): n is a, c, g, or t
  misc_feature (2400)..(2400): n is a, c, g, or t
  misc_feature (2402)..(2402): n is a, c, g, or t
  misc_feature (2407)..(2407): n is a, c, g, or t
  misc_feature (2412)..(2412): n is a, c, g, or t
  misc_feature (2415)..(2415): n is a, c, g, or t
  misc_feature (2417)..(2417): n is a, c, g, or t
  misc_feature (2419)..(2419): n is a, c, g, or t
  misc_feature (2422)..(2422): n is a, c, g, or t
  misc_feature (2424)..(2424): n is a, c, g, or t
  misc_feature (2427)..(2434): n is a, c, g, or t
  misc_feature (2436)..(2436): n is a, c, g, or t
  misc_feature (2438)..(2439): n is a, c, g, or t
  misc_feature (2441)..(2444): n is a, c, g, or t
  misc_feature (2446)..(2446): n is a, c, g, or t
  misc_feature (2448)..(2451): n is a, c, g, or t
  misc_feature (2454)..(2455): n is a, c, g, or t
  misc_feature (2458)..(2459): n is a, c, g, or t
  misc_feature (2461)..(2463): n is a, c, g, or t
  misc_feature (2466)..(2468): n is a, c, g, or t
  misc_feature (2470)..(2471): n is a, c, g, or t
  misc_feature (2475)..(2484): n is a, c, g, or t
  misc_feature (2487)..(2488): n is a, c, g, or t
  misc_feature (2491)..(2492): n is a, c, g, or t
  misc_feature (2497)..(2498): n is a, c, g, or t
  misc_feature (2500)..(2502): n is a, c, g, or t
  misc_feature (2504)..(2504): n is a, c, g, or t
  misc_feature (2507)..(2507): n is a, c, g, or t
  misc_feature (2510)..(2511): n is a, c, g, or t
  misc_feature (2514)..(2514): n is a, c, g, or t
  misc_feature (2516)..(2516): n is a, c, g, or t
  misc_feature (2519)..(2519): n is a, c, g, or t
  misc_feature (2522)..(2525): n is a, c, g, or t
  misc_feature (2530)..(2534): n is a, c, g, or t
  misc_feature (2536)..(2536): n is a, c, g, or t
  misc_feature (2539)..(2539): n is a, c, g, or t
  misc_feature (2543)..(2543): n is a, c, g, or t
  misc_feature (2548)..(2552): n is a, c, g, or t
  misc_feature (2554)..(2554): n is a, c, g, or t
  misc_feature (2556)..(2564): n is a, c, g, or t
  misc_feature (2566)..(2568): n is a, c, g, or t
  misc_feature (2570)..(2571): n is a, c, g, or t
  misc_feature (2575)..(2575): n is a, c, g, or t
  misc_feature (2578)..(2579): n is a, c, g, or t
  misc_feature (2583)..(2585): n is a, c, g, or t
  misc_feature (2588)..(2589): n is a, c, g, or t
  misc_feature (2598)..(2598): n is a, c, g, or t
  misc_feature (2600)..(2600): n is a, c, g, or t
  misc_feature (2603)..(2603): n is a, c, g, or t
  misc_feature (2605)..(2605): n is a, c, g, or t
  misc_feature (2608)..(2608): n is a, c, g, or t
  misc_feature (2612)..(2614): n is a, c, g, or t
  misc_feature (2616)..(2616): n is a, c, g, or t
  misc_feature (2621)..(2621): n is a, c, g, or t
  misc_feature (2625)..(2627): n is a, c, g, or t
  misc_feature (2630)..(2633): n is a, c, g, or t
  misc_feature (2636)..(2637): n is a, c, g, or t
  misc_feature (2639)..(2640): n is a, c, g, or t
  misc_feature (2644)..(2644): n is a, c, g, or t
  misc_feature (2647)..(2647): n is a, c, g, or t
  misc_feature (2649)..(2649): n is a, c, g, or t
  misc_feature (2653)..(2653): n is a, c, g, or t
  misc_feature (2655)..(2664): n is a, c, g, or t
  misc_feature (2666)..(2667): n is a, c, g, or t
  misc_feature (2673)..(2673): n is a, c, g, or t
  misc_feature (2675)..(2677): n is a, c, g, or t
  misc_feature (2682)..(2683): n is a, c, g, or t
  misc_feature (2686)..(2686): n is a, c, g, or t
  misc_feature (2690)..(2691): n is a, c, g, or t
  misc_feature (2694)..(2695): n is a, c, g, or t
  misc_feature (2698)..(2698): n is a, c, g, or t
  misc_feature (2700)..(2700): n is a, c, g, or t
  misc_feature (2702)..(2703): n is a, c, g, or t
  misc_feature (2705)..(2711): n is a, c, g, or t
  misc_feature (2716)..(2717): n is a, c, g, or t
  misc_feature (2719)..(2720): n is a, c, g, or t
  misc_feature (2722)..(2724): n is a, c, g, or t
  misc_feature (2726)..(2734): n is a, c, g, or t
  misc_feature (2737)..(2737): n is a, c, g, or t
  misc_feature (2740)..(2740): n is a, c, g, or t
  misc_feature (2743)..(2743): n is a, c, g, or t
  misc_feature (2751)..(2753): n is a, c, g, or t
  misc_feature (2756)..(2757): n is a, c, g, or t
  misc_feature (2759)..(2759): n is a, c, g, or t
  misc_feature (2761)..(2762): n is a, c, g, or t
  misc_feature (2764)..(2766): n is a, c, g, or t
  misc_feature (2769)..(2772): n is a, c, g, or t
  misc_feature (2774)..(2778): n is a, c, g, or t
  misc_feature (2785)..(2785): n is a, c, g, or t
  misc_feature (2787)..(2788): n is a, c, g, or t
  misc_feature (2790)..(2791): n is a, c, g, or t
  misc_feature (2793)..(2795): n is a, c, g, or t
  misc_feature (2799)..(2800): n is a, c, g, or t
  misc_feature (2804)..(2804): n is a, c, g, or t
  misc_feature (2806)..(2808): n is a, c, g, or t
  misc_feature (2812)..(2812): n is a, c, g, or t
  misc_feature (2814)..(2815): n is a, c, g, or t
  misc_feature (2817)..(2818): n is a, c, g, or t
  misc_feature (2820)..(2821): n is a, c, g, or t
  misc_feature (2823)..(2827): n is a, c, g, or t
  misc_feature (2829)..(2830): n is a, c, g, or t
  misc_feature (2832)..(2833): n is a, c, g, or t
  misc_feature (2836)..(2842): n is a, c, g, or t
  misc_feature (2844)..(2844): n is a, c, g, or t
  misc_feature (2851)..(2851): n is a, c, g, or t
  misc_feature (2853)..(2854): n is a, c, g, or t
  misc_feature (2858)..(2858): n is a, c, g, or t
  misc_feature (2863)..(2863): n is a, c, g, or t
  misc_feature (2865)..(2869): n is a, c, g, or t
  misc_feature (2871)..(2875): n is a, c, g, or t
  misc_feature (2879)..(2879): n is a, c, g, or t
  misc_feature (2881)..(2881): n is a, c, g, or t
  misc_feature (2883)..(2883): n is a, c, g, or t
  misc_feature (2885)..(2886): n is a, c, g, or t
  misc_feature (2889)..(2891): n is a, c, g, or t
  misc_feature (2895)..(2898): n is a, c, g, or t
  misc_feature (2901)..(2901): n is a, c, g, or t
  misc_feature (2903)..(2907): n is a, c, g, or t
  misc_feature (2909)..(2909): n is a, c, g, or t
  misc_feature (2912)..(2912): n is a, c, g, or t
  misc_feature (2915)..(2916): n is a, c, g, or t
  misc_feature (2918)..(2918): n is a, c, g, or t
  misc_feature (2920)..(2921): n is a, c, g, or t
  misc_feature (2926)..(2927): n is a, c, g, or t
  misc_feature (2931)..(2931): n is a, c, g, or t
  misc_feature (2933)..(2935): n is a, c, g, or t
  misc_feature (2938)..(2940): n is a, c, g, or t
  misc_feature (2944)..(2945): n is a, c, g, or t
  misc_feature (2947)..(2948): n is a, c, g, or t
  misc_feature (2953)..(2955): n is a, c, g, or t
  misc_feature (2957)..(2957): n is a, c, g, or t
  misc_feature (2960)..(2960): n is a, c, g, or t
  misc_feature (2962)..(2963): n is a, c, g, or t
  misc_feature (2969)..(2970): n is a, c, g, or t
  misc_feature (2973)..(2977): n is a, c, g, or t
  misc_feature (2979)..(2981): n is a, c, g, or t
  misc_feature (2984)..(2984): n is a, c, g, or t
  misc_feature (2986)..(2992): n is a, c, g, or t
  misc_feature (2994)..(2994): n is a, c, g, or t
  misc_feature (2996)..(2996): n is a, c, g, or t
  misc_feature (2998)..(2998): n is a, c, g, or t
  misc_feature (3003)..(3003): n is a, c, g, or t
  misc_feature (3005)..(3005): n is a, c, g, or t
  misc_feature (3007)..(3007): n is a, c, g, or t
  misc_feature (3010)..(3011): n is a, c, g, or t
  misc_feature (3013)..(3016): n is a, c, g, or t
  misc_feature (3018)..(3019): n is a, c, g, or t
  misc_feature (3021)..(3025): n is a, c, g, or t
  misc_feature (3028)..(3028): n is a, c, g, or t
  misc_feature (3031)..(3031): n is a, c, g, or t
  misc_feature (3033)..(3034): n is a, c, g, or t
  misc_feature (3036)..(3039): n is a, c, g, or t
  misc_feature (3041)..(3041): n is a, c, g, or t
  misc_feature (3043)..(3043): n is a, c, g, or t
  misc_feature (3046)..(3046): n is a, c, g, or t
  misc_feature (3048)..(3048): n is a, c, g, or t
  misc_feature (3051)..(3052): n is a, c, g, or t
  misc_feature (3055)..(3055): n is a, c, g, or t
  misc_feature (3057)..(3057): n is a, c, g, or t
  misc_feature (3060)..(3060): n is a, c, g, or t
  misc_feature (3062)..(3062): n is a, c, g, or t
  misc_feature (3066)..(3069): n is a, c, g, or t
  misc_feature (3074)..(3075): n is a, c, g, or t
  misc_feature (3078)..(3078): n is a, c, g, or t
  misc_feature (3080)..(3080): n is a, c, g, or t
  misc_feature (3082)..(3084): n is a, c, g, or t
  misc_feature (3087)..(3087): n is a, c, g, or t
  misc_feature (3089)..(3090): n is a, c, g, or t
  misc_feature (3094)..(3094): n is a, c, g, or t
  misc_feature (3097)..(3100): n is a, c, g, or t
  misc_feature (3104)..(3104): n is a, c, g, or t
  misc_feature (3106)..(3111): n is a, c, g, or t
  misc_feature (3113)..(3113): n is a, c, g, or t
  misc_feature (3115)..(3115): n is a, c, g, or t
  misc_feature (3117)..(3117): n is a, c, g, or t
  misc_feature (3119)..(3120): n is a, c, g, or t
  misc_feature (3122)..(3125): n is a, c, g, or t
  misc_feature (3127)..(3127): n is a, c, g, or t
  misc_feature (3129)..(3129): n is a, c, g, or t
  misc_feature (3131)..(3133): n is a, c, g, or t
  misc_feature (3135)..(3138): n is a, c, g, or t
  misc_feature (3140)..(3141): n is a, c, g, or t
  misc_feature (3143)..(3143): n is a, c, g, or t
  misc_feature (3145)..(3147): n is a, c, g, or t
  misc_feature (3149)..(3149): n is a, c, g, or t
  misc_feature (3152)..(3152): n is a, c, g, or t
  misc_feature (3155)..(3155): n is a, c, g, or t
  misc_feature (3161)..(3161): n is a, c, g, or t
  misc_feature (3163)..(3163): n is a, c, g, or t
  misc_feature (3169)..(3169): n is a, c, g, or t
  misc_feature (3172)..(3173): n is a, c, g, or t
  misc_feature (3176)..(3176): n is a, c, g, or t
  misc_feature (3178)..(3182): n is a, c, g, or t
  misc_feature (3184)..(3187): n is a, c, g, or t
  misc_feature (3189)..(3191): n is a, c, g, or t
  misc_feature (3193)..(3199): n is a, c, g, or t
  misc_feature (3201)..(3201): n is a, c, g, or t
  misc_feature (3203)..(3204): n is a, c, g, or t
  misc_feature (3207)..(3207): n is a, c, g, or t
  misc_feature (3209)..(3211): n is a, c, g, or t
  misc_feature (3215)..(3215): n is a, c, g, or t
  misc_feature (3217)..(3217): n is a, c, g, or t
  misc_feature (3221)..(3222): n is a, c, g, or t
  misc_feature (3225)..(3229): n is a, c, g, or t
  misc_feature (3231)..(3231): n is a, c, g, or t
  misc_feature (3234)..(3236): n is a, c, g, or t
  misc_feature (3239)..(3239): n is a, c, g, or t
  misc_feature (3241)..(3243): n is a, c, g, or t
  misc_feature (3245)..(3247): n is a, c, g, or t
  misc_feature (3249)..(3249): n is a, c, g, or t
  misc_feature (3252)..(3255): n is a, c, g, or t
  misc_feature (3258)..(3258): n is a, c, g, or t
  misc_feature (3260)..(3261): n is a, c, g, or t
  misc_feature (3265)..(3267): n is a, c, g, or t
  misc_feature (3269)..(3269): n is a, c, g, or t
  misc_feature (3271)..(3271): n is a, c, g, or t
  misc_feature (3275)..(3277): n is a, c, g, or t
  misc_feature (3279)..(3279): n is a, c, g, or t
  misc_feature (3281)..(3281): n is a, c, g, or t
  misc_feature (3283)..(3283): n is a, c, g, or t
  misc_feature (3285)..(3286): n is a, c, g, or t
  misc_feature (3289)..(3298): n is a, c, g, or t
  misc_feature (3300)..(3300): n is a, c, g, or t
  misc_feature (3302)..(3305): n is a, c, g, or t
  misc_feature (3308)..(3308): n is a, c, g, or t
  misc_feature (3310)..(3313): n is a, c, g, or t
  misc_feature (3315)..(3316): n is a, c, g, or t
  misc_feature (3319)..(3319): n is a, c, g, or t
  misc_feature (3321)..(3322): n is a, c, g, or t
  misc_feature (3325)..(3327): n is a, c, g, or t
  misc_feature (3329)..(3330): n is a, c, g, or t
  misc_feature (3332)..(3334): n is a, c, g, or t
  misc_feature (3337)..(3337): n is a, c, g, or t
  misc_feature (3339)..(3342): n is a, c, g, or t
  misc_feature (3344)..(3346): n is a, c, g, or t
  misc_feature (3351)..(3357): n is a, c, g, or t
  misc_feature (3359)..(3359): n is a, c, g, or t
  misc_feature (3364)..(3366): n is a, c, g, or t
  misc_feature (3369)..(3369): n is a, c, g, or t
  misc_feature (3371)..(3371): n is a, c, g, or t
  misc_feature (3374)..(3374): n is a, c, g, or t
  misc_feature (3376)..(3378): n is a, c, g, or t
  misc_feature (3380)..(3386): n is a, c, g, or t
  misc_feature (3388)..(3390): n is a, c, g, or t
  misc_feature (3392)..(3392): n is a, c, g, or t
  misc_feature (3394)..(3397): n is a, c, g, or t
  misc_feature (3399)..(3401): n is a, c, g, or t
  misc_feature (3403)..(3406): n is a, c, g, or t
  misc_feature (3408)..(3409): n is a, c, g, or t
  misc_feature (3411)..(3413): n is a, c, g, or t
  misc_feature (3415)..(3415): n is a, c, g, or t
  misc_feature (3417)..(3417): n is a, c, g, or t
  misc_feature (3419)..(3419): n is a, c, g, or t
  misc_feature (3423)..(3423): n is a, c, g, or t
  misc_feature (3425)..(3430): n is a, c, g, or t
  misc_feature (3432)..(3434): n is a, c, g, or t
  misc_feature (3437)..(3442): n is a, c, g, or t
  misc_feature (3444)..(3447): n is a, c, g, or t
  misc_feature (3449)..(3449): n is a, c, g, or t
  misc_feature (3451)..(3451): n is a, c, g, or t
  misc_feature (3453)..(3453): n is a, c, g, or t
  misc_feature (3456)..(3457): n is a, c, g, or t
  misc_feature (3460)..(3460): n is a, c, g, or t
  misc_feature (3463)..(3465): n is a, c, g, or t
  misc_feature (3468)..(3471): n is a, c, g, or t
  misc_feature (3476)..(3481): n is a, c, g, or t
  misc_feature (3483)..(3484): n is a, c, g, or t
  misc_feature (3486)..(3486): n is a, c, g, or t
  misc_feature (3489)..(3491): n is a, c, g, or t
  misc_feature (3494)..(3494): n is a, c, g, or t
  misc_feature (3497)..(3498): n is a, c, g, or t
  misc_feature (3502)..(3506): n is a, c, g, or t
  misc_feature (3510)..(3513): n is a, c, g, or t
  misc_feature (3515)..(3517): n is a, c, g, or t
  misc_feature (3519)..(3520): n is a, c, g, or t
  misc_feature (3523)..(3524): n is a, c, g, or t
  misc_feature (3528)..(3528): n is a, c, g, or t
  misc_feature (3531)..(3532): n is a, c, g, or t
  misc_feature (3534)..(3534): n is a, c, g, or t
  misc_feature (3538)..(3538): n is a, c, g, or t
  misc_feature (3541)..(3541): n is a, c, g, or t
  misc_feature (3544)..(3546): n is a, c, g, or t
  misc_feature (3548)..(3549): n is a, c, g, or t
  misc_feature (3551)..(3551): n is a, c, g, or t
  misc_feature (3555)..(3556): n is a, c, g, or t
  misc_feature (3558)..(3558): n is a, c, g, or t
  misc_feature (3561)..(3561): n is a, c, g, or t
  misc_feature (3563)..(3564): n is a, c, g, or t
  misc_feature (3567)..(3570): n is a, c, g, or t
  misc_feature (3572)..(3573): n is a, c, g, or t
  misc_feature (3576)..(3576): n is a, c, g, or t
  misc_feature (3581)..(3581): n is a, c, g, or t
  misc_feature (3583)..(3584): n is a, c, g, or t
  misc_feature (3587)..(3587): n is a, c, g, or t
  misc_feature (3590)..(3591): n is a, c, g, or t
  misc_feature (3593)..(3597): n is a, c, g, or t
  misc_feature (3599)..(3600): n is a, c, g, or t
  misc_feature (3603)..(3603): n is a, c, g, or t
  misc_feature (3605)..(3605): n is a, c, g, or t
  misc_feature (3608)..(3609): n is a, c, g, or t
  misc_feature (3612)..(3617): n is a, c, g, or t
  misc_feature (3619)..(3619): n is a, c, g, or t
  misc_feature (3621)..(3621): n is a, c, g, or t
  misc_feature (3623)..(3623): n is a, c, g, or t
  misc_feature (3625)..(3630): n is a, c, g, or t
  misc_feature (3632)..(3635): n is a, c, g, or t
  misc_feature (3637)..(3638): n is a, c, g, or t
  misc_feature (3643)..(3643): n is a, c, g, or t
  misc_feature (3645)..(3647): n is a, c, g, or t
  misc_feature (3650)..(3651): n is a, c, g, or t
  misc_feature (3653)..(3653): n is a, c, g, or t
  misc_feature (3656)..(3656): n is a, c, g, or t
  misc_feature (3658)..(3658): n is a, c, g, or t
  misc_feature (3660)..(3661): n is a, c, g, or t
  misc_feature (3664)..(3664): n is a, c, g, or t
  misc_feature (3667)..(3667): n is a, c, g, or t
  misc_feature (3670)..(3672): n is a, c, g, or t
  misc_feature (3675)..(3677): n is a, c, g, or t
  misc_feature (3679)..(3681): n is a, c, g, or t
  misc_feature (3683)..(3684): n is a, c, g, or t
  misc_feature (3686)..(3686): n is a, c, g, or t
  misc_feature (3688)..(3690): n is a, c, g, or t
  misc_feature (3692)..(3693): n is a, c, g, or t
  misc_feature (3696)..(3696): n is a, c, g, or t
  misc_feature (3698)..(3698): n is a, c, g, or t
  misc_feature (3703)..(3703): n is a, c, g, or t
  misc_feature (3705)..(3705): n is a, c, g, or t
  misc_feature (3707)..(3707): n is a, c, g, or t
  misc_feature (3711)..(3712): n is a, c, g, or t
  misc_feature (3714)..(3714): n is a, c, g, or t
  misc_feature (3717)..(3717): n is a, c, g, or t
  misc_feature (3719)..(3719): n is a, c, g, or t
  misc_feature (3722)..(3722): n is a, c, g, or t
  misc_feature (3726)..(3726): n is a, c, g, or t
  misc_feature (3729)..(3730): n is a, c, g, or t
  misc_feature (3732)..(3737): n is a, c, g, or t
  misc_feature (3739)..(3739): n is a, c, g, or t
  misc_feature (3741)..(3741): n is a, c, g, or t
  misc_feature (3745)..(3746): n is a, c, g, or t
  misc_feature (3749)..(3749): n is a, c, g, or t
  misc_feature (3751)..(3753): n is a, c, g, or t
  misc_feature (3755)..(3756): n is a, c, g, or t
  misc_feature (3762)..(3765): n is a, c, g, or t
  misc_feature (3767)..(3767): n is a, c, g, or t
  misc_feature (3770)..(3771): n is a, c, g, or t
  misc_feature (3773)..(3774): n is a, c, g, or t
  misc_feature (3776)..(3777): n is a, c, g, or t
  misc_feature (3779)..(3780): n is a, c, g, or t
  misc_feature (3782)..(3784): n is a, c, g, or t
  misc_feature (3787)..(3789): n is a, c, g, or t
  misc_feature (3791)..(3792): n is a, c, g, or t
  misc_feature (3794)..(3801): n is a, c, g, or t
  misc_feature (3806)..(3810): n is a, c, g, or t
  misc_feature (3812)..(3812): n is a, c, g, or t
  misc_feature (3814)..(3814): n is a, c, g, or t
  misc_feature (3816)..(3816): n is a, c, g, or t
  misc_feature (3819)..(3824): n is a, c, g, or t
  misc_feature (3827)..(3828): n is a, c, g, or t
  misc_feature (3831)..(3831): n is a, c, g, or t
  misc_feature (3834)..(3834): n is a, c, g, or t
  misc_feature (3838)..(3839): n is a, c, g, or t
  misc_feature (3843)..(3845): n is a, c, g, or t
  misc_feature (3848)..(3848): n is a, c, g, or t
  misc_feature (3850)..(3850): n is a, c, g, or t
  misc_feature (3852)..(3853): n is a, c, g, or t
  misc_feature (3855)..(3856): n is a, c, g, or t
  misc_feature (3858)..(3858): n is a, c, g, or t
  misc_feature (3860)..(3860): n is a, c, g, or t
  misc_feature (3866)..(3869): n is a, c, g, or t
  misc_feature (3871)..(3871): n is a, c, g, or t
  misc_feature (3873)..(3877): n is a, c, g, or t
  misc_feature (3879)..(3880): n is a, c, g, or t
  misc_feature (3882)..(3886): n is a, c, g, or t
  misc_feature (3888)..(3889): n is a, c, g, or t
  misc_feature (3893)..(3893): n is a, c, g, or t
  misc_feature (3895)..(3896): n is a, c, g, or t
  misc_feature (3898)..(3899): n is a, c, g, or t
  misc_feature (3904)..(3906): n is a, c, g, or t
  misc_feature (3908)..(3909): n is a, c, g, or t
  misc_feature (3912)..(3914): n is a, c, g, or t
  misc_feature (3916)..(3917): n is a, c, g, or t
  misc_feature (3921)..(3922): n is a, c, g, or t
  misc_feature (3929)..(3929): n is a, c, g, or t
  misc_feature (3931)..(3932): n is a, c, g, or t
  misc_feature (3937)..(3938): n is a, c, g, or t
  misc_feature (3940)..(3945): n is a, c, g, or t
  misc_feature (3947)..(3949): n is a, c, g, or t
  misc_feature (3952)..(3952): n is a, c, g, or t
  misc_feature (3955)..(3956): n is a, c, g, or t
  misc_feature (3958)..(3958): n is a, c, g, or t
  misc_feature (3960)..(3969): n is a, c, g, or t
  misc_feature (3971)..(3974): n is a, c, g, or t
  misc_feature (3976)..(3977): n is a, c, g, or t
  misc_feature (3979)..(3979): n is a, c, g, or t
  misc_feature (3981)..(3981): n is a, c, g, or t
  misc_feature (3984)..(3985): n is a, c, g, or t
  misc_feature (3987)..(3987): n is a, c, g, or t
  misc_feature (3989)..(3989): n is a, c, g, or t
  misc_feature (3991)..(3991): n is a, c, g, or t
  misc_feature (3994)..(3994): n is a, c, g, or t
  misc_feature (3996)..(3997): n is a, c, g, or t
  misc_feature (3999)..(3999): n is a, c, g, or t
atttcatcagtaatgccgtaaaaatagagtgctgataaaagacaaatgcagcaaggatcacctaaatgagtgagagctgaaatcatttcatcattcacgctttcttgggtatcagcttttctataaatcccacgctcaattttttgaatttttcccactctggccaaaagctttaggccataggcatcaatcccacactccttcgcctctttgctagaaaaagttgaatgagtgattttctttaagaattgaacatatcttttcatattttcaatatagcacaaatataatagtgtgctatattgaaaataaagattcccctgaattacccacaaaaaacaacaagttatcaactaaacaaaaataacaaaattaagcccttagaaacattccgtccgctctgcccacaaacctcgtcacttaacggggaaaaaatttccccacaaaagctaaagtattggaagtaaaagccgataaaaaccgtgggatataattatctaaacgaacccgactgcaatgttacgaggtgtaatgaaacggaacgaggctttatctattctactcttgctaccaatactgctcatcgccagcggctgtgaaaccgtcgctaagtttgaagaagcggcaacgggtagtggcggctttggtggcactacttcttctagcattaactttagtggtatcagctcagtcgatcaaaaaaccgataccacgttgagactcaattggggtgctcacgccgatgcagtggcttatgatgtttacaatacaacctcgggcacacccgtatggctgcaaaccgtaaacggccaggcttcctcatctgtttcgctcacaagcctaaaccccaatcaactttataagtttcgcgtaagggccaaagattcagaaggcaataacgacggcaataccaatgatgtttcagtaacaatgaaccttgcccccgatactccaagcggactcacaagaactttgcccgtaacgtcgccagggttttcactaccaaccattcgcgtgagtggtgtaaaaaatggcgataccataagactctttagcgatattacttgtaccacacaagtagcttctggcaccgccactggcacaaccattgatctaactcctgcatctctaagcagcggcacggtagatttttatgcaaatgccacaaatgcttttgccaccgcttcaggctgctcaactgcaaccgcgagctacgaaaaactcacttgcccaacagcaaatggagattatcttgccgtcacagctaatccgaccgtgggaacgacttcggaattttgtgtcgccaagtatgaaatgaaagacgtaggaggcgttgccacttcacaagcaactggcaatccttgggtatccatcagtcaagtcaactcacgcaccgcttgctcgaatcttggcgcaggatatggacttatctctaacgaagaatggatgaccgtcgctagagaaatagaaacgactgacaccaactggtcaagtggcaccattggcacaggttcacttaatagaggacattcagacaacgcccccgcctcagcacttgctgtttcaaacgacgctgacccttatgacggaacagggaacaattcaggacaagcggtaggttcaggatgggaacaaaaacgtactcacacgctctcaaatggcgaaatttgggaccttgccggaaacgtatgggaatggacagactggaacgttacccctgccaataaagcttatatcgcaagtaatagcaaccctgtacaagcttggcgagagtggacacttgttgacaccaatatcaataacggcgacgagatggaaaccatcacatggcaaacaactgatccagcccttaatagcactagcaatatcggacaatactatgctggtttaaacagttctggcggcgctgcgcttcgcggtgggcnctggaacantgganccnntgcgggtgcgttcgccctcantttgaacnntgnttcgacgnacacgnncncgancnttggctttcgctgcgtgtttagaccataaccccatgcacaacataaagtttatcgaagctagaaaacgcctttgtcggcaggcaattggttgattagtaattggtcattggaaattctttccataagaaaatcgtataaaatttagcagtgattttttttgaaacacaggcttgtatcgctccgtaggagcgaaggaaattttttttgcatttttcggaaatttcggaaaattttagtttaaaatagcgagtttttccgaaaaagcggtgttttttccgaaaaatggattatttgaaacgaaattttccgaaaaaattccattaagggtctcttctcttctcttctcttctcttctcttctcttctcttctcttctcttnnnttntnttntnttcnnttcncntctcntctcntcncntntcntntcnnnnnnnntntnntnnnntngnnnngtnntanntnnnccnnntnnaatnnnnnnnnnntanntcnngtcanncnnncnatnctnntcncnttnttnnnntgtcnnnnntnttncctntcttnnnnncntnnnnnnnnncnnnanncaantgnncatnnnttnntcttttttnanttntntancttnnncnaaacntaannnatnnnntanncnntatnttncntttntnnnnnnnnnncnnaaattnannnaatgnnaanaaannaanntgntnanntnnnnnnnagccnngnntnnnannnnnnnnnagnaanggnaaggactnnnctnnantnnannnaannnnannnnntcgaggngnntnngnnngganngtcntnnnatancnncnngnntnnnnncnntnnctnnnnnnnanaatatantnntggnataanannnnnannnnnagcngngngnnaannnaaannnncantnnnnntntcntcnncncnnccganncaangnnncannnaaannanncaaannnantcnanncaacgnnaannnnnannnganannnnnnntncngncaaanancnccnngnnnncnnannnnnaantgngnntnnnntncnacncnatnncancnccncncttnnnnaaaannaancnannnaanannaaangannnnactntnnnnnnangnantnnannnnancngnnnannnnannantnnntngantcntataananaaaacnacnntanannnnntnnnntnnnannnnnnntngnntcntnnntctnanctannctnnnnnanatnnngcntnnnannngncgnnnnctnanntcannnanangatnnnanangntnngcnnnnnnnnnntncnnnnctnannnntnnaangnncannncnncnnncanannnnannnccccnnnnnnnantcaannnaananccnannnannnnnnnannnanannnntnnncnnnntnntnnnangnanctantnnnnnntnnnacnnnnnnannnncntncncanngcnctnnnccnnnnattgnnnnnnannanagnnnaancanntctnnnnngtcnnnncnnnanncannaggncanntnaaanaanacnnntnncntgcnnanctnannaannnncnnaanggcantnnatnaanncnnnnntnncantnaannttnnnnnnancntnannnnnncnnnntnnccgcncnnnccnnantcncngnnctnacnaannnaannngnnntnngntnnntnnctntnttaantncnaggnnanatnanttnaatnganngnnnnnncngntacnntantnnntnncatgcnnnnanggnntnntnncnngnnnaannnannannnnnnnntttcnnnnntntntnccnnnnnntannganaanatannatcnnntgnantnnanntnantaaaannnnanannnnngnngnnnnnannatcncnngnnttggnnntnngannnannaaanngtttagntnnggccnntnnnnnnannnatngtnntntnnnnnnnnnnannnntnncntnacnnancntnttntnnana

SEQ ID NO: 540 - DNA, 4000 bp, Escherichia coli
  misc_feature (1)..(1): n is a, c, g, or t
  misc_feature (8)..(8): n is a, c, g, or t
  misc_feature (34)..(34): n is a, c, g, or t
  misc_feature (37)..(37): n is a, c, g, or t
  misc_feature (45)..(45): n is a, c, g, or t
  misc_feature (50)..(50): n is a, c, g, or t
  misc_feature (71)..(71): n is a, c, g, or t
  misc_feature (90)..(90): n is a, c, g, or t
  misc_feature (103)..(103): n is a, c, g, or t
  misc_feature (109)..(109): n is a, c, g, or t
  misc_feature (356)..(356): n is a, c, g, or t
  misc_feature (559)..(559): n is a, c, g, or t
  misc_feature (575)..(576): n is a, c, g, or t
  misc_feature (755)..(755): n is a, c, g, or t
  misc_feature (769)..(769): n is a, c, g, or t
  misc_feature (874)..(874): n is a, c, g, or t
  misc_feature (899)..(899): n is a, c, g, or t
  misc_feature (1118)..(1118): n is a, c, g, or t
  misc_feature (1358)..(1358): n is a, c, g, or t
  misc_feature (1372)..(1372): n is a, c, g, or t
  misc_feature (1377)..(1378): n is a, c, g, or t
  misc_feature (1380)..(1380): n is a, c, g, or t
  misc_feature (1389)..(1390): n is a, c, g, or t
  misc_feature (1393)..(1394): n is a, c, g, or t
  misc_feature (1409)..(1409): n is a, c, g, or t
  misc_feature (1418)..(1418): n is a, c, g, or t
  misc_feature (1425)..(1425): n is a, c, g, or t
  misc_feature (1452)..(1452): n is a, c, g, or t
  misc_feature (1464)..(1464): n is a, c, g, or t
  misc_feature (1507)..(1507): n is a, c, g, or t
  misc_feature (1540)..(1540): n is a, c, g, or t
  misc_feature (1557)..(1557): n is a, c, g, or t
  misc_feature (1564)..(1564): n is a, c, g, or t
  misc_feature (1681)..(1681): n is a, c, g, or t
  misc_feature (1693)..(1693): n is a, c, g, or t
  misc_feature (1798)..(1798): n is a, c, g, or t
  misc_feature (1987)..(1987): n is a, c, g, or t
  misc_feature (2659)..(2659): n is a, c, g, or t
  misc_feature (2681)..(2681): n is a, c, g, or t
  misc_feature (3166)..(3166): n is a, c, g, or t
  misc_feature (3251)..(3251): n is a, c, g, or t
  misc_feature (3410)..(3410): n is a, c, g, or t
naaaacanctgactgtacacgctcagaacgaagnaanaaacagcnctganatgttgtctgcagatcaacangaaattgataacctgctgngttctattgatanaatttnggaaaatactgaatttggcggtaagagactgcttgacggcagtatgggtgttaacggtacagctgtagggaattacctgcggtttgtctcagctgaggctacagcttcaacctcccctgaacaaggctggaaagttgatattcagcaagttgcaactagagccaaaaaaacaggatcgattgcaatcaatatcaacaatattcgtaatggacttcaaatcgttctgaatgaaggtggcagaaatttnaacttaaacacaaaggacggtcggttgggacaagagattgagcaattgataaaaaatgctgatcaggatcgattactgtttcctcaagcagaaatttcatcacaaattcgtgaacttatcatttttgcattgagtcaggcagctgaagagagtggtttagatctttatatagctgagacaccagacaataaattgcttgttcnacacaacaaatttggnnactctgcctctttttcagtgacaagctcagttgcaggaatactttctgatgatgctaatatagcccagaagtctgaaagcggtaaaaatatagaaggaacaatcaacgatgaagtgactttgggagaaggtcagctgctgactactttggaagggatggaagctgaaggaataacgatnaagtatgatagagngattggactcataaatactccaattttgaatgagtcaggtgaactgatcggaacagagctgattgaggagaaaaatgaggatattgttggtggtccaaataatcngaaaatagaaggctacgtacatgtntcccaaatgtcgaaagaattccaggttggtctagataaaaaatctaatcctacattctcatttgcaaacgtccgcaccagtcttatgggtaacggcattcataacaagagcggattttctagccttgctgagattgacgtaacttcgtcacagggtgctcaagacgcttcaattattgtagaccgggtaattgaagaaatctctgtccagcgtggtaanttgggttcatttcaaaaaaatgccctggaaagcaacatgaacagtcttaagattgcagaagaaaatatcacacaggcagagtcaaccctgcgtgactcagatatggctgcagaaatgtcgaacctcactaaagatcaaatcctgcttcaggccagtactgcaatgatagctcaggctaatcaagttccagaaactgttctgggattaattcaaaacagaggttaagccgaaaaagtttanttctttttaagtgnagacnncngaatccccnnccnnccttcctttactccnaatttttcntttattnaatctcttaaaagacttgccggttacncgagtaaaaggntaatatcacaattaaataaagaaaatacgctttgagcttaagnacctgttaaaagctttagcattgagttgtgatncagtcgaaaaatgtatncattcanacgataatgttaagcaagttcgggaatgtttactattttcgaaaccattaaaattaatactctgtgtgcaatatgaattcatctgaaatagaaaagtctcattcggaacaacggctncctttgcaattnagtagaattacaaaaagttttccgggaatcgttgccaatgatagtgttgattttacattggaggaaggagagattcacacaatactgggtgaaaatggtgcaggnaaatcaactttgatgaatatgattgcagggctctaccctgccgatgctggagagatgcgcgtctttggggagcaagtgaattttaccaatcctcgtcaggctattgaaaaaagcattggcatggtatttcagcattttatgctggttcgaaatcatactgttgccgaaaatatcatccttggtttaccnggagtggtgaagcttaagttgaaagaagttcatcaacaaatccgggaaataagcgaacgctatgatttatatgttgatccagaaaagaaaattcaggaactttcagtgggtgaacagcagcgcgtggaaattgtcaaagttctgtttaggggagcacgaatcctgattcttgacgagccaaccgcagttttgacacctcaggaatcagaggcattgtacgaaatcatggagaagatggtaaatgaaaaacattccatcatttttattacacataaaatgaaggaagtgatggcactttcgcatcgaataacggttttgagtcgtggaaaggtgatggcaactttgaagaaagatgaaaccaatccgcaagaattagctgatttgatgatcagtaatttggaagctaaggacttagtaaaagtttctgaatttctacgggatacaactgttgaagaaaaagatggggatggttcagtttctcaaaagcaaaagaaaaagtttggtaatttgacagtagctttaaaggatattcatgcggtgaatgatttggggtacccggcattgaaagggatttcacttgatattcgtgccggagaaattctgggaatggccggggtttccgggaacggtcaaccggaattgaccgacgttttgagcgggctgcggtctccnacaagaggcaagtatcagtttnaagatgtgcctttgaacaaacccactgtgaatgaaatgattgacatgggagttggttacattccggaggatcgtaaaaggtttggtgtttcgtccggaatgtcaatcgcctacaattttttgctgcgagattttcaaaacccccaattttgttcaagacagctgctcaagctttcaaatatcttcgactatggacaaaaaaaaatgcaggagtttgatatccgggcacctacggaaaaaacaccggttggacttttatccggaggtaacatgcagaaagtcattcttgcccgtgaaatttcgcgtccattgaaattactgcttgctgcacaacccacccgtggcctggatattcatgcaaccagtttcatccgtgagcaaatatgccaggcacgagatcggggtctggcggtgctttggatatcagaggatctggatgaattattgatggtcgcagaccgcattgcagttatttttgacggacgnattgttggaactctttcgcatgaagaggcctctgtaactttgattggtcagatgatgaccggaatgaacaaaaacggcacggaanacgtgatggagaaaagagaatatgcgtgattatcttctaatttatgtgaatggccggcgttacaaaatttccggaaagcgtggatttcaatcactgtctgattttctacgttatgatttgggtatggttggtaccaaggtggtgtgtgcagaaggagantgtggttcctgtaccgtacttatcgggcgagtccggaactctcagttgctctatgagggaattgacagttgcattcagtatttatatcaactggattgttctcatgtcattacagtggaaggcttgaaggatgaggctcaaataatacatcctgtacaaaaagcaatggttgatgccgctgggtcacaatgtggttattgtacaccgggatttgtaatggcactggctgcaatgcttgaaaccggtgaaacactaacgagacattccgtgcaagacggcttaaccgggaatttgtgccgctgtacgggttacgaacaaattattgatgccggcttgtctttgaatcagaaagtcataccaaaggcttcaaaatgttacgatgcgaaggcaatacttgcggattttatggaacatgttgtccagcctgtttattgtgagtacgagaaaaaatggaatggagcaggtcaacaagtacagttttttgtgcctgcgtatttagaagaagctcttgaatttaagcaaaaaaacaagcatgtcaccgttgttgccggtggaacggatatttctgtacagatgaacaaagagcggct

SEQ ID NO: 541 - DNA, 4000 bp, Escherichia coli
  misc_feature (26)..(26): n is a, c, g, or t
  misc_feature (34)..(34): n is a, c, g, or t
  misc_feature (37)..(37): n is a, c, g, or t
  misc_feature (39)..(39): n is a, c, g, or t
  misc_feature (217)..(217): n is a, c, g, or t
  misc_feature (442)..(442): n is a, c, g, or t
  misc_feature (580)..(580): n is a, c, g, or t
  misc_feature (643)..(643): n is a, c, g, or t
  misc_feature (709)..(709): n is a, c, g, or t
  misc_feature (1484)..(1484): n is a, c, g, or t
  misc_feature (1614)..(1614): n is a, c, g, or t
  misc_feature (2238)..(2238): n is a, c, g, or t
  misc_feature (2720)..(2720): n is a, c, g, or t
  misc_feature (2932)..(2932): n is a, c, g, or t
  misc_feature (3230)..(3230): n is a, c, g, or t
  misc_feature (3461)..(3461): n is a, c, g, or t
  misc_feature (3482)..(3482): n is a, c, g, or t
  misc_feature (3512)..(3512): n is a, c, g, or t
attgtaatatgacttgaattagcatntaatctgnggnanattacaaactaatctgcatcaaaacatacgatgaaatcatacaaattagaaacctattaaaaccctacggcctttcaatagcagttgcattgaaaggccgtaggaatggatagcgtttgtgctatcccttatttatgcttttgaaatgttcagaaacatcgcttaaagcaagctcttnatggctgcatcgatatccttaacctgcacatctctcattctaacgctgttgtcttttccaataaggaagtaggtggggatttgctgaacattatactgagagagcgtaggcgagttgacacctgcgtcatcatgcacactaatccaaggcaaagcagccgtttgagtcttccagaagtgctcatcgggatctatagaaacctgatagatttcaaagccctgggcntgatatttgttataaagttcgcgcaacatcatgatgcgtttcaaactgttttcattggcaaagacatggaaatcgagcatcaccaccttaccggcaaggtcagacaatcggcgcacatgacctttattgtcaggcaangcaatgtcgatgatgccgctttctttaactttgctggcatcaatttgagccttttgttgctcngcttggataatacgcacatccttcataccttgtattgcgatgttatgtagattcaatccgcgttcngctttggggtaatacgtgtcccaacttgtcgccacagcagcatacactttgttatcttccttgttattacgagggttgaaaatcaaggtctcttgattaccaattacgacggtttggaatagtgcaaagtaggcaaaagccttcattggagccttataaatgaagtcatatttcaccctgtttttatagctttcgagcaatagattgatgttactttccactgaatctacaccgagagtaggacttgaaatgatgtcattgatctggtgttgcaagccttgttgcatgagcgcgagcgtcttaatctgactacaattctcactacctgtgacctcatatcttgaagacatgcgtggataagcagccttaatagtgactgtttccgtagagtcgatgctcacattgatgatttgtccggcgatgcgcagacgataaaagtcgggtgcttcgggtgctttctcgctgaaagaaaaggctccatcctctccaagttttaccgaatcaacgactacagggccattaagactcatgttttcaaagtaaagtgtggagtctttagcgttcgaaatctcaccatttacatggaatttcttgttgttgcaagatgcaaaactcaatgccacaagtgtcaatactgcaacagagaaaaggctttttatcttcatgattgttgttttttcaagttctatatgcaaaagtacacaaaatttagaaaagtaaaacagtaaatagataaaaaggtaataaatcgtgaagttttttatatcatgcgggnaagtgacatccctatataaacggctacaatgccaaggacgacacttccgccagaatatgcggcggcttgccatagctgttgggtgcgaagaagggtcaaagtctcgttgcaaaacgtagaaaaggtggtnaaaccgccacagaatcccaccgtaagaaagagtttccaactctctgacatgcctgtacctcggtcggcaaggccatagaaaaatccgataagcaaacagcccaagaggtttacagtcattgtacccatcgggaaaacggcaaggaaagtgccctgcaaaagctttggaagaagccatcgagagactgatcccaaggcacctccaatggcaatatagaaaatcgattgcaacatatctttggcaaagatacacattttcatgcttttattgcataaaaaacgcgaagaaatatcattctattcgggaaatttctccctgcaaacaacacaacaagggaatagtatataccattgatttccaacgatataagcctacaataaacctcacataccacttaaatttcatgccatggatagggaaatccccctttagaaataggaaaattcctcttgaacgatacaataaaaagctatacctttgcaaacagaaaaaaggagagagttattcgatttctcaataggtagagcttttaaataggtaaattgatttcaggctaatgtgagtaaggctcattctttgcatgactttctgcaatgattgattgctgcaaacatgataaacganatgagttttcacaaacatttctttcaaattagcttgatgaaagacggcagccgcccctgaaagagaaggctgctgtcttcttttatatttaaaaatgctgaaaacttacattcgttttcttttgtttaatatataataggtaactttgcaaagaatatagatgtttgacaaaacaataagttattaaattttagatgaacgttattacaaaatcagttcaattgcctgatggaagaaccatcacaattgagaccggaaaagttgcaaaacaagctgatggagctgcggtacttcgcatgggcaacacagtgctattggcaactgtttgtgcagcaaaggatgcagttccgggtacagatttcatgcctttgcaggttgattatcgcgagcagtacagtgctgctggtcgattccctggtggttttaccaagcgcgaaggcaaggcgagtgacaatgaaatcctaacatctcgcctcgtggancgtgcacttcgtccactcttcccttccaattatcacgctgaagtgtatgtacaagtgatgcttttatcagccgatggtgttgaccagcctgatgctttggccggttttgcagcctctgcagccatggcttgttcagatattccattcgaatatgctatttctgaggtccgcgttgcacgcattaatggcgaatttgtcattgatccaacgtnccaacagatggcagatgcagacatggatttaatggttgctgcaaccaaagacaatattatgatggtcgaaggtgagatgaaagaagtctcagaacaagaccttatcgatgctctcaaggctgcttccgaggcaataaagcctatgtgtgagcttcaggaagaactctcaaaagagctcggaaccaatgtaaaacgtgaatatgatcacgagattaacgacgaggaactacgcgaacaaatcaagaacgagctttatcagcctgtctatgatgtaaataagcaggcgcttgaaaagcangctcgtcacgatgctttcgataaaatcttggccgatttccttgagaaatacgatgccgctcatagcgatttgtctgaagaagaccttgaagagaagcacgcagaggctacccgttactacgaagatgttatgcgtgacgccatgcgtcgttgcatcttagacgaaggacagcgtcttgatggccgcaaaactaccgatatccgtcctatctggtgtgaggtttcacctctnccaatgcctcatggtagcgcnatattccagcgtggtgagacgatgtctttntccacatgtacactgggaacaaagcttgatgagaagatggttgatgacgtaatggaaaagagttaccaacgtttcttgttgcattataacttccctccattctctaccggcgaagcaaaagcacagcgtggtgtaggccgtcgcgagataggtcatggtcatttggcatggcgaggccttaaaggtcagatcccagaagactatccttacactgtacgtttagtcagtcagattctcgaatcgaatggatcttcgtcaatggcaaccgtttgtgccggcacattggcactcatggatgccggtgttcccatgaagaagccagtcagtggtatagcaatgggcctcatcaagaaccccggagaagacaagtatgccatactaagtgacatccttggtgacgaagatcacttaggtgatatggacttcaagacgaccggaacacgtgatggtttgaccgcaactcaaatggatatcaagtgtgacggact

SEQ ID NO: 542 - DNA, 4000 bp, Escherichia coli
  misc_feature (957)..(957): n is a, c, g, or t
  misc_feature (966)..(966): n is a, c, g, or t
  misc_feature (969)..(969): n is a, c, g, or t
  misc_feature (972)..(972): n is a, c, g, or t
  misc_feature (975)..(975): n is a, c, g, or t
  misc_feature (978)..(978): n is a, c, g, or t
  misc_feature (984)..(984): n is a, c, g, or t
  misc_feature (987)..(987): n is a, c, g, or t
  misc_feature (990)..(990): n is a, c, g, or t
  misc_feature (993)..(993): n is a, c, g, or t
  misc_feature (997)..(999): n is a, c, g, or t
  misc_feature (1001)..(1003): n is a, c, g, or t
  misc_feature (1005)..(1009): n is a, c, g, or t
  misc_feature (1011)..(1011): n is a, c, g, or t
  misc_feature (1014)..(1014): n is a, c, g, or t
  misc_feature (1016)..(1017): n is a, c, g, or t
  misc_feature (1020)..(1020): n is a, c, g, or t
  misc_feature (1023)..(1023): n is a, c, g, or t
  misc_feature (1028)..(1028): n is a, c, g, or t
  misc_feature (1032)..(1033): n is a, c, g, or t
  misc_feature (1041)..(1041): n is a, c, g, or t
  misc_feature (1046)..(1047): n is a, c, g, or t
  misc_feature (1050)..(1051): n is a, c, g, or t
  misc_feature (1055)..(1056): n is a, c, g, or t
  misc_feature (1059)..(1059): n is a, c, g, or t
  misc_feature (1068)..(1068): n is a, c, g, or t
  misc_feature (1071)..(1072): n is a, c, g, or t
  misc_feature (1077)..(1077): n is a, c, g, or t
  misc_feature (1080)..(1081): n is a, c, g, or t
  misc_feature (1089)..(1089): n is a, c, g, or t
  misc_feature (1092)..(1092): n is a, c, g, or t
  misc_feature (1096)..(1099): n is a, c, g, or t
  misc_feature (1101)..(1101): n is a, c, g, or t
  misc_feature (1104)..(1104): n is a, c, g, or t
  misc_feature (1107)..(1107): n is a, c, g, or t
  misc_feature (1110)..(1110): n is a, c, g, or t
  misc_feature (1116)..(1117): n is a, c, g, or t
  misc_feature (1119)..(1120): n is a, c, g, or t
  misc_feature (1122)..(1122): n is a, c, g, or t
  misc_feature (1124)..(1125): n is a, c, g, or t
  misc_feature (1137)..(1137): n is a, c, g, or t
  misc_feature (1143)..(1143): n is a, c, g, or t
  misc_feature (1147)..(1148): n is a, c, g, or t
  misc_feature (1152)..(1152): n is a, c, g, or t
  misc_feature (1155)..(1155): n is a, c, g, or t
  misc_feature (1158)..(1161): n is a, c, g, or t
  misc_feature (1163)..(1164): n is a, c, g, or t
  misc_feature (1170)..(1170): n is a, c, g, or t
  misc_feature (1176)..(1178): n is a, c, g, or t
  misc_feature (1182)..(1182): n is a, c, g, or t
  misc_feature (1188)..(1188): n is a, c, g, or t
  misc_feature (1191)..(1191): n is a, c, g, or t
  misc_feature (1194)..(1194): n is a, c, g, or t
  misc_feature (1200)..(1200): n is a, c, g, or t
  misc_feature (1202)..(1202): n is a, c, g, or t
  misc_feature (1206)..(1206): n is a, c, g, or t
  misc_feature (1209)..(1209): n is a, c, g, or t
  misc_feature (1211)..(1212): n is a, c, g, or t
  misc_feature (1217)..(1218): n is a, c, g, or t
  misc_feature (1227)..(1227): n is a, c, g, or t
  misc_feature (1233)..(1233): n is a, c, g, or t
  misc_feature (2834)..(2834): n is a, c, g, or t
  misc_feature (3191)..(3191): n is a, c, g, or t
  misc_feature (3584)..(3584): n is a, c, g, or t
  misc_feature (3860)..(3860): n is a, c, g, or t
  misc_feature (3908)..(3909): n is a, c, g, or t
  misc_feature (3941)..(3941): n is a, c, g, or t
aatcgcacatgggtgaaagattggtgaagcgcggcgagaatgtgttgttgaacggctttgggttcagagattatcattttacccagagtaccattgaaatattctgcctccccatttgtgttatatttaaaaatagtttttatttctggaagccacttagcataatcatttaccatattctgagcagagacgattccatggtcaaaaagggatctacaccgctcagggtcagtatcttcccatattttccaacgcatattggttgttcccaccggctctccccgcataaaaggtgaattagaaaaaagaatactgaatagaggttgaattgcgtcggcaagaaaagccatttcattggcatcttgctctgaagtataatcgatgtttaactgaacactggtggtgtttcgcatcatccaaggacccaactgccccgtttgggagaacatatcatgcattaattgatatttattcagcgttataagatcaatatcattgggtacacagagtggctctaaggataaatggagccggtcaatctgattggtttcacaaatttgattctctatttccacatgtcgatcgaattgtttttgaagatcccataaaccaatagcaggtgccgacgcccactcaagttgtccgccaggttcaagagaataagtaaaggtatccttggattgccgattttccataatctcttgaaataaatcggtagcagaatattgatttgtcggatttacaggaaggcgattaaaatctctatcgtagtataaaccctccacttcaagtcctattttccgctgtttttcagaaacggtgtgagacaatatttcagctttaatgttttcaactaaattcatgttttatggggcaaaatttactgaagtttttttcaacattcgcaccatggattcttccgggtttttatttaatacatcatttttatgaatccangcaacatcntgngantcntcnctcacnatnatnttntctnnncnnngnnnnntntcnannatnaancgaanatcnnaatgaaantgtgnnggnntatnnttntattttggnatnngatgnatnnctaaatcnaanatannnngnganaanacnttaaanncnntnanncccgactcttcncgcgcntcanncaangcnacnnnnannaaatcngaacannnatcngcatgnccnccnaattgnanccanagntnnaattnncgatgatgngtcatnaaaacccattctcgagtttcgtctacgatccacgaagagccagtaaaatgtccatttaaattatttcgattaaagcattgtggcgtggattccaaaaattggatggaagcctcaatcaacgatttttcatcggaatgattgtttttgtaattaattaatagttgttttaatggttgccgtttcaaagagaatctttcgctgaaaatactaagataatttaatgcgacccgcgatacaatttctttaaattaaagggcataatttgatgggaagccatgaataacttatctataaacaaccttgtgtattcatttggaaacgggaaagccgatggccaagccgatatggtgaatttattgggtggcaaaggcgccaatcttgcggaaatgacaaaattgggattaccggttccatctgggtttacaattaccacagaagtttgcacccatttttataacaacaacaagtttccaaaccaccttgacgaagaagtgaaaaaggcaatttcgcgcatggaatccgatatgggtatgctatttggtgatgaggaaaatcctctgctcgtttcagttcgatctggtgcgcgaaaatctatgcccggcatgatggaaacggtgttgaatttggggttaacaacaaaaactattcccggactaattcacaaaacaaaaaatgaacgcttcgtttacgatgcataccgtcggttgattatgatgtattcggatgttgtaatggaaaaatccgatgggataaatctaaaggaagaaaaaggaattagacaacaacttgaagatattttaagtatttataaagcaaaaaagagatatcaatcagacttagatatgaaagggaatgactggaaatatatttctaccgaattcaaaaattatatagaaaaaaagctaaacaaacatttcccggatgatccatatgaacaactgtggggaggaattcaggcggtttttcaaagttggagtggcgcacgcgcgacacattatcgtcgaatagaaaacatacccaacaattggggaacagcggtgaatgttcaagcgatggtgtttgggaacacaggagaggcatcggccacaggtgttgccttcacaagaaacccagccacaggcgaaaataaattttatggggaatggctacaaaacgcccaaggagaagatgttgttgccggagttcgtacgccacaccctttaaatgaagcgacaagaacaaaagaatccaaacacttaaagtcattggaatcctttatgcctaaggcttatacccaactaaatgacattagaacaagcctagaaacacattatagtgagatgcaggatattgaatttacaatagaaaacaattttctatggatgcttcaaacgcgaacaggaaaacgaaccggggtggctgcgattcaaatggctgtagatatggttaccgatggcatgataacaaaagaagaggcgatttcccgaattaacccagaacaaattgatgacctgcttcacccaacattaaataaagaagaagaaaaaaaagcggaggttattgcccgcgggctaccagccggcccagggggaggaattggccaaattgtttttacagcagangaggcagaaaaacaagcaatggcagggaagaaagtgattttagttcgagaagaaacatctccagaagatgttcatggtatgcatgaatcagaaggaattttaacagccaaaggtggaatgacatctcatgcagcgctggtagctagaggctgggggaagtgttgtatcgttggttgttcggccctaaacattgatttatctaaaaaagaaattaccatagatgacaaaaagctatatgagggcgattggatttcaatgaacggctcaaatggagcggtatacaaaggaaaggttgctttacagactgcaaatccggattctaataaaacataccgtcaacttatgatgtgggctganaagattcgaacgctaaagattcgaacaaacgcagatagcccagaggacgcattacaagcaattgcatttggagcggagggtattggattgtgccgcacggaacatatgttttttgatccccaaagggtgatgataatgcggaaaatgattttggcggaaaatgattctagtcgtcgaaaatttgttatggaattactaccatatcaacgaaaggactttgtcggtatcttaaaagcaatggatggaaagccggcaacgattcgtcttcttgaccccccactccacgagtttttatctttaaacagttcacaaattaaaaaactggctgcagagttaaatgtaataacccaaaaaataaaaaaccgtatttctgaacttcatgaatttaatccnatgctagggcatcgaggatgtcgcttaggcattgcttacccagaaatcaccgaaatgcaagcccgcgctatctttgaagcaacagcagaattaaccgtagccggcataaaggtatttccagaaataatgattccactggttggcacccacacggagttaaaaaaccaagaggcgctggtaagaaacattgcagaaatagttaaaaaagaacagaaaacagattttcactatacggttggaacaatgattgaattaccacgagcttgtttaaccgcnaatgaaatagcaaaaaatgcagaattttttagttttggaacgaacganntaacacaaacaacctatgggtttagccgagangatatcggcgggttcttgccaaactatctaaacgaaaacattttatcccacgatccatt

SEQ ID NO: 543 - DNA, 4000 bp, Escherichia coli
  misc_feature (819)..(819): n is a, c, g, or t
  misc_feature (822)..(822): n is a, c, g, or t
  misc_feature (906)..(906): n is a, c, g, or t
  misc_feature (919)..(919): n is a, c, g, or t
  misc_feature (984)..(984): n is a, c, g, or t
  misc_feature (1870)..(1870): n is a, c, g, or t
  misc_feature (1987)..(1987): n is a, c, g, or t
  misc_feature (1990)..(1990): n is a, c, g, or t
  misc_feature (2911)..(2911): n is a, c, g, or t
cgctgctttcgctgccgcgtgacaccaaggtgcagatcccgggccgggctggttgggataagctgaatgcagcctatgcttacggcggtgtgatgatggccaagcaaacggtagccaatctgctgcaggtaccgatccattattatgttttagtggactggcgtgcgtttattgatgttatcgatctgatcggcggcgttgatttatatgtggaaaaggatatgtattatgaagatccttacgccgatcttgttattgatattaaacatggctatcagcatctggacggtaagcgggcaggcgaatatgtgcgtttccgcaaagatgagctgggtgatattggccgcgtgcaaaggcagcagaagtttatgaaagcggcggcagcacagattttcaatatcgatacggtgactaagatcccggcgctgttttcgactgttgacagacatgtggagaccgatatgaacactttgacgatgatcaaggctgcaaacagctttaagctgtttggtgacgaaaaggtcaagtcgggtatgctgtatggtaattttgacgatacagaaggtatcagctattgggctacatcacgcgaggaagttcaaaaatctttggacgaaatcggcattccctatatgaaagatgatgaagatgaacaagaataaaggaggcgaaaagatggattttactactaaagaaattgcacacaagatcgcggcggcagcctgcgataaaaaagcaaaggatattttgctgctgaatatggagaacatttctcctgtaactgattattttattattgccagcgctggaaataatatnctngttaaagctattgctgacaatatcgaagataaattggcggaggcaggcatttttgttactcacaaagaaggctatgctgaaggncgttggattttgntggattatggtaattgtgttgcgcatatctttattgaagaagaacgcgagttctataatctggancaactgtgggctgatgctccgtcggaagaatttgtggagagcaaaaatgactgatgaaaaagacatggcaaagcagcttaaatatcgtgcgggtgacgttgttactttaaaagtggcacgtctgggcgaaatgggcgctttccttgacgctggtacgggcgatacttctgatgatatcctgctgcataagctgcagcagacggaagcggtcaatgttggcgatgaagttaaagtctatttgtataaagatccgcatggccgtttgacggcgagccagaaattaccgaaaatgcgcgaagggcagatcggttacgttaaggttttaagtgtgaccaaggacggcgggtttgtggatattggcgctgaacgcggtgtatttttgccgtacagcgaaatgcgagggcatgtgtcgccgggtcagctggtctggataaagctgtatcgcgataaaacaggacgccctgctgtcagtatgcgggtggaagaagaaatgctgaaggcttccaaacctgctgttggtgtcaaggtcggcgacagcgtgacaggtactatctataatatcctgccggaaggcttcttcatttttactaatcagcgctttttggcgtttctgcatcgcagtgaagttcccggcgggcgtttggattttggtcaggagatcacggctcgcatcacttatattcgtgaggatggcagggtaaatctgtccttacgccagcaaaaagaaaatgctatgatcgccgatgcggaagatattttaaattttttacataaacggaatggtaaaatgccttactgtgatactacaccgatggaaatcattaaggaaaaatttggtatcagtaaagcagctttcaaacgtgctttggggcatttgatgaagganggcctgatcgtgcaggaagaaggctggactatgctgactgaaaaaggactgcaaagcgaaaaataagtaaagactctcgtttgggcgagagtctttttttatgcgcgttatttgtgnatnttaaaaaacatttcttaaagaacaaatattggaaattgtttaagagtaaggtataatgtagacaataagaagtttgaaatagaaagaggaactattatggactctagcggcttaaaagaagatattttttacagttccagctggatgcaggaaatattggaaatcagtaatattggtttatggcttttggaaataaacaaaaataatactgacgtgcgtctgtatgccgatgataaaatgttagaacttttagggctgcagaagagtttatcgctggaagataattataaacattttgcgcaaggcgtgcttgcagaagatctggaaatagtgcagaaatatattgaacagatgctgacgaccaaaaggctggtagaggttcagtatcgctggaagcatccatggtggggcacaatttttattcgctgcagcggcaagttatataaagaagacgataatgcttattatattcgcggttatcatcagaatgccagcgatgttgaggtcttaagacaggccaatatcgaaaagagcaggcagctgatagaagttgtacgtaaacgtgattattatgacgagctgtttcagtccgtattgtgcggtatcgttcaatacaggccacaggctgacggaagtattgtttttcaaaatgccaatatggaagctatcaggatttttggttatgaaaaagaagaattctggaagcgtaaatcctggcggatagaagatctggctgcgccggaagactgtgatagagtatatcagagcatgaacgcgatactgctgggcaaggggaaacagtcttttgaatatcgggcgctgagggccgatggtacttattgctggatcattggcagcggtgaatatatcaaaaatattgacggagaacgtgttattcaaagtgtttttctggatattganaacagaaagcagatggagctgcttaatcaggaattgctggagcaggataagggtactcaggaactgctgcgccaggttctggaaggaacaaaaattttccatttttattattatccgcaaaaacgtctggaagttatgccggtaagaaccagtaaatattttaactgtagtatggaatacaggaatattccggaaagctttgtggaagattttgtgagcggtgaaagtaaggcagattgctatgcgatgtacgaagctattcataatggggctaaaactgcatcttccacattctgtgacaagaacaagcagtgctgggtgcgggtaacaatgactgttatgtcatgggatgatcagcagcagccgacttttgtcattggtatcattgaggatatcagcgagcaaaaaggaatggagcttgaaaaaatcgagctgcagtctatttataattttacgatagaacatgactatgatgctgtttgcatctgtgatttaaacagtggtgattatgtgatgcgttttgccggttattgcgctcattacggcttgccgctgcgtggcagcattaatgaacagctgccggtatttataaaagagtttgtttgtgaagaagattgtgagcatttaaaaagctggagtattgatagtttgctgaagtgcctggagcaggaagaggctgttatgctgtatttccgttcatccgctaaagacgggtacagatataaagaagttaagctttcatattttggtaaattaaaagaacggctgcttttgacgatgcgcgatatccatgaacgcacgatgcaggaggaagcaaataaacaaatcatcagtgacgcatatcagctggctttacaggccaatcaggccaaaagtgaattcttttcaaaaatgtcgcatgatatcagaacgccgatgaatgctattatggggctggcggctttagcggcacattgcgacgacaaagatcatgtagatgattatttgaaaaaaattgtcacttctggcaaacatatgctggagctgttgaatgaggttctggatatgtcgaagatcgaaagcggcaaaacagaattgaactcggaagca

SEQ ID NO: 544 - DNA, 4000 bp, Escherichia coli
  misc_feature (1991)..(1991): n is a, c, g, or t
  misc_feature (2001)..(2001): n is a, c, g, or t
  misc_feature (2305)..(2305): n is a, c, g, or t
  misc_feature (2319)..(2319): n is a, c, g, or t
  misc_feature (2324)..(2325): n is a, c, g, or t
  misc_feature (2327)..(2328): n is a, c, g, or t
  misc_feature (2330)..(2331): n is a, c, g, or t
  misc_feature (2333)..(2333): n is a, c, g, or t
  misc_feature (2340)..(2340): n is a, c, g, or t
  misc_feature (2342)..(2343): n is a, c, g, or t
  misc_feature (2346)..(2347): n is a, c, g, or t
  misc_feature (2349)..(2362): n is a, c, g, or t
  misc_feature (2365)..(2365): n is a, c, g, or t
  misc_feature (2367)..(2369): n is a, c, g, or t
  misc_feature (2372)..(2372): n is a, c, g, or t
  misc_feature (2375)..(2376): n is a, c, g, or t
  misc_feature (2378)..(2378): n is a, c, g, or t
  misc_feature (2381)..(2381): n is a, c, g, or t
  misc_feature (2383)..(2388): n is a, c, g, or t
  misc_feature (2390)..(2391): n is a, c, g, or t
  misc_feature (2393)..(2395): n is a, c, g, or t
  misc_feature (2397)..(2398): n is a, c, g, or t
  misc_feature (2400)..(2403): n is a, c, g, or t
  misc_feature (2405)..(2405): n is a, c, g, or t
  misc_feature (2409)..(2409): n is a, c, g, or t
  misc_feature (2412)..(2414): n is a, c, g, or t
  misc_feature (2418)..(2418): n is a, c, g, or t
  misc_feature (2421)..(2421): n is a, c, g, or t
  misc_feature (2423)..(2424): n is a, c, g, or t
  misc_feature (2429)..(2429): n is a, c, g, or t
  misc_feature (2431)..(2431): n is a, c, g, or t
  misc_feature (2434)..(2435): n is a, c, g, or t
  misc_feature (2437)..(2438): n is a, c, g, or t
  misc_feature (2440)..(2441): n is a, c, g, or t
  misc_feature (2446)..(2446): n is a, c, g, or t
  misc_feature (2448)..(2451): n is a, c, g, or t
  misc_feature (2453)..(2454): n is a, c, g, or t
  misc_feature (2456)..(2457): n is a, c, g, or t
  misc_feature (2459)..(2461): n is a, c, g, or t
  misc_feature (2465)..(2465): n is a, c, g, or t
  misc_feature (2468)..(2468): n is a, c, g, or t
  misc_feature (2470)..(2473): n is a, c, g, or t
  misc_feature (2475)..(2476): n is a, c, g, or t
  misc_feature (2482)..(2482): n is a, c, g, or t
  misc_feature (2485)..(2486): n is a, c, g, or t
  misc_feature (2488)..(2489): n is a, c, g, or t
  misc_feature (2491)..(2498): n is a, c, g, or t
  misc_feature (2501)..(2501): n is a, c, g, or t
  misc_feature (2503)..(2508): n is a, c, g, or t
  misc_feature (2510)..(2511): n is a, c, g, or t
  misc_feature (2513)..(2514): n is a, c, g, or t
  misc_feature (2516)..(2526): n is a, c, g, or t
  misc_feature (2528)..(2529): n is a, c, g, or t
  misc_feature (2531)..(2536): n is a, c, g, or t
  misc_feature (2540)..(2541): n is a, c, g, or t
  misc_feature (2543)..(2544): n is a, c, g, or t
  misc_feature (2555)..(2556): n is a, c, g, or t
  misc_feature (2558)..(2559): n is a, c, g, or t
  misc_feature (2561)..(2562): n is a, c, g, or t
  misc_feature (2565)..(2565): n is a, c, g, or t
  misc_feature (2567)..(2589): n is a, c, g, or t
  misc_feature (2591)..(2592): n is a, c, g, or t
  misc_feature (2594)..(2595): n is a, c, g, or t
  misc_feature (2598)..(2602): n is a, c, g, or t
  misc_feature (2606)..(2609): n is a, c, g, or t
  misc_feature (2611)..(2617): n is a, c, g, or t
  misc_feature (2619)..(2620): n is a, c, g, or t
  misc_feature (2622)..(2623): n is a, c, g, or t
  misc_feature (2626)..(2626): n is a, c, g, or t
  misc_feature (2629)..(2630): n is a, c, g, or t
  misc_feature (2632)..(2641): n is a, c, g, or t
  misc_feature (2644)..(2645): n is a, c, g, or t
  misc_feature (2647)..(2654): n is a, c, g, or t
  misc_feature (2656)..(2657): n is a, c, g, or t
  misc_feature (2659)..(2660): n is a, c, g, or t
  misc_feature (2662)..(2662): n is a, c, g, or t
  misc_feature (2664)..(2665): n is a, c, g, or t
  misc_feature (2667)..(2678): n is a, c, g, or t
  misc_feature (2681)..(2681): n is a, c, g, or t
  misc_feature (2684)..(2684): n is a, c, g, or t
  misc_feature (2686)..(2687): n is a, c, g, or t
  misc_feature (2689)..(2689): n is a, c, g, or t
  misc_feature (2691)..(2691): n is a, c, g, or t
  misc_feature (2693)..(2694): n is a, c, g, or t
  misc_feature (2696)..(2696): n is a, c, g, or t
  misc_feature (2699)..(2699): n is a, c, g, or t
  misc_feature (2702)..(2704): n is a, c, g, or t
  misc_feature (2707)..(2708): n is a, c, g, or t
  misc_feature (2710)..(2710): n is a, c, g, or t
  misc_feature (2712)..(2713): n is a, c, g, or t
  misc_feature (2715)..(2716): n is a, c, g, or t
  misc_feature (2723)..(2724): n is a, c, g, or t
  misc_feature (2726)..(2728): n is a, c, g, or t
  misc_feature (2730)..(2731): n is a, c, g, or t
  misc_feature (2733)..(2733): n is a, c, g, or t
  misc_feature (2735)..(2736): n is a, c, g, or t
  misc_feature (2738)..(2739): n is a, c, g, or t
  misc_feature (2743)..(2743): n is a, c, g, or t
  misc_feature (2746)..(2760): n is a, c, g, or t
  misc_feature (2763)..(2764): n is a, c, g, or t
  misc_feature (2766)..(2767): n is a, c, g, or t
  misc_feature (2769)..(2771): n is a, c, g, or t
  misc_feature (2773)..(2774): n is a, c, g, or t
  misc_feature (2776)..(2777): n is a, c, g, or t
  misc_feature (2779)..(2781): n is a, c, g, or t
  misc_feature (2783)..(2784): n is a, c, g, or t
  misc_feature (2787)..(2788): n is a, c, g, or t
  misc_feature (2790)..(2790): n is a, c, g, or t
  misc_feature (2793)..(2793): n is a, c, g, or t
  misc_feature (2795)..(2795): n is a, c, g, or t
  misc_feature (2799)..(2800): n is a, c, g, or t
  misc_feature (2802)..(2803): n is a, c, g, or t
  misc_feature (2805)..(2806): n is a, c, g, or t
  misc_feature (2808)..(2809): n is a, c, g, or t
  misc_feature (2811)..(2811): n is a, c, g, or t
  misc_feature (2813)..(2814): n is a, c, g, or t
  misc_feature (2817)..(2817): n is a, c, g, or t
  misc_feature (2819)..(2820): n is a, c, g, or t
  misc_feature (2822)..(2823): n is a, c, g, or t
  misc_feature (2825)..(2838): n is a, c, g, or t
  misc_feature (2840)..(2846): n is a, c, g, or t
  misc_feature (2848)..(2848): n is a, c, g, or t
  misc_feature (2851)..(2864): n is a, c, g, or t
  misc_feature (2866)..(2868): n is a, c, g, or t
  misc_feature (2870)..(2889): n is a, c, g, or t
  misc_feature (2891)..(2892): n is a, c, g, or t
  misc_feature (2894)..(2895): n is a, c, g, or t
  misc_feature (2897)..(2898): n is a, c, g, or t
  misc_feature (2900)..(2911): n is a, c, g, or t
  misc_feature (2913)..(2913): n is a, c, g, or t
  misc_feature (2915)..(2916): n is a, c, g, or t
  misc_feature (2918)..(2918): n is a, c, g, or t
  misc_feature (2921)..(2921): n is a, c, g, or t
  misc_feature (2924)..(2928): n is a, c, g, or t
  misc_feature (2930)..(2931): n is a, c, g, or t
  misc_feature (2933)..(2934): n is a, c, g, or t
  misc_feature (2936)..(2937): n is a, c, g, or t
  misc_feature (2939)..(2940): n is a, c, g, or t
  misc_feature (2943)..(2944): n is a, c, g, or t
  misc_feature (2946)..(2946): n is a, c, g, or t
  misc_feature (2951)..(2953): n is a, c, g, or t
  misc_feature (2955)..(2955): n is a, c, g, or t
  misc_feature (2958)..(2960): n is a, c, g, or t
  misc_feature (2962)..(2963): n is a, c, g, or t
  misc_feature (2966)..(2966): n is a, c, g, or t
  misc_feature (2969)..(2969): n is a, c, g, or t
  misc_feature (2974)..(2974): n is a, c, g, or t
  misc_feature (2976)..(2978): n is a, c, g, or t
  misc_feature (2982)..(2982): n is a, c, g, or t
  misc_feature (2985)..(2986): n is a, c, g, or t
  misc_feature (2988)..(2997): n is a, c, g, or t
  misc_feature (2999)..(3002): n is a, c, g, or t
  misc_feature (3004)..(3014): n is a, c, g, or t
  misc_feature (3016)..(3017): n is a, c, g, or t
  misc_feature (3019)..(3030): n is a, c, g, or t
  misc_feature (3032)..(3033): n is a, c, g, or t
  misc_feature (3036)..(3036): n is a, c, g, or t
  misc_feature (3038)..(3038): n is a, c, g, or t
  misc_feature (3040)..(3040): n is a, c, g, or t
  misc_feature (3042)..(3046): n is a, c, g, or t
  misc_feature (3048)..(3049): n is a, c, g, or t
  misc_feature (3052)..(3052): n is a, c, g, or t
  misc_feature (3061)..(3061): n is a, c, g, or t
  misc_feature (3063)..(3063): n is a, c, g, or t
  misc_feature (3065)..(3073): n is a, c, g, or t
  misc_feature (3075)..(3084): n is a, c, g, or t
  misc_feature (3086)..(3087): n is a, c, g, or t
  misc_feature (3089)..(3091): n is a, c, g, or t
  misc_feature (3093)..(3093): n is a, c, g, or t
  misc_feature (3095)..(3097): n is a, c, g, or t
  misc_feature (3099)..(3099): n is a, c, g, or t
  misc_feature (3101)..(3106): n is a, c, g, or t
  misc_feature (3108)..(3111): n is a, c, g, or t
  misc_feature (3114)..(3114): n is a, c, g, or t
  misc_feature (3116)..(3118): n is a, c, g, or t
  misc_feature (3122)..(3122): n is a, c, g, or t
  misc_feature (3124)..(3124): n is a, c, g, or t
  misc_feature (3126)..(3127): n is a, c, g, or t
  misc_feature (3129)..(3129): n is a, c, g, or t
  misc_feature (3135)..(3135): n is a, c, g, or t
  misc_feature (3139)..(3141): n is a, c, g, or t
  misc_feature (3144)..(3164): n is a, c, g, or t
  misc_feature (3166)..(3175): n is a, c, g, or t
  misc_feature (3178)..(3178): n is a, c, g, or t
  misc_feature (3182)..(3182): n is a, c, g, or t
  misc_feature (3184)..(3184): n is a, c, g, or t
  misc_feature (3187)..(3187): n is a, c, g, or t
  misc_feature (3189)..(3198): n is a, c, g, or t
  misc_feature (3201)..(3201): n is a, c, g, or t
  misc_feature (3204)..(3205): n is a, c, g, or t
  misc_feature (3208)..(3208): n is a, c, g, or t
  misc_feature (3210)..(3216): n is a, c, g, or t
  misc_feature (3218)..(3218): n is a, c, g, or t
  misc_feature (3220)..(3231): n is a, c, g, or t
  misc_feature (3234)..(3234): n is a, c, g, or t
  misc_feature (3236)..(3240): n is a, c, g, or t
  misc_feature (3243)..(3245): n is a, c, g, or t
  misc_feature (3248)..(3253): n is a, c, g, or t
  misc_feature (3256)..(3263): n is a, c, g, or t
  misc_feature (3265)..(3281): n is a, c, g, or t
  misc_feature (3283)..(3286): n is a, c, g, or t
  misc_feature (3288)..(3288): n is a, c, g, or t
  misc_feature (3290)..(3290): n is a, c, g, or t
  misc_feature (3292)..(3304): n is a, c, g, or t
  misc_feature (3306)..(3306): n is a, c, g, or t
  misc_feature (3309)..(3310): n is a, c, g, or t
  misc_feature (3312)..(3312): n is a, c, g, or t
  misc_feature (3314)..(3315): n is a, c, g, or t
  misc_feature (3317)..(3321): n is a, c, g, or t
  misc_feature (3324)..(3326): n is a, c, g, or t
  misc_feature (3331)..(3331): n is a, c, g, or t
  misc_feature (3333)..(3340): n is a, c, g, or t
  misc_feature (3342)..(3342): n is a, c, g, or t
  misc_feature (3345)..(3346): n is a, c, g, or t
  misc_feature (3348)..(3348): n is a, c, g, or t
  misc_feature (3351)..(3356): n is a, c, g, or t
  misc_feature (3360)..(3362): n is a, c, g, or t
  misc_feature (3364)..(3366): n is a, c, g, or t
  misc_feature (3368)..(3368): n is a, c, g, or t
  misc_feature (3379)..(3380): n is a, c, g, or t
  misc_feature (3382)..(3386): n is a, c, g, or t
  misc_feature (3388)..(3388): n is a, c, g, or t
  misc_feature (3390)..(3393): n is a, c, g, or t
  misc_feature (3396)..(3399): n is a, c, g, or t
  misc_feature (3402)..(3407): n is a, c, g, or t
  misc_feature (3409)..(3409): n is a, c, g, or t
  misc_feature (3411)..(3414): n is a, c, g, or t
  misc_feature (3417)..(3419): n is a, c, g, or t
  misc_feature (3422)..(3422): n is a, c, g, or t
  misc_feature (3424)..(3424): n is a, c, g, or t
  misc_feature (3426)..(3429): n is a, c, g, or t
  misc_feature (3431)..(3434): n is a, c, g, or t
  misc_feature (3439)..(3439): n is a, c, g, or t
  misc_feature (3441)..(3442): n is a, c, g, or t
  misc_feature (3447)..(3448): n is a, c, g, or t
  misc_feature (3454)..(3455): n is a, c, g, or t
  misc_feature (3462)..(3463): n is a, c, g, or t
  misc_feature (3466)..(3466): n is a, c, g, or t
  misc_feature (3472)..(3472): n is a, c, g, or t
  misc_feature (3474)..(3475): n is a, c, g, or t
  misc_feature (3479)..(3479): n is a, c, g, or t
  misc_feature (3483)..(3483): n is a, c, g, or t
  misc_feature (3486)..(3486): n is a, c, g, or t
  misc_feature (3490)..(3490): n is a, c, g, or t
  misc_feature (3492)..(3492): n is a, c, g, or t
  misc_feature (3494)..(3494): n is a, c, g, or t
  misc_feature (3498)..(3506): n is a, c, g, or t
  misc_feature (3508)..(3508): n is a, c, g, or t
  misc_feature (3510)..(3511): n is a, c, g, or t
  misc_feature (3513)..(3517): n is a, c, g, or t
  misc_feature (3520)..(3523): n is a, c, g, or t
  misc_feature (3526)..(3531): n is a, c, g, or t
  misc_feature (3534)..(3534): n is a, c, g, or t
  misc_feature (3538)..(3538): n is a, c, g, or t
  misc_feature (3540)..(3542): n is a, c, g, or t
  misc_feature (3544)..(3545): n is a, c, g, or t
  misc_feature (3548)..(3550): n is a, c, g, or t
  misc_feature (3553)..(3554): n is a, c, g, or t
  misc_feature (3556)..(3556): n is a, c, g, or t
  misc_feature (3560)..(3565): n is a, c, g, or t
  misc_feature (3567)..(3569): n is a, c, g, or t
  misc_feature (3571)..(3571): n is a, c, g, or t
  misc_feature (3573)..(3575): n is a, c, g, or t
  misc_feature (3578)..(3580): n is a, c, g, or t
  misc_feature (3582)..(3586): n is a, c, g, or t
  misc_feature (3588)..(3601): n is a, c, g, or t
  misc_feature (3603)..(3609): n is a, c, g, or t
  misc_feature (3611)..(3616): n is a, c, g, or t
  misc_feature (3618)..(3619): n is a, c, g, or t
  misc_feature (3621)..(3626): n is a, c, g, or t
  misc_feature (3631)..(3632): n is a, c, g, or t
  misc_feature (3634)..(3635): n is a, c, g, or t
  misc_feature (3637)..(3637): n is a, c, g, or t
  misc_feature (3641)..(3644): n is a, c, g, or t
  misc_feature (3646)..(3647): n is a, c, g, or t
  misc_feature (3650)..(3654): n is a, c, g, or t
  misc_feature (3656)..(3656): n is a, c, g, or t
  misc_feature (3658)..(3658): n is a, c, g, or t
  misc_feature (3661)..(3662): n is a, c, g, or t
  misc_feature (3665)..(3665): n is a, c, g, or t
  misc_feature (3668)..(3668): n is a, c, g, or t
  misc_feature (3670)..(3688): n is a, c, g, or t
  misc_feature (3690)..(3690): n is a, c, g, or t
  misc_feature (3693)..(3696): n is a, c, g, or t
  misc_feature (3698)..(3700): n is a, c, g, or t
  misc_feature (3702)..(3715): n is a, c, g, or t
  misc_feature (3718)..(3729): n is a, c, g, or t
  misc_feature (3731)..(3734): n is a, c, g, or t
  misc_feature (3737)..(3737): n is a, c, g, or t
  misc_feature (3739)..(3739): n is a, c, g, or t
  misc_feature (3741)..(3741): n is a, c, g, or t
  misc_feature (3743)..(3743): n is a, c, g, or t
  misc_feature (3745)..(3745): n is a, c, g, or t
  misc_feature (3747)..(3747): n is a, c, g, or t
  misc_feature (3749)..(3755): n is a, c, g, or t
  misc_feature (3757)..(3758): n is a, c, g, or t
  misc_feature (3761)..(3763): n is a, c, g, or t
  misc_feature (3765)..(3765): n is a, c, g, or t
  misc_feature (3767)..(3767): n is a, c, g, or t
  misc_feature (3769)..(3769): n is a, c, g, or t
  misc_feature (3771)..(3771): n is a, c, g, or t
  misc_feature (3774)..(3774): n is a, c, g, or t
  misc_feature (3776)..(3777): n is a, c, g, or t
  misc_feature (3781)..(3782): n is a, c, g, or t
  misc_feature (3786)..(3788): n is a, c, g, or t
  misc_feature (3790)..(3791): n is a, c, g, or t
ttaatcgcgcttttttgctgaccaataatcggcctcattatgtcattggccgtaaattgatttaacttcgaggtgatgtaaggagtcatattagagagagctgcttcgccgccagctttttccgcttctttaatccagaaatcattaacaacctgattagaacaatggtcaagcttataatgtcgaaaatcaggatcagacagcacgcgcggcacctccatcagggtagaaccggattcaggatgcgccatgacaagaagcatggcgttgcgcatatattgttcaaacatcgggccgccagtttgtttcaggtcataaagtttatccattatttcaatcatttcattaatcacaaatgttttctgttctggatacgacgcatcgtaatcaagtaaattaagccccatcggccgttctatgtatcctggttcaaataaaatcaaatcgtcatatctttcttctggtatgttgcctaaaaccgtttctatcaagtcgccatgcggatcgatgagacaaaatccctctttgttcatagcgtcttgcaccgccatatttaggagcagagttgatttaccagtaccggtttgaccaataatataaatatgacgcatgcggtctaattttttaattctaactattttgtcaaccccgcgataaagattgtggcctaaaatcaatccttcgtcaggaacgccaagcggcgctggcgcggttttggccaccacccatttgatacttggaatattaagagtcggcaaaggaaaatgaaaaatactggtcatctcttctgaattcaaaataaaactttgtgcctcatctaaatttcgataaataaaatcctcaatgaatctcttgtctcttgttttagttggcaataatccattgccataatggtaaattgaatattgagcgtaagaattgagaatattgtctaaatacatcttcgccctttctttgtctttggctgaaacaagaactctgatattgacgtccaatcccgcctttgatgttttttcctccagatttttgaccacctcatcctccatcggtgaaagttgataacgtttcttttcttcttcatacggtgtttttttaggctgagttgtcgttgcctgttcaatttcttttaatattttagagaagagacccttctcaggccccaatgcttcagtaaattttttcccttgtttcatctcttgagcaattttggcgcctcttttatgccactcgcccttagctgagcgggtaataacctggatcacggcttgattgcctttttctattttagagacggcgttaacgattgattctaaggggtctgtttttaattttttataagtttttatcggcaaaatccagggttgtgacaaacgaaaataagcggccgcgacctcgccctgttccaaaaaagcattatattcatctacctcttcaatgctggcgttaggatattgggcgtggatttgctcttcaaaaaattgttgtaaatatcttggcgctaccacataaaaagaaatagatccgtctttgtcaagaaatatttcaaaagaaaaatgatcgcttcggccgaaaagacctgttttaactcctctctgggcgcgcaagccagccacattatcaaaaaaattttctgttggcgctaaaagttcctccattgttttctttttttcttcctcagtcatttccggcggcagagtcaccaagaggaaagctttatctaaactatacctgagggctgctcttcgcttaagaaagcttttaaataaaaagaaagaaagtaaaaaaataattacccctccaatgactaaaaatatttgtggagcgattgaaattataccgaaaggcgtgtcaaaagtataaaacataaattattaactaattaaccgatatcatcgactattcttctgcccctatattcactgtgggctcagaggaagcgtatttgcgaacaaaaatccaatcactatagaaacgatgattgggttcgccanaccaagcccnaggacctatattcaaccttaaattttctgttgtctgacttgctgtatgggtaatactttcctcactcccaccgttttgttgtcttatgaattttacattattagaggcagaagttccgtcatagtaaagtttttgcctgaaccagatattatcccagtatccagcgagtttaacaccagctgtacaaggatgaggataaaaactaggagcatttgaagcattacaaccgctataagtataattatcatactcaattcctgtataataagtggagtaatcatatttctgaacataaagcccgccntcttcctgacaatnaccannannannanaacaacnannacnncnnnnnnnnnnnnnnctncnnntanttnntnttntnnnnnnannannnanntnnnntnttgnccnnncacnacnannaccancnccnncnncnncatanannnntnngnntnnnacanaancnnnncnnccgccnccnncnncnnnnnnnnttntnnnnnntnntnntnnnnnnnnnnntnntnnnnnntcannannaaaaaaaaaannannannatnannnnnnnnnnnnnnnnnnnnnnngnngnngtnnnnntaannnntnnnnnnngnngnngtngtnntnnnnnnnnnnttnntnnnnnnnncnncnncngnngnnnnnnnnnnnnttnttntnntntnannanaanaannngtnntntnntnntcatcannannnannanannannatcntcnnnnnnnnnnnnnnnatnntnntnnntnntnntnnntnnttnntnatnancagnngnngnngnngnannagnannannannnnnnnnnnnnnntnnnnnnnangannnnnnnnnnnnnnannnannnnnnnnnnnnnnnnnnnnannannannannnnnnnnnnnntntnntnctnctnnnnnannannannannatnntnataannngnagnnncnncancancagcngnnncttnttnntnnnnnnnnnntnnnntnnnnnnnnnnncnncnnnnnnnnnnnnannagnancngnnnnntnntantagtaatantnannnnnnnnngnnnnnnnnnnannannngntnnngncnnnnnntnnnnagnannnaaanangnngnagaagnagtnnnggnnnnnnnnnnnnnnnnnnnnncnnnnnnnnnnccncctncntcntnnnnnnnnnnatnatnnttntnnnnnnnanannnnnnnnnnnntantnnnnnttnnnttnnnnnntcnnnnnnnntnnnnnnnnnnnnnnnnncnnnngnantnnnnnnnnnnnnnanaannanannannnnnaannncaacnannnnnnnnanaannanaannnnnntaannntnnntnattttttcatnntnnnnntnannnnatnnnnttnnnnnntntnnnnttnnntgntntnnnntnnnnttttntnnttttnntttttnnttttttnnaanttcttngnngctntttncgncgangncngaannnnnnnnnantnntnnnnnctnnnnaannnnnnaanaagncnnnannagnnngcnngngatnnnnnntnnngntnnnttnnngnnnnntnnnnnnnnnnnnnnannnnnnntnnnnnnanntnnnnnnatttnnanntntttnnnntnnttnnnnntnantannaantantnnnnnnnnnnnnnnnnnnncnaannnnannnannnnnnnnnnnnnnttnnnnnnnnnnnnannnnaanananantnanannnnnnnannatnnnanantntnttntnntttnntttnnntnnctttctctaccagagctagaattttcgccgtttttctttttgcttcttcttctaagaaaaatttgtttattcccggcaccaccctcagccattctttaatgagtttcaaaattttatagatgactatttttgttttggaaataacttttttaatttccgaaaccgtttcatcccccttttttctgaattgttctctaagattttgaggc

SEQ ID NO: 545 - DNA, 4000 bp, Escherichia coli
  misc_feature (634)..(634): n is a, c, g, or t
  misc_feature (1800)..(1800): n is a, c, g, or t
  misc_feature (1988)..(1990): n is a, c, g, or t
tgccgaacgtttgaaagagagcgaattataatttaaatatcgtaaaccataaactgtaaacatagcaatgaacaagcaacaattatttgaaaatatccaaaagaaaaaatcattcctctgtgtaggactggacaccgacataaagaagatccccgaacatctgttaaaagaagaagatcctatcttcgctttcaacaaagccatcattgacgctaccgccccttattgcatcgcctataaacccaatctggccttttatgaaagcatgggcgtaaaaggatggatcgctttcgaaaagactgtatcctacatcaaggaaaactatcccgaccaattcatcattgccgatgcaaaacgtggcgatatcggaaacacttcggccatgtatgcccgcacattctttgaagagctggacattgactcagtcaccgtagctccttacatgggtgaagacagcgtgactcccttcctgagttacgaaggcaaatgggtaatcctgctagcgcttaccagcaacaagggttcccacgacttccagctgaccgaggacaccaacggcgaacgccttttcgaaaaagtattgcgcaaatcacaagaatgggccaacgatgaaaacatgatgtacgtagtaggngccacacaaggacgcgctttcgaagacatccgtaaaattgttcccaaccacttcctgcttgtacctggaatcggcgcacaaggaggttctctagaggaagtctgcaaatatggcatgaatagtacctgtggacttattgttaattcaagccgtgccattatctatgcggataaaactgagaattttgcgactgtagcaggacaagaagctcagaaagtccaggcacagatggagaaaataatgtgccaataaaacaatgtgctaatatgcaaattaccaggtagatacatagcgtaatacattggtttaagcatatcagcacactgaataattattccccatgagtgaccgaaaaattataaatgaccccgtcttcgggtttatcaacatcccgaaggggttactatatgacattgtatgtcacccattgctgcaacgtcttacccgcatcaagcaactgggcctgtcctctgccgtatatccgggagcacaacatacccgtttccaacactcattaggcgctttccacttaatgagcgaaacgatcaagcaccttaccgccaaaggtaacttcatctttgacagcgaagcggaagccgtacaagctgccatcctgttacacgacatcggacacggtcccttctcccatgtgctggaaaacacattggcaggaggcgtttcacatgaagaaatctccttgatgctgatggaacgaatgaacaaggacatgaaaggtcaactcaatcttgccatacagatattcaaagatgaatatcccaagaaattcctgcaccaactggtcagcggtcaattggatatggatcgtttggactatctgcggcgtgacagtttctataccggtgtatccgaaggcaatatcgggtccgcccgcatcatcaaaatgcttgatgtaaaagacgatcacctggtagtagaatccaaaggcatttactccatcgaaaacttcctgatgtcccgccgcctgatgtactggcaggtatatctgcacaagacctccgttgccagtgaaaaaatgctggtcaacactctgacacgagcaaaggaattagccttacgtggcgtagagctgttcgcctcacccgctttaagattctttttataccatcctattgataaaaaagaattttataacagcccggattgtnttgaaaattttattcaattagatgataatgacatatggactgcactgaaagtttggagcaatcacagcgatgtggtattgtccactctgagtcgtggaatgattaacaggaaactattcaaagtagaggtaacctcctcttccatcacaaaagcacgaaaagaagaaattctttcaagaataagtaannnactgaatatcaacaagaaagaagcaaaatacttcctatccatatccagtatagaaaacaatatgtataaaaaggaggatgacagtattgaaatcatctataaagatggaagcacccgcgatatagccaaggcttcggatatgctcaacatctctcttctctcccgaaaagtcaaaaaatattatatatgttacctgcgttccgaaaacgacggacattaaataattagcgaattgtacggatatataaaaaaaaaatgcgtaatttgcataattaatgatgtgtttacactaacatgtaacacgcaagtaacaaaactgaaacatttagaacataaagaattagacagtattatggagttctcagctaaacaaattgcggaatacatccagggaattattgttggcgatgaaaacgcaactgtgcatacttttgctaaaatagaggaaggcgtgccgggagcgatttcttttctttcaaatcctaagtatactcattacatttacgatactcagtctaccattgtgttggtaaacaaagatttcgttcccgagcaagaagtaaaagctaccttaatcaaggtagacaacgcctacgaaagtctggctaaactactgaccctctatgaaatgagcaaacctaaaaagactggtatagatccgctggcatacgttgcccccactgcgaagttggggaaggatgtatatatcgctccgtttgcctgcgtaggcgatggtgctgagattggtgacaacacttccctccacccgcacgctactgtaggaagccatgccaaagtaggtaataattgtacactttatccacatgccaccatctatcacgactgcttggtaggaaaccactgtaccctgcatgcaggctgcgtaatcggtgctgatggattcggattcgcaccttctcccgaagggtacgaaaaaattccacaaataggtattgccatcatagaagataatgtggagattggtgctaatacctgcgtagatcgtgccaccatgggcgccaccattgtacataaaggagtgaaactggataacctgatccagatagcacacaatgtggaagtaggaagccacactgtcatggcatcacaggtgggtattgccggttccaccaaagtaggtgaatggtgcatgtttggcggacaggtaggactagccggacatattaagataggtgacaaggtaggtatcggcgcacaagcaggcgttcccggtaacgtgaaatccaacgagcaaattctaggcactccggccatcgatgccaagaatttcatgaaatcatcggccgtatacaaaaaactgcccgaaatttacaccacactgaacgccatgcagaaagaaatagaagaattaaaaaaacaactaaataaataaaccccatgttgaaacagaagacattaaaaggcagtttttctttaaatggaaaaggccttcacaccggagtaaacttgacggtgacattcaatcctgcaccggacaaccacgggtataaaatccaacgaattgatcttgaaggacaaccaataattgatgccgtagcagaaaacgtaggtgatactacccgcggcactgtgctgatgaaaaacggaataaaagtaagtacagtagaacatgctttggcagctctttatgcagctggtatagacaactgcctgattcaggtaagcggtcccgaattccctattctggacggcagtgccaaagcgtatgtagaaaatatacagcgtgtaggaatcgaagaacagaatgctgtcaaggattactatatcataaaatcaaaaatcgaattcagggacgaggaaaccggatcttccatcattgttcttccggacgaaaatttcagtgtgaatgcactgatctcttatcagtctaaaatactgtccaatcagttcgccacactggaagacatggctaaattccccaccgaggtagcttccgcgcgtacctttgtattcgtccgcgaaatagaaccattgctgggtgccggactg

SEQ ID NO: 546 - DNA, 4000 bp, Escherichia coli
  misc_feature (1)..(7): n is a, c, g, or t
  misc_feature (9)..(11): n is a, c, g, or t
  misc_feature (14)..(14): n is a, c, g, or t
  misc_feature (18)..(20): n is a, c, g, or t
  misc_feature (22)..(26): n is a, c, g, or t
  misc_feature (28)..(35): n is a, c, g, or t
  misc_feature (40)..(40): n is a, c, g, or t
  misc_feature (42)..(44): n is a, c, g, or t
  misc_feature (48)..(48): n is a, c, g, or t
  misc_feature (51)..(52): n is a, c, g, or t
  misc_feature (54)..(54): n is a, c, g, or t
  misc_feature (56)..(56): n is a, c, g, or t
  misc_feature (59)..(59): n is a, c, g, or t
  misc_feature (62)..(62): n is a, c, g, or t
  misc_feature (64)..(64): n is a, c, g, or t
  misc_feature (66)..(68): n is a, c, g, or t
  misc_feature (70)..(74): n is a, c, g, or t
  misc_feature (79)..(80): n is a, c, g, or t
  misc_feature (83)..(83): n is a, c, g, or t
  misc_feature (85)..(85): n is a, c, g, or t
  misc_feature (87)..(88): n is a, c, g, or t
  misc_feature (93)..(93): n is a, c, g, or t
  misc_feature (97)..(97): n is a, c, g, or t
  misc_feature (99)..(99): n is a, c, g, or t
  misc_feature (102)..(102): n is a, c, g, or t
  misc_feature (104)..(105): n is a, c, g, or t
  misc_feature (108)..(108): n is a, c, g, or t
  misc_feature (110)..(110): n is a, c, g, or t
  misc_feature (118)..(119): n is a, c, g, or t
  misc_feature (121)..(121): n is a, c, g, or t
  misc_feature (127)..(127): n is a, c, g, or t
  misc_feature (131)..(133): n is a, c, g, or t
  misc_feature (136)..(136): n is a, c, g, or t
  misc_feature (138)..(139): n is a, c, g, or t
  misc_feature (152)..(152): n is a, c, g, or t
  misc_feature (165)..(165): n is a, c, g, or t
  misc_feature (183)..(183): n is a, c, g, or t
  misc_feature (195)..(195): n is a, c, g, or t
  misc_feature (249)..(249): n is a, c, g, or t
  misc_feature (289)..(289): n is a, c, g, or t
  misc_feature (295)..(295): n is a, c, g, or t
  misc_feature (320)..(320): n is a, c, g, or t
  misc_feature (337)..(337): n is a, c, g, or t
  misc_feature (343)..(343): n is a, c, g, or t
  misc_feature (348)..(348): n is a, c, g, or t
  misc_feature (364)..(364): n is a, c, g, or t
  misc_feature (397)..(397): n is a, c, g, or t
  misc_feature (460)..(460): n is a, c, g, or t
  misc_feature (469)..(469): n is a, c, g, or t
  misc_feature (493)..(493): n is a, c, g, or t
  misc_feature (505)..(505): n is a, c, g, or t
  misc_feature (565)..(565): n is a, c, g, or t
  misc_feature (583)..(583): n is a, c, g, or t
  misc_feature (628)..(628): n is a, c, g, or t
  misc_feature (642)..(642): n is a, c, g, or t
  misc_feature (658)..(658): n is a, c, g, or t
  misc_feature (757)..(757): n is a, c, g, or t
  misc_feature (823)..(823): n is a, c, g, or t
  misc_feature (850)..(850): n is a, c, g, or t
  misc_feature (853)..(853): n is a, c, g, or t
  misc_feature (886)..(886): n is a, c, g, or t
  misc_feature (1578)..(1578): n is a, c, g, or t
  misc_feature (1988)..(1989): n is a, c, g, or t
  misc_feature (1998)..(1998): n is a, c, g, or t
  misc_feature (2044)..(2045): n is a, c, g, or t
  misc_feature (2730)..(2730): n is a, c, g, or t
  misc_feature (3388)..(3388): n is a, c, g, or t
  misc_feature (3733)..(3733): n is a, c, g, or t
  misc_feature (3763)..(3763): n is a, c, g, or t
  misc_feature (4000)..(4000): n is a, c, g, or t
nnnnnnncnnnttntttnnntnnnnnannnnnnnnttggntnnntttnccnnangnaanggntngnnntnnnnnaaaannaantntnnaaaanaaananggnannaangnaattttanntnaagttnaaannnaanannactaactcacttnacctttaattacntcccaaagaccataaaanatagcgagccanatcagcccttttataagaaaaaaaagaaaaggcaggccaatcaatagccatttntttttaatgcgctttttaaggaatttaatcactaaagtgncaggcnacgctatggcttgatgaggattcgntaaactctggcttttcnattgancaaanctcttgcgctttatgncatctcgtcctaaatacacagcctgaaggtggnttgattggtgagggtaagtcaccctctattaaaattaatttcttgtttttttcaatactaggntcaggaatngggactgcagaaatcagcgcttgngtataggggtgncttggattttgataaatctcattactgtttgcaagttccaccatatttcccaaatagagnaccataatttttgtactnatatgtttcacaacacttaaatcgtgagcaataaatatcagcgcnaaatccatctcttnctgtaaatccatcagnaaattgacaacttgcgcctgtatcgaaacatctagagctgaaactggctcatcacaaataatcagctttggttttaatattaaagcgcgagctataccnattctttggcattgcccccctgagaattcatgaggatatctattaactagattatcaagaagtccnactttattcatcacatcactcactcgngcntgcacatcagattcagccgttttgggatagtgngttcttaaaggttcagcaataatttctccaatattcattcttggatttaggcttgccaaagggtcttgaaaaatcatttggatttgtttgcgatattgccttgtttcagaattactgaggcttagaagatcatttccaagccatagaaccttgccagcttcagctggaaccattttaacaatggcccttgccaaggtagatttaccgcagcctgactccccaacaatgcctaatgtctctcctgaatttaaagtgaacgaaatatcattaactgcttgaagtttttttggcttcgtccagggcatatcgccttcagaactaacatcaaagtttacctttaagttttctacctgaagaattgtctgtttactcatactattctctcaacctcgacgtgacaagccctgtaatgaccactcttgtctacactagacaaaatcggagatacgtttgagcatttatcattagagtaattacatcttggtgaaaatggacagccttcagggggcttcatcatgtttggagggttgcccggaattgtgattaatctctcctctgaatcattcagtctaggaacagcgctcattaaaccctgagtgtatggatgtgttggctttgaatataggctttctgttttcccaatttccatgatttcaccgccatacataaccagcatatcatcactgttaccngcaacgactcctagatcatgagtaattaaaataatagacatcccaaagtctttctgaaggtctgccagaagctgcattatttgtgcctgaactgtaacgtcaagcgcagtagtaggctcatcagcgatcagtagcttaggtcggcataatagagacatagcaatcattacgcgctgcctcatccctcctgagaattcatgaggatacattctgattcggttacttgcatcaggaatccttacagcatccagcatgctaattgactgtttaagtgcgtctgattttgagagtccttgatggtgcactagtacttcagtcatttggtcagagactctgacatagggattaaggctcgtcatcgggtcttgaaaaatcatggcgattttttctgctcgaatcttgtttagttnnttgttaganagattaagaatctcttcgccttgaaatttaacacttccagttgcgnntccattgtgatccaaaagaccagtcatagcaaatacagtttgacttttgccactacctgactcaccaacaatagctaaaatcttcccttcatctaatgaaaagttgacattattaacagcgttgacttcaccatcagcagtttcaaacctgacctttagattgctgacttctaataaactcatttagaactacctttcctttggatcgagcgcatcgcgaagaccatccccaataaaataaaaacaaaaaagactgacaacaaaaaaagctagtggaaagagtagttgccactcggtgtcataactgatcgttcctgccccttcctttattaaagcgccccagctggttgaaggctcctgaactcccaaacctaggaatgaaataaaactctctgcaagaataattccaggaaccaataaggttgcgtagactgctacaattcccaaaagattaggaacaatatgacgcgttataatcttgaaatcactcactccagtaacttttgctgcctcaataaattctttattctttaggttaagtgtttgacctcgaacaatcctactcatatcaagccaagatagaagcccaattccaataaacagcatcccaattgatcgtccaaaaaccacgagaaggagaattaaaacaaacatatagggtattgacatcaatatatcaacaatncgcatcatgatttgatctgtcttgcctcctaaatatcctgaagtagcgccatataacgttccaacaatcactgcaactgatgcacctaacactcccaccattaaggaaatttgtgtgccctgaataactcttgaatagagatcgcgtccaaggtcatccgtaccaaagtaatggccactctcaatagagggcattccaactctagcagcagagcccatcgcattccaatcgatctgttcatagctccagacagcaaagtaaggacctacaaaggaaaaagaaacaattaggattaatataaatagactcaaagttgcagccttattttgaataaaacgtaacctggcatctttccagagagagcgtccagctccattctcagagagattctctgccatatttttgatcttgtttttattagccactatcatttaattaataccgtattttgggatctatccaggcatataacagatcagcgatcaaactaaataaaatagtaagcccccctacaacaattgttattcccatcatgactgaatagtcacgattaaaagctgcattaacaaaaaagtagcccattccccctgttgaaaaataaatatcaatgataactgaacccgtaatcagtccaacgaatgctggccccaaataaganataactggaagaagggatggtttgagaacatgcctaaagaaaatcaccttagttggaaggcctttagatttagctgttctaatatagttagtgtttaacacctctagcattgatgatcgagtaattcgagcaattgaagccatatagcttgtagagagtgcaatcactggcataacgaggtattcccatgaacccccattccagccacctccaggaagccaatctaaccagagtgtaaaaacaataatcaaaagaggtgccatgacaaaatttggtaaaacttgcgctccaattgagactcctacagccaggtaatctatccaagtattttttcgaatagctgcnatagcccccaaaggaattccaactccaacngcggcaataaatgaccaaaaaccgtacttcaaagtaattggaaaaccatgcccaattatctcattaacagttctgtcatgatatttgtaggacggtccgaaatcaaactcagtgacaacaccccacaaataattaatcatttgacgccatatgggctggtctaagccatacttggcttcaatattagcaagaacttgagcgggtagtggtctctcggatgtaaagggacctccgggn

SEQ ID NO: 547 - DNA, 4000 bp, Escherichia coli
  misc_feature (168)..(168): n is a, c, g, or t
  misc_feature (525)..(525): n is a, c, g, or t
  misc_feature (914)..(914): n is a, c, g, or t
  misc_feature (1574)..(1574): n is a, c, g, or t
  misc_feature (1809)..(1809): n is a, c, g, or t
  misc_feature (1963)..(1963): n is a, c, g, or t
  misc_feature (1984)..(1984): n is a, c, g, or t
  misc_feature (1987)..(1987): n is a, c, g, or t
  misc_feature (1993)..(1993): n is a, c, g, or t
  misc_feature (3277)..(3277): n is a, c, g, or t
ccgtcgccgagcaggttcaccccgaccaccattaggacgatgaccaggcccggcagggtcaccagccaccatgaggtggtgatgtagtcctggccatcggagatgatgcggccccacgtcgcgaacggccgctgcgggccagcaccgaggtagctcaacgcgctctcnagcaggacggcctgggcgagcagtagcaggaccaccagcgacgccgccttgatgatgttcggtagcacatggcgaaccagcgtcgcgaacttgccgagtccgagcacccgggcggcatctatgtagggcttctcgcgctcgaccaggaccaaagaccgcgtgatgcgggcgatctccggccactgtgcgatggcgatcacgaaggtgatgaccggaatggatgagccgaacaacgcgaccacgagcagcagcatcatcaggagtgggagcgagagttgcgcttcgaggagacggctgaccacagtgtccacccagcccccgaggtatcccgcgagtgaaccgagggtcaggccgatnagcccggacacgacgaccgcgagaacaccgatggtcagcgagacctggccgccgaagagaacacgggcgagcaggtcgcggccgagttggtcggtgccgaagagatgtccatcggtcagcggtgaaagccggcgggcgccgaggtcggtcgcgtcgggcgacgggagcggcagtacccgagcgaacgcaacgggcaggatgaccaccagtgcgcagatgctgcccacccagattttcaggcgactgtcgcgggcgcggcgggtgaccccggcgcgggcgatgtccttggcggtgacggcactgggacgcaggcgttcggtgtcgtcggtgacggtggtcatcagttcgtaccctttcccagccggacccgcgggtccagaagcggatancagagatcgacgagcagctggaccaggatcgccaggaccgcggtgacgaggactgtggcctggatcagcggatagtcgcgcgtttcgagcgcccgcacgaccagggagccgacgccaggccaggcgaacaccacctcgaccaccaccacgccgttgagcattgaggcgaaccgggtgccgagcgcggtcagcacgggaatcgcggaattgcgcattgcgtagcgccacgtcagctcacgctgcgacacgccacgtgctcgggcgaccgtcatgtacggcgacgcaaacgagttgaccatctcgcgtcggaccattcgggagatcagcgcgatctggagcacggcgacggtcaccgcgggaagaaccagcgacgaccactgggtgaatccggcggacggaaggatcgggaggagcaccgcgaagatggtgaggagcatcagcccggtccagaagtcgggcatcgactgtcccgcgatggtgaccacattggcagccagctcgcgccgggtgtctgcgtgccgcgccatccaggtgcccaggggaatcgcaatcacggtggtgagcaggattgccgcgaccgcgagggtgatcgtgtagggcagccggcccagcaccacgtcgagcgccggtgcctgaaacgagtacgacgtcccaagatcnagtcgcagcagccccttgaggtagagcaggtactgcacgaacacggaccgatcaaggcccatgtcggtgcggatacgcgcgaggtcttcgctggtggccagcgggcctgccatcgcatacgcggggtcgccgggtgccatccggatcagcacgaaaacagtactgagcgtgaggaacagggtgagcagactctgcgcgagtcgttttgcgatgtagcgaggcatggcagcccggngtactgatttcttgccgacgggcgcagcgcggggcgcgccgacgctcgcgggttccgcgagttgctgtgtcatctgttcaccaaccgtccggtgtgtactgatcggcgggccgctgaccgcggcgtcgctgtaacccagctcacaatgccatcnttgcgtgattcacgcaagtanggntttttnattgcgcattacacgcagttctgcgtatgctgtcactgtgctggtgatcacagtcgcccggttcggtggccgcgattcgagcaccccagcttccgcaattactatttcgtcgagaggtcgatgatgaccagatctcccttgcagcatgagttttcgagaaggaccctgctgcggtcgggcctggctctgggtgccggcatctcgctcggttcgctcgtcggctgcgctaccccgaccggggcacccggaccgcgcacggccggcctggcgctcaaccgctcgctggtcagcctggacaacaagctcaaccagttcgatgccgcgctcaccgtgcaacgcgccgtgcgccagtcgctgattacgctggatcagcacctcaagccgcagctcgtcctggcggacaggttcgagctcaccaacccgaggcagtggtatgtgcacctgcgcccgggaatcatctactccgacggacggccggtgcaggtgcaggacgtcgccaccgccctgaagatgtacagcgaggtcagcggctcgttcgtcggcgggttctttccggagtggccgacggtcgatcagatcgacgagtccagcttcacgctcaacacggagcgcccagtcccggtactcgattacctgatgaccaacatcctgatcactccggccgcggacaaccgccccgaggaactgcagtccggcgtcggttcaggtccctacatcgtcaccgccagcaaccgcggaaccggcaactacacgctgcagaaaaaccctagatattggggccccgcgccgaacatcgagtccgtcgacgtccggttcgtccccgacgagtccaaccgggtcgtgtcgctgcgcagcggacagatcgacgtcatcgattccatctccccggactccgccgatcaactctccgggctgccgggggtcgccatcgatcgtgtcgacggtgtgcgcctcaaccagctgttctacaacttccgcaaaccgccgggccacccgctcgccgacgcgcgggtgcgccgcgcactgacctacgcgatcgacggtaagtcgttgattgacgaggtgatgcagggctcggccaccgcgtccaagggggtcattcccgccactctcgtcggcgcgatcgagacgggcgagtacatctacgatcccgcccgcgcccgcaaagaactcgatgcgctgggagtccgcgatctcaatctcaagatcatttgggagaccggcgaattcgtcgccgacaccgacatcatggaagccgtcgtgcagatgctctcagcagtgggngtccgcccgaagttgcagcagttcgagcccggcggcgacatctccacctggcgtcagggcaaagccggcgactgggacgtactcggcaacggctaccccggccccaccggcctcggcatcaccatcatgcagggaatgtacgccggcaccgccgaaaaggaggccacccgcgacacctaccacggctacatcttcccgccgatcaccgacatgatcacgcgcgcgtcggaggaccccgaccccgcccggcgcctagccctgctggccgatgcacagcgaatgatctgggacacctgcccaatgatgtggtcgttcgtccccaaggtcgtcctcgcccgccgaagcaggatcggcaatgtgggtctgcgccccaccaactcctatgacctcagcgccgccaccctcagcgcataaccctccaccacagatccggagcaccgatgaccgacccgacaggcaccatttccggaagtaccgacggcgtcgtgcggtcgagcgagcagggcggacgatcggatgctctgctgcccgcgccgcaggtgcagaatcacgcagcgaatctcgctctcctgccagataattcgcttggctgtgtctggttcgcgggcacccaggagggcgtccccgacatcagtgtctggttctcggccctgacgccgggctcagaccagtggtcgacaccggtgcaattatccgacgaccccagccggtcggaacagaacc

SEQ ID NO: 548 - DNA, 4000 bp, Escherichia coli
  misc_feature (1)..(1): n is a, c, g, or t
  misc_feature (5)..(5): n is a, c, g, or t
  misc_feature (9)..(9): n is a, c, g, or t
  misc_feature (11)..(15): n is a, c, g, or t
  misc_feature (18)..(20): n is a, c, g, or t
  misc_feature (22)..(22): n is a, c, g, or t
  misc_feature (25)..(25): n is a, c, g, or t
  misc_feature (27)..(27): n is a, c, g, or t
  misc_feature (30)..(30): n is a, c, g, or t
  misc_feature (32)..(32): n is a, c, g, or t
  misc_feature (34)..(35): n is a, c, g, or t
  misc_feature (38)..(38): n is a, c, g, or t
  misc_feature (40)..(41): n is a, c, g, or t
  misc_feature (43)..(43): n is a, c, g, or t
  misc_feature (47)..(52): n is a, c, g, or t
  misc_feature (54)..(56): n is a, c, g, or t
  misc_feature (60)..(62): n is a, c, g, or t
  misc_feature (64)..(65): n is a, c, g, or t
  misc_feature (67)..(68): n is a, c, g, or t
  misc_feature (71)..(71): n is a, c, g, or t
  misc_feature (73)..(74): n is a, c, g, or t
  misc_feature (80)..(80): n is a, c, g, or t
  misc_feature (82)..(88): n is a, c, g, or t
  misc_feature (90)..(92): n is a, c, g, or t
  misc_feature (94)..(95): n is a, c, g, or t
  misc_feature (97)..(97): n is a, c, g, or t
  misc_feature (101)..(102): n is a, c, g, or t
  misc_feature (106)..(108): n is a, c, g, or t
  misc_feature (115)..(115): n is a, c, g, or t
  misc_feature (117)..(119): n is a, c, g, or t
  misc_feature (121)..(122): n is a, c, g, or t
  misc_feature (124)..(126): n is a, c, g, or t
  misc_feature (129)..(131): n is a, c, g, or t
  misc_feature (136)..(136): n is a, c, g, or t
  misc_feature (138)..(139): n is a, c, g, or t
  misc_feature (141)..(143): n is a, c, g, or t
  misc_feature (147)..(148): n is a, c, g, or t
  misc_feature (151)..(151): n is a, c, g, or t
  misc_feature (154)..(155): n is a, c, g, or t
  misc_feature (158)..(159): n is a, c, g, or t
  misc_feature (161)..(162): n is a, c, g, or t
  misc_feature (164)..(166): n is a, c, g, or t
  misc_feature (168)..(168): n is a, c, g, or t
  misc_feature (170)..(170): n is a, c, g, or t
  misc_feature (172)..(172): n is a, c, g, or t
  misc_feature (176)..(177): n is a, c, g, or t
  misc_feature (180)..(181): n is a, c, g, or t
  misc_feature (183)..(185): n is a, c, g, or t
  misc_feature (187)..(189): n is a, c, g, or t
  misc_feature (194)..(194): n is a, c, g, or t
  misc_feature (196)..(196): n is a, c, g, or t
  misc_feature (198)..(199): n is a, c, g, or t
  misc_feature (201)..(202): n is a, c, g, or t
  misc_feature (204)..(204): n is a, c, g, or t
  misc_feature (209)..(209): n is a, c, g, or t
  misc_feature (211)..(211): n is a, c, g, or t
  misc_feature (213)..(216): n is a, c, g, or t
  misc_feature (218)..(218): n is a, c, g, or t
  misc_feature (220)..(220): n is a, c, g, or t
  misc_feature (223)..(223): n is a, c, g, or t
  misc_feature (225)..(225): n is a, c, g, or t
  misc_feature (227)..(230): n is a, c, g, or t
  misc_feature (234)..(234): n is a, c, g, or t
  misc_feature (237)..(243): n is a, c, g, or t
  misc_feature (246)..(247): n is a, c, g, or t
  misc_feature (249)..(252): n is a, c, g, or t
  misc_feature (256)..(257): n is a, c, g, or t
  misc_feature (261)..(261): n is a, c, g, or t
  misc_feature (264)..(264): n is a, c, g, or t
  misc_feature (267)..(267): n is a, c, g, or t
  misc_feature (272)..(272): n is a, c, g, or t
  misc_feature (274)..(275): n is a, c, g, or t
  misc_feature (279)..(280): n is a, c, g, or t
  misc_feature (282)..(283): n is a, c, g, or t
  misc_feature (285)..(285): n is a, c, g, or t
  misc_feature (287)..(288): n is a, c, g, or t
  misc_feature (291)..(292): n is a, c, g, or t
  misc_feature (294)..(297): n is a, c, g, or t
  misc_feature (299)..(302): n is a, c, g, or t
  misc_feature (304)..(305): n is a, c, g, or t
  misc_feature (308)..(308): n is a, c, g, or t
  misc_feature (310)..(312): n is a, c, g, or t
  misc_feature (315)..(316): n is a, c, g, or t
  misc_feature (320)..(320): n is a, c, g, or t
  misc_feature (322)..(323): n is a, c, g, or t
  misc_feature (325)..(325): n is a, c, g, or t
  misc_feature (328)..(328): n is a, c, g, or t
  misc_feature (330)..(330): n is a, c, g, or t
  misc_feature (332)..(332): n is a, c, g, or t
  misc_feature (337)..(337): n is a, c, g, or t
  misc_feature (340)..(343): n is a, c, g, or t
  misc_feature (345)..(347): n is a, c, g, or t
  misc_feature (349)..(349): n is a, c, g, or t
  misc_feature (351)..(353): n is a, c, g, or t
  misc_feature (355)..(356): n is a, c, g, or t
  misc_feature (359)..(359): n is a, c, g, or t
  misc_feature (361)..(363): n is a, c, g, or t
  misc_feature (366)..(370): n is a, c, g, or t
  misc_feature (372)..(372): n is a, c, g, or t
  misc_feature (374)..(374): n is a, c, g, or t
  misc_feature (376)..(376): n is a, c, g, or t
  misc_feature (378)..(382): n is a, c, g, or t
  misc_feature (384)..(384): n is a, c, g, or t
  misc_feature (386)..(386): n is a, c, g, or t
  misc_feature (388)..(388): n is a, c, g, or t
  misc_feature (391)..(402): n is a, c, g, or t
  misc_feature (405)..(406): n is a, c, g, or t
  misc_feature (409)..(409): n is a, c, g, or t
  misc_feature (411)..(412): n is a, c, g, or t
  misc_feature (416)..(416): n is a, c, g, or t
  misc_feature (425)..(429): n is a, c, g, or t
  misc_feature (431)..(431): n is a, c, g, or t
  misc_feature (433)..(433): n is a, c, g, or t
  misc_feature (437)..(437): n is a, c, g, or t
  misc_feature (442)..(443): n is a, c, g, or t
  misc_feature (445)..(445): n is a, c, g, or t
  misc_feature (447)..(447): n is a, c, g, or t
  misc_feature (449)..(450): n is a, c, g, or t
  misc_feature (452)..(452): n is a, c, g, or t
  misc_feature (454)..(455): n is a, c, g, or t
  misc_feature (457)..(457): n is a, c, g, or t
  misc_feature (459)..(459): n is a, c, g, or t
  misc_feature (462)..(464): n is a, c, g, or t
  misc_feature (467)..(475): n is a, c, g, or t
  misc_feature (478)..(480): n is a, c, g, or t
  misc_feature (483)..(485): n is a, c, g, or t
  misc_feature (488)..(488): n is a, c, g, or t
  misc_feature (490)..(490): n is a, c, g, or t
  misc_feature (492)..(493): n is a, c, g, or t
  misc_feature (495)..(495): n is a, c, g, or t
  misc_feature (497)..(498): n is a, c, g, or t
  misc_feature (500)..(500): n is a, c, g, or t
  misc_feature (502)..(502): n is a, c, g, or t
  misc_feature (504)..(504): n is a, c, g, or t
  misc_feature (506)..(507): n is a, c, g, or t
  misc_feature (509)..(509): n is a, c, g, or t
  misc_feature (511)..(514): n is a, c, g, or t
  misc_feature (516)..(518): n is a, c, g, or t
  misc_feature (521)..(521): n is a, c, g, or t
  misc_feature (523)..(523): n is a, c, g, or t
  misc_feature (525)..(529): n is a, c, g, or t
  misc_feature (532)..(536): n is a, c, g, or t
  misc_feature (538)..(539): n is a, c, g, or t
  misc_feature (541)..(545): n is a, c, g, or t
  misc_feature (548)..(548): n is a, c, g, or t
  misc_feature (550)..(552): n is a, c, g, or t
  misc_feature (554)..(554): n is a, c, g, or t
  misc_feature (559)..(566): n is a, c, g, or t
  misc_feature (568)..(568): n is a, c, g, or t
  misc_feature (570)..(570): n is a, c, g, or t
  misc_feature (572)..(573): n is a, c, g, or t
  misc_feature (578)..(579): n is a, c, g, or t
  misc_feature (583)..(583): n is a, c, g, or t
  misc_feature (585)..(585): n is a, c, g, or t
  misc_feature (587)..(587): n is a, c, g, or t
  misc_feature (592)..(597): n is a, c, g, or t
  misc_feature (599)..(600): n is a, c, g, or t
  misc_feature (602)..(602): n is a, c, g, or t
  misc_feature (605)..(605): n is a, c, g, or t
  misc_feature (609)..(609): n is a, c, g, or t
  misc_feature (611)..(612): n is a, c, g, or t
  misc_feature (617)..(618): n is a, c, g, or t
  misc_feature (620)..(620): n is a, c, g, or t
  misc_feature (623)..(624): n is a, c, g, or t
  misc_feature (626)..(627): n is a, c, g, or t
  misc_feature (630)..(630): n is a, c, g, or t
  misc_feature (632)..(633): n is a, c, g, or t
  misc_feature (636)..(637): n is a, c, g, or t
  misc_feature (641)..(647): n is a, c, g, or t
  misc_feature (650)..(650): n is a, c, g, or t
  misc_feature (655)..(655): n is a, c, g, or t
  misc_feature (658)..(659): n is a, c, g, or t
  misc_feature (661)..(662): n is a, c, g, or t
  misc_feature (665)..(665): n is a, c, g, or t
  misc_feature (667)..(667): n is a, c, g, or t
  misc_feature (669)..(670): n is a, c, g, or t
  misc_feature (672)..(673): n is a, c, g, or t
  misc_feature (675)..(676): n is a, c, g, or t
  misc_feature (678)..(679): n is a, c, g, or t
  misc_feature (681)..(681): n is a, c, g, or t
  misc_feature (683)..(687): n is a, c, g, or t
  misc_feature (692)..(692): n is a, c, g, or t
  misc_feature (698)..(698): n is a, c, g, or t
  misc_feature (703)..(703): n is a, c, g, or t
  misc_feature (705)..(705): n is a, c, g, or t
  misc_feature (707)..(708): n is a, c, g, or t
  misc_feature (710)..(712): n is a, c, g, or t
  misc_feature (714)..(714): n is a, c, g, or t
  misc_feature (716)..(716): n is a, c, g, or t
  misc_feature (720)..(720): n is a, c, g, or t
  misc_feature (724)..(727): n is a, c, g, or t
  misc_feature (730)..(733): n is a, c, g, or t
  misc_feature (736)..(737): n is a, c, g, or t
  misc_feature (739)..(742): n is a, c, g, or t
  misc_feature (744)..(751): n is a, c, g, or t
  misc_feature (754)..(755): n is a, c, g, or t
  misc_feature (758)..(760): n is a, c, g, or t
  misc_feature (762)..(762): n is a, c, g, or t
  misc_feature (764)..(765): n is a, c, g, or t
  misc_feature (771)..(773): n is a, c, g, or t
  misc_feature (776)..(776): n is a, c, g, or t
  misc_feature (778)..(783): n is a, c, g, or t
  misc_feature (785)..(786): n is a, c, g, or t
  misc_feature (789)..(789): n is a, c, g, or t
  misc_feature (792)..(792): n is a, c, g, or t
  misc_feature (795)..(795): n is a, c, g, or t
  misc_feature (797)..(800): n is a, c, g, or t
  misc_feature (802)..(803): n is a, c, g, or t
  misc_feature (805)..(805): n is a, c, g, or t
  misc_feature (808)..(808): n is a, c, g, or t
  misc_feature (810)..(810): n is a, c, g, or t
  misc_feature (812)..(812): n is a, c, g, or t
  misc_feature (815)..(815): n is a, c, g, or t
  misc_feature (817)..(818): n is a, c, g, or t
  misc_feature (821)..(821): n is a, c, g, or t
  misc_feature (823)..(823): n is a, c, g, or t
  misc_feature (825)..(825): n is a, c, g, or t
  misc_feature (828)..(831): n is a, c, g, or t
  misc_feature (837)..(837): n is a, c, g, or t
  misc_feature (839)..(840): n is a, c, g, or t
  misc_feature (845)..(847): n is a, c, g, or t
  misc_feature (849)..(849): n is a, c, g, or t
  misc_feature (852)..(853): n is a, c, g, or t
  misc_feature (855)..(857): n is a, c, g, or t
  misc_feature (859)..(860): n is a, c, g, or t
  misc_feature (863)..(868): n is a, c, g, or t
  misc_feature (873)..(874): n is a, c, g, or t
  misc_feature (876)..(876): n is a, c, g, or t
  misc_feature (879)..(885): n is a, c, g, or t
  misc_feature (887)..(887): n is a, c, g, or t
  misc_feature (891)..(891): n is a, c, g, or t
  misc_feature (893)..(893): n is a, c, g, or t
  misc_feature (895)..(897): n is a, c, g, or t
  misc_feature (905)..(907): n is a, c, g, or t
  misc_feature (909)..(909): n is a, c, g, or t
  misc_feature (911)..(911): n is a, c, g, or t
  misc_feature (914)..(915): n is a, c, g, or t
  misc_feature (920)..(921): n is a, c, g, or t
  misc_feature (923)..(926): n is a, c, g, or t
  misc_feature (928)..(928): n is a, c, g, or t
  misc_feature (930)..(931): n is a, c, g, or t
  misc_feature (933)..(933): n is a, c, g, or t
  misc_feature (939)..(939): n is a, c, g, or t
  misc_feature (942)..(944): n is a, c, g, or t
  misc_feature (946)..(949): n is a, c, g, or t
  misc_feature (952)..(952): n is a, c, g, or t
  misc_feature (954)..(954): n is a, c, g, or t
  misc_feature (956)..(956): n is a, c, g, or t
  misc_feature (960)..(960): n is a, c, g, or t
  misc_feature (963)..(964): n is a, c, g, or t
  misc_feature (966)..(967): n is a, c, g, or t
  misc_feature (969)..(969): n is a, c, g, or t
  misc_feature (971)..(973): n is a, c, g, or t
  misc_feature (979)..(979): n is a, c, g, or t
  misc_feature (984)..(985): n is a, c, g, or t
  misc_feature (987)..(990): n is a, c, g, or t
  misc_feature (992)..(992): n is a, c, g, or t
  misc_feature (997)..(997): n is a, c, g, or t
  misc_feature (999)..(1000): n is a, c, g, or t
  misc_feature (1007)..(1007): n is a, c, g, or t
  misc_feature (1010)..(1017): n is a, c, g, or t
  misc_feature (1020)..(1020): n is a, c, g, or t
  misc_feature (1022)..(1024): n is a, c, g, or t
  misc_feature (1027)..(1028): n is a, c, g, or t
  misc_feature (1032)..(1032): n is a, c, g, or t
  misc_feature (1037)..(1040): n is a, c, g, or t
  misc_feature (1043)..(1044): n is a, c, g, or t
  misc_feature (1047)..(1048): n is a, c, g, or t
  misc_feature (1052)..(1053): n is a, c, g, or t
  misc_feature (1056)..(1059): n is a, c, g, or t
  misc_feature (1061)..(1061): n is a, c, g, or t
  misc_feature (1065)..(1066): n is a, c, g, or t
  misc_feature (1071)..(1071): n is a, c, g, or t
  misc_feature (1074)..(1075): n is a, c, g, or t
  misc_feature (1079)..(1079): n is a, c, g, or t
  misc_feature (1081)..(1081): n is a, c, g, or t
  misc_feature (1085)..(1086): n is a, c, g, or t
  misc_feature (1088)..(1089): n is a, c, g, or t
  misc_feature (1091)..(1094): n is a, c, g, or t
  misc_feature (1097)..(1098): n is a, c, g, or t
  misc_feature (1100)..(1104): n is a, c, g, or t
  misc_feature (1107)..(1107): n is a, c, g, or t
  misc_feature (1109)..(1110): n is a, c, g, or t
  misc_feature (1113)..(1114): n is a, c, g, or t
  misc_feature (1116)..(1116): n is a, c, g, or t
  misc_feature (1118)..(1119): n is a, c, g, or t
  misc_feature (1121)..(1129): n is a, c, g, or t
  misc_feature (1131)..(1133): n is a, c, g, or t
  misc_feature (1138)..(1141): n is a, c, g, or t
  misc_feature (1143)..(1147): n is a, c, g, or t
  misc_feature (1149)..(1149): n is a, c, g, or t
  misc_feature (1152)..(1158): n is a, c, g, or t
  misc_feature (1195)..(1195): n is a, c, g, or t
  misc_feature (1202)..(1205): n is a, c, g, or t
  misc_feature (1207)..(1209): n is a, c, g, or t
  misc_feature (1213)..(1214): n is a, c, g, or t
  misc_feature (1218)..(1219): n is a, c, g, or t
  misc_feature (1223)..(1223): n is a, c, g, or t
  misc_feature (1225)..(1228): n is a, c, g, or t
  misc_feature (1234)..(1236): n is a, c, g, or t
  misc_feature (1238)..(1239): n is a, c, g, or t
  misc_feature (1241)..(1241): n is a, c, g, or t
  misc_feature (1243)..(1244): n is a, c, g, or t
  misc_feature (1247)..(1248): n is a, c, g, or t
  misc_feature (1250)..(1250): n is a, c, g, or t
  misc_feature (1252)..(1253): n is a, c, g, or t
  misc_feature (1255)..(1256): n is a, c, g, or t
  misc_feature (1258)..(1262): n is a, c, g, or t
  misc_feature (1266)..(1269): n is a, c, g, or t
  misc_feature (1271)..(1272): n is a, c, g, or t
  misc_feature (1279)..(1279): n is a, c, g, or t
  misc_feature (1281)..(1283): n is a, c, g, or t
  misc_feature (1288)..(1290): n is a, c, g, or t
  misc_feature (1293)..(1295): n is a, c, g, or t
  misc_feature (1297)..(1297): n is a, c, g, or t
  misc_feature (1306)..(1306): n is a, c, g, or t
  misc_feature (1311)..(1311): n is a, c, g, or t
  misc_feature (1314)..(1315): n is a, c, g, or t
  misc_feature (1317)..(1318): n is a, c, g, or t
  misc_feature (1323)..(1323): n is a, c, g, or t
  misc_feature (1325)..(1325): n is a, c, g, or t
  misc_feature (1330)..(1330): n is a, c, g, or t
  misc_feature (1332)..(1332): n is a, c, g, or t
  misc_feature (1336)..(1337): n is a, c, g, or t
  misc_feature (1340)..(1340): n is a, c, g, or t
  misc_feature (1345)..(1347): n is a, c, g, or t
  misc_feature (1353)..(1354): n is a, c, g, or t
  misc_feature (1357)..(1358): n is a, c, g, or t
  misc_feature (1360)..(1360): n is a, c, g, or t
  misc_feature (1366)..(1369): n is a, c, g, or t
  misc_feature (1371)..(1371): n is a, c, g, or t
  misc_feature (1375)..(1376): n is a, c, g, or t
  misc_feature (1380)..(1380): n is a, c, g, or t
  misc_feature (1385)..(1385): n is a, c, g, or t
  misc_feature (1389)..(1394): n is a, c, g, or t
  misc_feature (1397)..(1398): n is a, c, g, or t
  misc_feature (1405)..(1405): n is a, c, g, or t
  misc_feature (1408)..(1408): n is a, c, g, or t
  misc_feature (1410)..(1410): n is a, c, g, or t
  misc_feature (1412)..(1412): n is a, c, g, or t
  misc_feature (1415)..(1415): n is a, c, g, or t
  misc_feature (1417)..(1418): n is a, c, g, or t
  misc_feature (1420)..(1420): n is a, c, g, or t
  misc_feature (1425)..(1425): n is a, c, g, or t
  misc_feature (1427)..(1427): n is a, c, g, or t
  misc_feature (1439)..(1439): n is a, c, g, or t
  misc_feature (1443)..(1443): n is a, c, g, or t
  misc_feature (1446)..(1447): n is a, c, g, or t
  misc_feature (1452)..(1452): n is a, c, g, or t
  misc_feature (1460)..(1461): n is a, c, g, or t
  misc_feature (1463)..(1463): n is a, c, g, or t
  misc_feature (1465)..(1465): n is a, c, g, or t
  misc_feature (1476)..(1477): n is a, c, g, or t
  misc_feature (1479)..(1479): n is a, c, g, or t
  misc_feature (1482)..(1482): n is a, c, g, or t
  misc_feature (1484)..(1484): n is a, c, g, or t
  misc_feature (1487)..(1487): n is a, c, g, or t
  misc_feature (1489)..(1490): n is a, c, g, or t
  misc_feature (1497)..(1497): n is a, c, g, or t
  misc_feature (1503)..(1503): n is a, c, g, or t
  misc_feature (1506)..(1506): n is a, c, g, or t
  misc_feature (1510)..(1511): n is a, c, g, or t
  misc_feature (1513)..(1513): n is a, c, g, or t
  misc_feature (1515)..(1515): n is a, c, g, or t
  misc_feature (1518)..(1519): n is a, c, g, or t
  misc_feature (1521)..(1521): n is a, c, g, or t
  misc_feature (1525)..(1525): n is a, c, g, or t
  misc_feature (1528)..(1531): n is a, c, g, or t
  misc_feature (1534)..(1534): n is a, c, g, or t
  misc_feature (1536)..(1536): n is a, c, g, or t
  misc_feature (1544)..(1547): n is a, c, g, or t
  misc_feature (1549)..(1549): n is a, c, g, or t
  misc_feature (1552)..(1553): n is a, c, g, or t
  misc_feature (1555)..(1556): n is a, c, g, or t
  misc_feature (1591)..(1595): n is a, c, g, or t
  misc_feature (1600)..(1601): n is a, c, g, or t
  misc_feature (1603)..(1603): n is a, c, g, or t
  misc_feature (1605)..(1605): n is a, c, g, or t
  misc_feature (1610)..(1614): n is a, c, g, or t
  misc_feature (1616)..(1616): n is a, c, g, or t
  misc_feature (1619)..(1619): n is a, c, g, or t
  misc_feature (1621)..(1622): n is a, c, g, or t
  misc_feature (1624)..(1624): n is a, c, g, or t
  misc_feature (1657)..(1657): n is a, c, g, or t
  misc_feature (1660)..(1660): n is a, c, g, or t
  misc_feature (1663)..(1663): n is a, c, g, or t
  misc_feature (1665)..(1665): n is a, c, g, or t
  misc_feature (1668)..(1669): n is a, c, g, or t
  misc_feature (1675)..(1675): n is a, c, g, or t
  misc_feature (1682)..(1683): n is a, c, g, or t
  misc_feature (1687)..(1690): n is a, c, g, or t
  misc_feature (1692)..(1692): n is a, c, g, or t
  misc_feature (1694)..(1697): n is a, c, g, or t
  misc_feature (1704)..(1705): n is a, c, g, or t
  misc_feature (1710)..(1711): n is a, c, g, or t
  misc_feature (1713)..(1714): n is a, c, g, or t
  misc_feature (1717)..(1717): n is a, c, g, or t
  misc_feature (1719)..(1719): n is a, c, g, or t
  misc_feature (1723)..(1725): n is a, c, g, or t
  misc_feature (1727)..(1727): n is a, c, g, or t
  misc_feature (1729)..(1729): n is a, c, g, or t
  misc_feature (1734)..(1734): n is a, c, g, or t
  misc_feature (1737)..(1737): n is a, c, g, or t
  misc_feature (1739)..(1741): n is a, c, g, or t
  misc_feature (1745)..(1745): n is a, c, g, or t
  misc_feature (1747)..(1748): n is a, c, g, or t
  misc_feature (1750)..(1750): n is a, c, g, or t
  misc_feature (1755)..(1758): n is a, c, g, or t
  misc_feature (1760)..(1763): n is a, c, g, or t
  misc_feature (1769)..(1772): n is a, c, g, or t
  misc_feature (1774)..(1774): n is a, c, g, or t
  misc_feature (1776)..(1781): n is a, c, g, or t
  misc_feature (1783)..(1788): n is a, c, g, or t
  misc_feature (1791)..(1791): n is a, c, g, or t
  misc_feature (1798)..(1798): n is a, c, g, or t
  misc_feature (1802)..(1803): n is a, c, g, or t
  misc_feature (1805)..(1807): n is a, c, g, or t
  misc_feature (1809)..(1812): n is a, c, g, or t
  misc_feature (1814)..(1814): n is a, c, g, or t
  misc_feature (1817)..(1818): n is a, c, g, or t
  misc_feature (1822)..(1822): n is a, c, g, or t
  misc_feature (1855)..(1855): n is a, c, g, or t
  misc_feature (1857)..(1857): n is a, c, g, or t
  misc_feature (1861)..(1861): n is a, c, g, or t
  misc_feature (1864)..(1864): n is a, c, g, or t
  misc_feature (1866)..(1866): n is a, c, g, or t
  misc_feature (1869)..(1873): n is a, c, g, or t
  misc_feature (1875)..(1883): n is a, c, g, or t
  misc_feature (1885)..(1888): n is a, c, g, or t
  misc_feature (1921)..(1922): n is a, c, g, or t
  misc_feature (1924)..(1924): n is a, c, g, or t
  misc_feature (1926)..(1926): n is a, c, g, or t
  misc_feature (1928)..(1930): n is a, c, g, or t
  misc_feature (1935)..(1941): n is a, c, g, or t
  misc_feature (1943)..(1947): n is a, c, g, or t
  misc_feature (1949)..(1949): n is a, c, g, or t
  misc_feature (1952)..(1953): n is a, c, g, or t
  misc_feature (1955)..(1956): n is a, c, g, or t
  misc_feature (1989)..(1992): n is a, c, g, or t
  misc_feature (1994)..(1994): n is a, c, g, or t
  misc_feature (1996)..(1996): n is a, c, g, or t
  misc_feature (1999)..(2000): n is a, c, g, or t
  misc_feature (2002)..(2002): n is a, c, g, or t
  misc_feature (2004)..(2005): n is a, c, g, or t
  misc_feature (2008)..(2008): n is a, c, g, or t
  misc_feature (2010)..(2011): n is a, c, g, or t
  misc_feature (2014)..(2017): n is a, c, g, or t
  misc_feature (2019)..(2019): n is a, c, g, or t
  misc_feature (2021)..(2022): n is a, c, g, or t
  misc_feature (3607)..(3607): n is a, c, g, or t
  misc_feature (3610)..(3610): n is a, c, g, or t
  misc_feature (3613)..(3613): n is a, c, g, or t
  misc_feature (3616)..(3617): n is a, c, g, or t
  misc_feature (3619)..(3619): n is a, c, g, or t
  misc_feature (3621)..(3623): n is a, c, g, or t
  misc_feature (3627)..(3628): n is a, c, g, or t
  misc_feature (3630)..(3630): n is a, c, g, or t
  misc_feature (3632)..(3632): n is a, c, g, or t
  misc_feature (3634)..(3634): n is a, c, g, or t
  misc_feature (3637)..(3637): n is a, c, g, or t
  misc_feature (3640)..(3641): n is a, c, g, or t
  misc_feature (3644)..(3644): n is a, c, g, or t
  misc_feature (3651)..(3654): n is a, c, g, or t
  misc_feature (3656)..(3665): n is a, c, g, or t
  misc_feature (3669)..(3669): n is a, c, g, or t
  misc_feature (3673)..(3673): n is a, c, g, or t
  misc_feature (3676)..(3676): n is a, c, g, or t
  misc_feature (3679)..(3679): n is a, c, g, or t
  misc_feature (3681)..(3681): n is a, c, g, or t
  misc_feature (3683)..(3685): n is a, c, g, or t
  misc_feature (3687)..(3687): n is a, c, g, or t
  misc_feature (3690)..(3691): n is a, c, g, or t
  misc_feature (3693)..(3699): n is a, c, g, or t
  misc_feature (3701)..(3702): n is a, c, g, or t
  misc_feature (3705)..(3705): n is a, c, g, or t
  misc_feature (3707)..(3720): n is a, c, g, or t
  misc_feature (3723)..(3724): n is a, c, g, or t
  misc_feature (3729)..(3729): n is a, c, g, or t
  misc_feature (3731)..(3735): n is a, c, g, or t
  misc_feature (3737)..(3738): n is a, c, g, or t
  misc_feature (3740)..(3744): n is a, c, g, or t
  misc_feature (3749)..(3750): n is a, c, g, or t
  misc_feature (3752)..(3753): n is a, c, g, or t
  misc_feature (3755)..(3756): n is a, c, g, or t
  misc_feature (3762)..(3762): n is a, c, g, or t
  misc_feature (3765)..(3766): n is a, c, g, or t
  misc_feature (3768)..(3768): n is a, c, g, or t
  misc_feature (3770)..(3770): n is a, c, g, or t
  misc_feature (3773)..(3776): n is a, c, g, or t
  misc_feature (3779)..(3782): n is a, c, g, or t
  misc_feature (3785)..(3785): n is a, c, g, or t
  misc_feature (3788)..(3789): n is a, c, g, or t
  misc_feature (3791)..(3793): n is a, c, g, or t
  misc_feature (3795)..(3795): n is a, c, g, or t
  misc_feature (3797)..(3798): n is a, c, g, or t
  misc_feature (3800)..(3800): n is a, c, g, or t
  misc_feature (3803)..(3804): n is a, c, g, or t
  misc_feature (3808)..(3809): n is a, c, g, or t
  misc_feature (3812)..(3812): n is a, c, g, or t
  misc_feature (3814)..(3814): n is a, c, g, or t
  misc_feature (3816)..(3827): n is a, c, g, or t
  misc_feature (3829)..(3829): n is a, c, g, or t
  misc_feature (3831)..(3831): n is a, c, g, or t
  misc_feature (3834)..(3834): n is a, c, g, or t
  misc_feature (3837)..(3839): n is a, c, g, or t
  misc_feature (3842)..(3843): n is a, c, g, or t
  misc_feature (3848)..(3849): n is a, c, g, or t
  misc_feature (3851)..(3853): n is a, c, g, or t
  misc_feature (3855)..(3856): n is a, c, g, or t
  misc_feature (3858)..(3859): n is a, c, g, or t
  misc_feature (3862)..(3863): n is a, c, g, or t
  misc_feature (3868)..(3871): n is a, c, g, or t
  misc_feature (3873)..(3875): n is a, c, g, or t
  misc_feature (3879)..(3879): n is a, c, g, or t
  misc_feature (3883)..(3884): n is a, c, g, or t
  misc_feature (3887)..(3887): n is a, c, g, or t
  misc_feature (3889)..(3890): n is a, c, g, or t
  misc_feature (3893)..(3895): n is a, c, g, or t
  misc_feature (3897)..(3897): n is a, c, g, or t
  misc_feature (3899)..(3901): n is a, c, g, or t
  misc_feature (3903)..(3904): n is a, c, g, or t
  misc_feature (3910)..(3911): n is a, c, g, or t
  misc_feature (3915)..(3916): n is a, c, g, or t
  misc_feature (3921)..(3925): n is a, c, g, or t
  misc_feature (3927)..(3928): n is a, c, g, or t
  misc_feature (3930)..(3932): n is a, c, g, or t
  misc_feature (3934)..(3935): n is a, c, g, or t
  misc_feature (3943)..(3943): n is a, c, g, or t
  misc_feature (3947)..(3947): n is a, c, g, or t
  misc_feature (3949)..(3949): n is a, c, g, or t
  misc_feature (3951)..(3951): n is a, c, g, or t
  misc_feature (3953)..(3953): n is a, c, g, or t
  misc_feature (3956)..(3956): n is a, c, g, or t
  misc_feature (3958)..(3961): n is a, c, g, or t
  misc_feature (3966)..(3966): n is a, c, g, or t
  misc_feature (3968)..(3969): n is a, c, g, or t
  misc_feature (3971)..(3972): n is a, c, g, or t
  misc_feature (3975)..(3975): n is a, c, g, or t
  misc_feature (3977)..(3983): n is a, c, g, or t
  misc_feature (3986)..(3986): n is a, c, g, or t
  misc_feature (3991)..(3992): n is a, c, g, or t
  misc_feature (3995)..(3997): n is a, c, g, or t
  misc_feature (3999)..(3999): n is a, c, g, or t
nactnttcnannnnnttnnntnttntngcnangnnaancnncntgannnnnntnnncaannngnntnnttncnnacaggngnnnnnnnannntnncnacanncagnnncccgaangnnncnncnnnacnnntaaangnnannntaanntanaannagnntnnannnanancnaccnnaanntnnntnnngccanananngnngngattntnannnnancnacngntnnnncacncannnnnnnganngnnnntgcnnatcnatncgntgctnanntgtnntnntngnnttnnannnnannnncnnccnannntgnntgcntnntncgntntntactnctnnnnannngngnnngnnttncnnnacnnnnncncncnannnnngntncncannnnnnnnnnnngtnnttntnntganaaatcttgnnnnnananacanccacnngnangnngntnngntntannnaannnnnnnnngannnatnnnttntngnntnannananancnncncnnnngnnnctncntnnnnnaannnnntnncnnnnngantnnncnttcannnnnnnnanananncaccnnaagntngntgcannnnnnannanctnaatncnncactnntnttnngnnttnannacnnagcnnnnnnnagntggcngcnnannatnancnnanncnntnntnannnnnttaantttcancacanancnncnnnangntggntgcnnnnttnnnnatnnannnnannnnnnnnatnnaannntntnnacacannnccncnnnnnngnngcngcnaangnnnnanntnaanangnaanannatntnangtnnnnacacananncaccnnnangtnncnnntnnatnnnnnntggtnnantannnnnnnanctangntnnnaacacacnnncncncgnnggtgnntnnnngntnntnaaaatnagnnntnnnncgntnangttnttnnannanannnccaccngaagnngnnnncntaaanannactaaangtnnnnnnnnttnannngtnntttnaacannnngcnnccnnaagnnggnnnngntggnnaaaanggnngatntnatgnntnngnnnnttnnannnnnagncnnccnnangnngnnnnnnnnnannnttagnnnnannnnncnacnnnnnnnagtttcaacacacagccgcccgaaggcggctgccgantaaaatnnnngnnngcgnnaaanntatntnnnntttcannncnnancnnccnnangnngnntnnnnntcannnntnntaaatcncnnnaaagnnnctnnntnaacacacanccgcncgnngnnggctncncaacnantganncgnaaatnnnagaaannaanngnttcaannnncngccnnccgnaggcngctnnnnnntanngataaanttngngngtngnnancagantntcaacacacagncgcncgnnggcgnctgccgcnnananccaaaaagacnnanaanangtnanntttcaanacacanccncccnnangnggnngnttcnaannnnccnantcatctgnnnntntgnnannaagtttcaacacacagccgcccgaaggcggctgcnnnnnctggnntncnatttnnnnnanttntnntngtttcaacacacagccgcccgaaggcggctgcnganaanancgnnaacacnaaatganntatnnnntntnnnnacacacnnccgcnngnnggngnctgnnncnanccatnccntnnngctntnncntaatnnnntnnnnacacannnncncnnnnnngnnnnnncantaatgcngttnnannnannnngntcnnattngtttcaacacacagccgcccgaaggcggctgcnanattnttnanttnnnnnannnnnnnnngnnnngtttcaacacacagccgcccgaaggcggctgcnngngnannnaattnnnnnnnannnnntntanntnngtttcaacacacagccgcccgaaggcggctgcnnnncntngtnngntnngcngnnccnnnntncnntgtttcaacacacagccgcccgaaggcggctgctccctacataaaaaaacaagaaaaatcagtgcattaaacactgtatttcgctaactgattttatgataaggagtttggtaagtataacggccacattgtcgttatacaaataaattaattcatccaaattgttaaagaaaataaagatcgctatcccatcagggttttaatgagaacaacaggttagcgaactaaatgacaagcacgtctttaaatacatctactgccggttttgccccatgatgctccactttattacgccacttactgcctaaatgataaaaacgcagactgtcacatgtgggatcgtaggtttccaacagtttgtttttcaacgcgacccattggtcaggcgtgacatcacattcaaatactgaatattgcgcgcgcacgccgtaatctaagcaatgttttgcgatacggcgcaatcgcgcttgcccgtttggatcgtcaaaagaaatatcataagtaatcagcattaacatggtttatctcatcaaaaacggcgggtattccgccaaatccccgcgcagatggcgcgctaaaagcatcgcttgaatatatggcagcagcccgatttccacttcctcgtccaaaaacggatgaacgattttctcctgttttttcgcctgcaaggcttgaaacagtagcttacgcgcctccgctttcaagcttaccgcgccgcttgcctcggtaataaaatcctgcagtttgatttgcccacggttaatcagcgacaacaccagcctgtctgcccaccacgagcggaattcttccaaaatatcctgcgccaaactgtcgcgccctggtcggtcggcgtgcagaaaacctacctgtggatccagccccacgccttgcagtgcaccgctgatgtccttgcccaaaatactgtacacaaacgacaacagcgcattcaccccatctctgggcggacggcggttgcgtccgtcaaaagtaaagccgcttttttcgctcaaaagctgcccgaacacgccgaaataacgcgccgccgcatcgccctcaataccacgcactacgtccagctccgccgcgcccttcaactgccgcagcgaaatattcaaagcatcaaccgcactttgaatcgccgcattctcgccgtaattgcgaatctgccgctgaagcacccgcttactcgcctgaatcttcgccgcaatgatattgcgcgcaatcggcacgggattttgctccgacacccgatactgcgcccgacgcagcagcacattgccactctgccgtccctgaagccgtcccaagaaacgtccgttttcggtaaaaaacgccaaattcacattattttcaccgcaaaaccccagtaaaaacggcgacaccaacacattcccaaaacagaaaatatgcccgatggaatgcaccggcaactgcgccacctttttacgctcctgctccaccaccaacgtctcccgctccttatgcaaatagctgccttgggtagtgatgtagagcgtgttttgcagtttgcgcatggggaaactccttagattttgaccgcactttggggataacggcgcatacngantanttnnanannntatnntngntnaanagnnacnccataannnnannnnnnnnnngttntaanttnttnanannntnctnntnnnnnnngnncanannnnnnnnnnnnnntanntcatnannnnnannannnnnacttnnanntnntataanttnntncngtnnnnacnnnntanaanntnnnananntntannaatnncantncnnnnnnnnnnnngntnaantannnctnnctctnnannntnnanntcnncaatnnnncnnnattnaatnnaananntannntntnnncnnatattnnaatnnataannnnnanntnnntnntctttaanatanananantcntnnnntacgnannanntantnnnnnnnttnaatcnntannntna

SEQ ID NO: 549 - DNA, 4000 bp, Escherichia coli
  misc_feature (1)..(1): n is a, c, g, or t
  misc_feature (3)..(3): n is a, c, g, or t
  misc_feature (5)..(7): n is a, c, g, or t
  misc_feature (9)..(10): n is a, c, g, or t
  misc_feature (12)..(18): n is a, c, g, or t
  misc_feature (20)..(31): n is a, c, g, or t
  misc_feature (33)..(33): n is a, c, g, or t
  misc_feature (35)..(41): n is a, c, g, or t
  misc_feature (43)..(50): n is a, c, g, or t
  misc_feature (53)..(56): n is a, c, g, or t
  misc_feature (58)..(58): n is a, c, g, or t
  misc_feature (60)..(63): n is a, c, g, or t
  misc_feature (65)..(74): n is a, c, g, or t
  misc_feature (78)..(92): n is a, c, g, or t
  misc_feature (94)..(94): n is a, c, g, or t
  misc_feature (96)..(96): n is a, c, g, or t
  misc_feature (98)..(98): n is a, c, g, or t
  misc_feature (100)..(108): n is a, c, g, or t
  misc_feature (111)..(111): n is a, c, g, or t
  misc_feature (115)..(123): n is a, c, g, or t
  misc_feature (125)..(130): n is a, c, g, or t
  misc_feature (132)..(137): n is a, c, g, or t
  misc_feature (139)..(145): n is a, c, g, or t
  misc_feature (147)..(151): n is a, c, g, or t
  misc_feature (153)..(153): n is a, c, g, or t
  misc_feature (156)..(159): n is a, c, g, or t
  misc_feature (162)..(163): n is a, c, g, or t
  misc_feature (165)..(175): n is a, c, g, or t
  misc_feature (177)..(177): n is a, c, g, or t
  misc_feature (179)..(179): n is a, c, g, or t
  misc_feature (182)..(182): n is a, c, g, or t
  misc_feature (184)..(186): n is a, c, g, or t
  misc_feature (188)..(193): n is a, c, g, or t
  misc_feature (195)..(202): n is a, c, g, or t
  misc_feature (204)..(206): n is a, c, g, or t
  misc_feature (208)..(208): n is a, c, g, or t
  misc_feature (210)..(215): n is a, c, g, or t
  misc_feature (218)..(224): n is a, c, g, or t
  misc_feature (226)..(251): n is a, c, g, or t
  misc_feature (253)..(253): n is a, c, g, or t
  misc_feature (256)..(272): n is a, c, g, or t
  misc_feature (277)..(282): n is a, c, g, or t
  misc_feature (284)..(284): n is a, c, g, or t
  misc_feature (286)..(286): n is a, c, g, or t
  misc_feature (288)..(292): n is a, c, g, or t
  misc_feature (294)..(294): n is a, c, g, or t
  misc_feature (301)..(312): n is a, c, g, or t
  misc_feature (314)..(314): n is a, c, g, or t
  misc_feature (316)..(319): n is a, c, g, or t
  misc_feature (321)..(330): n is a, c, g, or t
  misc_feature (332)..(339): n is a, c, g, or t
  misc_feature (341)..(348): n is a, c, g, or t
  misc_feature (350)..(358): n is a, c, g, or t
  misc_feature (363)..(363): n is a, c, g, or t
  misc_feature (365)..(366): n is a, c, g, or t
  misc_feature (368)..(368): n is a, c, g, or t
  misc_feature (370)..(374): n is a, c, g, or t
  misc_feature (376)..(376): n is a, c, g, or t
  misc_feature (379)..(382): n is a, c, g, or t
  misc_feature (385)..(388): n is a, c, g, or t
  misc_feature (393)..(393): n is a, c, g, or t
  misc_feature (395)..(396): n is a, c, g, or t
  misc_feature (398)..(406): n is a, c, g, or t
  misc_feature (408)..(414): n is a, c, g, or t
  misc_feature (416)..(418): n is a, c, g, or t
  misc_feature (420)..(421): n is a, c, g, or t
  misc_feature (423)..(425): n is a, c, g, or t
  misc_feature (427)..(427): n is a, c, g, or t
  misc_feature (434)..(449): n is a, c, g, or t
  misc_feature (451)..(451): n is a, c, g, or t
  misc_feature (454)..(458): n is a, c, g, or t
  misc_feature (461)..(468): n is a, c, g, or t
  misc_feature (470)..(472): n is a, c, g, or t
  misc_feature (474)..(475): n is a, c, g, or t
  misc_feature (481)..(481): n is a, c, g, or t
  misc_feature (483)..(487): n is a, c, g, or t
  misc_feature (493)..(494): n is a, c, g, or t
  misc_feature (496)..(497): n is a, c, g, or t
  misc_feature (500)..(512): n is a, c, g, or t
  misc_feature (515)..(515): n is a, c, g, or t
  misc_feature (520)..(523): n is a, c, g, or t
  misc_feature (527)..(534): n is a, c, g, or t
  misc_feature (536)..(546): n is a, c, g, or t
  misc_feature (551)..(553): n is a, c, g, or t
  misc_feature (555)..(558): n is a, c, g, or t
  misc_feature (563)..(565): n is a, c, g, or t
  misc_feature (569)..(574): n is a, c, g, or t
  misc_feature (577)..(579): n is a, c, g, or t
  misc_feature (581)..(582): n is a, c, g, or t
  misc_feature (584)..(585): n is a, c, g, or t
  misc_feature (588)..(591): n is a, c, g, or t
  misc_feature (593)..(593): n is a, c, g, or t
  misc_feature (595)..(596): n is a, c, g, or t
  misc_feature (599)..(599): n is a, c, g, or t
  misc_feature (607)..(611): n is a, c, g, or t
  misc_feature (618)..(622): n is a, c, g, or t
  misc_feature (624)..(625): n is a, c, g, or t
  misc_feature (628)..(632): n is a, c, g, or t
  misc_feature (634)..(638): n is a, c, g, or t
  misc_feature (642)..(645): n is a, c, g, or t
  misc_feature (651)..(652): n is a, c, g, or t
  misc_feature (654)..(655): n is a, c, g, or t
  misc_feature (662)..(666): n is a, c, g, or t
  misc_feature (670)..(670): n is a, c, g, or t
  misc_feature (672)..(672): n is a, c, g, or t
  misc_feature (676)..(678): n is a, c, g, or t
  misc_feature (682)..(686): n is a, c, g, or t
  misc_feature (688)..(688): n is a, c, g, or t
  misc_feature (694)..(703): n is a, c, g, or t
  misc_feature (706)..(706): n is a, c, g, or t
  misc_feature (786)..(786): n is a, c, g, or t
  misc_feature (808)..(808): n is a, c, g, or t
  misc_feature (816)..(816): n is a, c, g, or t
  misc_feature (843)..(843): n is a, c, g, or t
  misc_feature (942)..(942): n is a, c, g, or t
  misc_feature (957)..(957): n is a, c, g, or t
  misc_feature (963)..(963): n is a, c, g, or t
  misc_feature (1005)..(1005): n is a, c, g, or t
  misc_feature (1038)..(1038): n is a, c, g, or t
  misc_feature (1044)..(1044): n is a, c, g, or t
  misc_feature (1050)..(1050): n is a, c, g, or t
  misc_feature (1083)..(1083): n is a, c, g, or t
  misc_feature (1104)..(1104): n is a, c, g, or t
  misc_feature (1110)..(1110): n is a, c, g, or t
  misc_feature (1269)..(1269): n is a, c, g, or t
  misc_feature (1284)..(1284): n is a, c, g, or t
  misc_feature (1326)..(1326): n is a, c, g, or t
  misc_feature (1365)..(1365): n is a, c, g, or t
  misc_feature (1398)..(1398): n is a, c, g, or t
  misc_feature (1410)..(1410): n is a, c, g, or t
  misc_feature (1457)..(1457): n is a, c, g, or t
  misc_feature (1461)..(1461): n is a, c, g, or t
  misc_feature (1476)..(1476): n is a, c, g, or t
  misc_feature (1479)..(1479): n is a, c, g, or t
  misc_feature (1524)..(1525): n is a, c, g, or t
  misc_feature (1702)..(1702): n is a, c, g, or t
  misc_feature (1712)..(1712): n is a, c, g, or t
  misc_feature (1741)..(1741): n is a, c, g, or t
  misc_feature (1751)..(1751): n is a, c, g, or t
  misc_feature (1773)..(1773): n is a, c, g, or t
  misc_feature (1980)..(1980): n is a, c, g, or t
  misc_feature (1985)..(1985): n is a, c, g, or t
  misc_feature (2550)..(2550): n is a, c, g, or t
  misc_feature (2553)..(2553): n is a, c, g, or t
  misc_feature (2706)..(2706): n is a, c, g, or t
  misc_feature (2724)..(2724): n is a, c, g, or t
  misc_feature (3009)..(3009): n is a, c, g, or t
  misc_feature (3126)..(3126): n is a, c, g, or t
  misc_feature (3192)..(3192): n is a, c, g, or t
  misc_feature (3246)..(3246): n is a, c, g, or t
  misc_feature (3320)..(3320): n is a, c, g, or t
  misc_feature (3357)..(3357): n is a, c, g, or t
  misc_feature (3361)..(3361): n is a, c, g, or t
  misc_feature (3423)..(3423): n is a, c, g, or t
  misc_feature (3450)..(3450): n is a, c, g, or t
  misc_feature (3489)..(3489): n is a, c, g, or t
  misc_feature (3499)..(3499): n is a, c, g, or t
  misc_feature (3545)..(3545): n is a, c, g, or t
  misc_feature (3549)..(3549): n is a, c, g, or t
  misc_feature (3552)..(3552): n is a, c, g, or t
  misc_feature (3567)..(3568): n is a, c, g, or t
  misc_feature (3574)..(3574): n is a, c, g, or t
  misc_feature (3580)..(3581): n is a, c, g, or t
  misc_feature (3584)..(3584): n is a, c, g, or t
  misc_feature (3660)..(3660): n is a, c, g, or t
  misc_feature (3750)..(3750): n is a, c, g, or t
  misc_feature (3863)..(3863): n is a, c, g, or t
  misc_feature (3947)..(3947): n is a, c, g, or t
nanannnannannnnnnnannnnnnnnnnnntntnnnnnnnannnnnnnnatnnnnanannnnannnnnnnnnnaaannnnnnnnnnnnnnnanananannnnnnnnnaanaaannnnnnnnntnnnnnnannnnnntnnnnnnngnnnnnanaannnnctnntnnnnnnnnnnntntnttntnnnannnnnnannnnnnnntnnntntnnnnnnaannnnnnntnnnnnnnnnnnnnnnnnnnnnnnnnntnttnnnnnnnnnnnnnnnnnttttnnnnnnananannnnntnttttttnnnnnnnnnnnntntnnnngnnnnnnnnnnannnnnnnntnnnnnnnnannnnnnnnnaaaananngngnnnnnanaannnnttnnnnttttntnntnnnnnnnnntnnnnnnngnnnannannntnttttttnnnnnnnnnnnnnnnnanaannnnnaannnnnnnntnnntnntttttntnnnnntttttnntnnaannnnnnnnnnnnnttnttttnnnnaaannnnnnnngnnnnnnnnnnnaaaannnannnnttttnnntttnnnnnnttnnntnntnnggnnnnanannggntttttttnnnnnaaaaagnnnnnannggnnnnngnnnnngggnnnntttttnntnnaaaaaannnnnaaangnaaannnaaannnnncntttttnnnnnnnnnnaanaaaaaaactgctgtaaatgcatggagcaaaaacagcagtctttgtgttgttattattttagatcccacaaattgttgttnacaggcacagcttcaactgtgngttctatnttgtctggcaggttacaaaagaagtcnatgccagtcttttcttctaattctttaatcgaaacagcatattttgccaatttattatccttgttattctcgtgcttaacccagaatcctacggcattntatacgccatttttnactctnaggatagccataaagaagtagcttggcacaaccattcccttncctgttgtggtatattgtgcgctattatcgatngttccncccttncaaacataaagagtgtcggcaaaattataattntttttggttgcccagttgcgnactttnttttccatttcgagccaaacccctgcattgaaatcatgcttttgaggttgcatattggtcatatagaaggtttgatattgtgcctctttgttgttaagtctatctgcagaagggcaaatatggccgtgatcgtatcctgaacctctataaggatcgggngtaatggtgaactgngagggtagagaagggtcgtaagggtattgatatctgtagtcncttgtgtaataacgattggtgtttttcgttaaattagancgatacatctgatagcaactccatctttgcganttcttattggtntcccattctacgcaataatttacctctccgttggttgttttgtaganaagnaccttgttgttggcngtnttttttatctttggaaactctaaacgagcataatctttcgatatnnttgtagggttactgttgctttctccttgagtatttttgctcgagttgtctacaacatcgtccttactacatgagtgcaaagcacctaaaagaagcagaattgcacctgttttaaataatatttttttcattttgtattaatgttttctgtgtatctaaatcctgttcaatctctttnaataacgaangtctttcgtttttattactttttttgatngcaatgagcncaattttttatgtttgcttgtngcaatctcattgcttttgcaatgtaatgtcaatgcttttagggtgcaatagcattacttttatctcacaatatcaatgctttttgttcttgctttggtgcttatttcttcaaagaggcattgctcgtaagtataaaaataatagtattgaagtttgaaaacctttatcgaaaagggcttattgttgtatcctgattacctaaaaccnctctnatcgtggttttatttcaaaaaaaatagcatggaatagtgtatatgcaactacactatatccatgctaaaatgtcgttaaatatattctgtaaaagatatattatttgttaatcttaccgtaacggttcatgaatctatcaacacgaccagctgtatcgacaagcttgctctttcctgtatagaaaggatgtgatgtacttgagatttcaatcttaaccactggataagtctcaccttcaaattctacagtctcatttgctttacatgtagactttgtaaggaacatatcgccgttggacatatctttaaatacgacgggacgatagttgtctggatgaataccttttttcattttactttattgttatttataaattatactctgtaatgagtgtgcaaatttactaatctttttgcaattagccaaataaaatgcactttttattgaacgtaagtaattgaaattgattgaagtctcaattgaactccgcccttaggtgcacctacaagagtgtttgtataagtagcatcattacctgtaaatgaaacagttgcagttgtattnccngtgtaattagttccttggaacacgtcacaagtaatcacaatcttagcaattgccttcttacctttaagtgtaaaggtgttatttgcataaagtctaataccttttgacttagcaaagaacttaggagttgttgtttgtccgtttgcagagaangataaaacagaaccgtcnctcaatgtaatattgctcaaatcgcttgtttctgtaagaccaatagcgttcaaatcaacattcaatgtttctgttcctgcagttgcagtagtgttgtttaatgtaagagtgttaccgctaattacaacagcttctgctgctggtgttggaggagttggtgttggattgctatcatgttgtttctttccattgatagaatacaagtaactcttgtttgtaacggtctcaggtgtgttgcctttgtagtttacaaactgtccacggataaccacttcgtcacctacnttaatagcatttgcatcagtaaacttcttgttatcaaggtctaagcttctgaaaatagtaagttgtcctgttgcagttccatcgtcagagatataatatgtagcattaccaaagccncttgtttgaagctctttgatagaaacaatcttacctttaacgaacatttctgctgtagcagagtcngcttttaaagatgtaagatgtgcaaccattgtagcaacgttatatggagacgcntcagttccttcaccaaccttagttgttggagttgtaggagtggtgccatgttgcttatttccgttgatagaatntaagtaactcttgtttggaacggtctcaggtgtgttncctntgtagtttacaaactgaccacggataaccacttcgtcacccactttaatagcatttgcatcngtaaacttcttgttatcaaggtctaancttctgtaaatgtaaagttgtcctgttgttgttccatcntcagagatanaatatgtagcattaccgaagccgcttgtttgaagctctttgatagnaacnacnttacctttaacgaanntttcanctgtannagngtctgctttcaagctctttaagtgtgcatttaatgcagcaacgttgtatggatcagcttctgttccagagccattngcttgagaaggagtaacttcttgctttttattattaggattatcataaggagaaggtacatcctcacaacttgttaatgtgcttgctgtnacagcaaaagccatcattaaataaaagaactttttcattttgttttgtattatatttcttattgaattgtttgaatatcactcttttggcgaataaggatttgccatgtattncggaagcgtgtgaagattcctgtaatgtttactcgtcctgtaggaagaggcaatgcagcgaaatctgcataagtacttgttctnactacaagttgattagaattgatgcctgtaagtgctctgtttacgctgttagc

SEQ ID NO: 550 - DNA, 4000 bp, Escherichia coli
  misc_feature (2)..(2): n is a, c, g, or t
  misc_feature (4)..(5): n is a, c, g, or t
  misc_feature (8)..(9): n is a, c, g, or t
  misc_feature (12)..(13): n is a, c, g, or t
  misc_feature (15)..(16): n is a, c, g, or t
  misc_feature (18)..(20): n is a, c, g, or t
  misc_feature (22)..(22): n is a, c, g, or t
  misc_feature (25)..(26): n is a, c, g, or t
  misc_feature (28)..(33): n is a, c, g, or t
  misc_feature (35)..(37): n is a, c, g, or t
  misc_feature (39)..(39): n is a, c, g, or t
  misc_feature (41)..(43): n is a, c, g, or t
  misc_feature (45)..(45): n is a, c, g, or t
  misc_feature (47)..(47): n is a, c, g, or t
  misc_feature (49)..(49): n is a, c, g, or t
  misc_feature (51)..(51): n is a, c, g, or t
  misc_feature (53)..(53): n is a, c, g, or t
  misc_feature (55)..(56): n is a, c, g, or t
  misc_feature (58)..(58): n is a, c, g, or t
  misc_feature (60)..(63): n is a, c, g, or t
  misc_feature (65)..(65): n is a, c, g, or t
  misc_feature (67)..(91): n is a, c, g, or t
  misc_feature (95)..(95): n is a, c, g, or t
  misc_feature (99)..(100): n is a, c, g, or t
  misc_feature (103)..(104): n is a, c, g, or t
  misc_feature (106)..(108): n is a, c, g, or t
  misc_feature (110)..(111): n is a, c, g, or t
  misc_feature (113)..(126): n is a, c, g, or t
  misc_feature (129)..(133): n is a, c, g, or t
  misc_feature (136)..(142): n is a, c, g, or t
  misc_feature (144)..(147): n is a, c, g, or t
  misc_feature (149)..(151): n is a, c, g, or t
  misc_feature (153)..(154): n is a, c, g, or t
  misc_feature (156)..(162): n is a, c, g, or t
  misc_feature (164)..(164): n is a, c, g, or t
  misc_feature (166)..(167): n is a, c, g, or t
  misc_feature (169)..(169): n is a, c, g, or t
  misc_feature (173)..(175): n is a, c, g, or t
  misc_feature (179)..(187): n is a, c, g, or t
  misc_feature (189)..(197): n is a, c, g, or t
  misc_feature (199)..(209): n is a, c, g, or t
  misc_feature (211)..(215): n is a, c, g, or t
  misc_feature (217)..(220): n is a, c, g, or t
  misc_feature (222)..(225): n is a, c, g, or t
  misc_feature (227)..(227): n is a, c, g, or t
  misc_feature (229)..(230): n is a, c, g, or t
  misc_feature (233)..(239): n is a, c, g, or t
  misc_feature (243)..(247): n is a, c, g, or t
  misc_feature (251)..(251): n is a, c, g, or t
  misc_feature (253)..(253): n is a, c, g, or t
  misc_feature (258)..(265): n is a, c, g, or t
  misc_feature (267)..(276): n is a, c, g, or t
  misc_feature (278)..(280): n is a, c, g, or t
  misc_feature (283)..(286): n is a, c, g, or t
  misc_feature (291)..(297): n is a, c, g, or t
  misc_feature (299)..(304): n is a, c, g, or t
  misc_feature (306)..(311): n is a, c, g, or t
  misc_feature (315)..(317): n is a, c, g, or t
  misc_feature (319)..(322): n is a, c, g, or t
  misc_feature (324)..(326): n is a, c, g, or t
  misc_feature (328)..(333): n is a, c, g, or t
  misc_feature (335)..(336): n is a, c, g, or t
  misc_feature (338)..(339): n is a, c, g, or t
  misc_feature (341)..(344): n is a, c, g, or t
  misc_feature (346)..(349): n is a, c, g, or t
  misc_feature (352)..(355): n is a, c, g, or t
  misc_feature (357)..(357): n is a, c, g, or t
  misc_feature (361)..(361): n is a, c, g, or t
  misc_feature (363)..(368): n is a, c, g, or t
  misc_feature (370)..(370): n is a, c, g, or t
  misc_feature (373)..(378): n is a, c, g, or t
  misc_feature (381)..(382): n is a, c, g, or t
  misc_feature (384)..(387): n is a, c, g, or t
  misc_feature (1459)..(1459): n is a, c, g, or t
  misc_feature (2754)..(2754): n is a, c, g, or t
  misc_feature (2784)..(2784): n is a, c, g, or t
  misc_feature (2978)..(2978): n is a, c, g, or t
  misc_feature (2981)..(2981): n is a, c, g, or t
  misc_feature (3261)..(3261): n is a, c, g, or t
  misc_feature (3301)..(3301): n is a, c, g, or t
  misc_feature (3306)..(3306): n is a, c, g, or t
  misc_feature (3357)..(3357): n is a, c, g, or t
  misc_feature (3372)..(3372): n is a, c, g, or t
  misc_feature (3445)..(3445): n is a, c, g, or t
  misc_feature (3447)..(3447): n is a, c, g, or t
  misc_feature (3486)..(3486): n is a, c, g, or t
  misc_feature (3774)..(3774): n is a, c, g, or t
  misc_feature (3816)..(3816): n is a, c, g, or t
  misc_feature (3900)..(3900): n is a, c, g, or t
gncnnttnnaanngnntnnncnaannannnnnngnnncntnnntnangncngncnncntnnnntncnnnnnnnnnnnnnnnnnnnnnnnnnaaantttnnccnngnnntnntnnnnnnnnnnnnnnttnnnnnaannnnnnncnnnnannntnngnnnnnnncnanncnaaannnaaannnnnnnnncnnnnnnnnnannnnnnnnnnnannnnncnnnncnnnntncnnccnnnnnnntttnnnnntttncnttttnnnnnnnntnnnnnnnnnncnnnccnnnnttttnnnnnnntnnnnnnannnnnntttnnntnnnntnnncnnnnnngnnanntnnnncnnnnccnnnntnaaantnnnnnnanttnnnnnnaanncnnnnaaaaaaaaggacgccgcagcgtccttttttaaaaaattattcggctgtatctgccgcaagctttttacccggctgcagcacagctacaacggcgtaagtcaaaatgcaggcaaaccattccatataaataacattcgggaaaatacgtactgccggtacaaactgccacaataccagcatgataaaaccgaccagcagtgtccagaaaccggcagccttacagctgtactgcgggaaaaacaacgccacaataacaataacactgaaagcagccgtcaggctgagaccaatcatgatcgttcccaaaatgctggaaacacccatcgccatacccagcgtcagtacgccggagatcacaatgcacagacgcatcatcgtcagctgcttggcatctgaacatttagggttgataaaacgtttataaatatcgttggaaaacagagtacccgctgaaagcagcaggttacaggcagttgaaacatcggccgcccacaaagcagccagagtaacgcccgccagtacaggctgcagcccgacaatgacctgcggcaaagccaaagctgcctgagcgtcaggatacatggatttggcacaaatacccagcagtgccgccaaaacgcctaccggaagcatgataataccgccccagacaaagccttttcttgcagtagcggcatctttagcacccagtgaaatctgcagaatactctgcagcgacaaattcactgtaaccaaagtaattacccagctggcaatcgttttcagcccaaccccttcggtaaagctgaaccaagggacgttagcgggcagtgtcttggccagagtatcaatgccgccaaccttatccagctggataaaggtagctaccacgatcccaaaataaatcaaaataatgtttagaacatttgtcaatgaagccgaccacataccgccgataaaggtgatactgataaaagtaatcgcgctgaccagcatacctgttttaaaatcaaaaacctctggcatgatagcatgcaggatactgccgccggcgatatattgcagtgaaataattaccaattggataacgatntggcagaacacgcccaaaataacggcattcgtgccatgatgtcgttcgataagttcagaaatagtagtgatgttttgctcgcggtatttcttcgccataaaaatacccatcacgatagcgcctattgcccaggcaatagtataccagccggcagataaaccgaccctgaaagcatgctctgaaacaccgatcgtcgaagccccgccaacagccagaccgatgatcgtgaccgcgataagcggcgccgataatctgcggcctgccagcgcataattttccgcattgccttcgctgcgctttttagcaaaccaactgataccgaacaatgctatgatgtaaagtatcagtatcgctaaagaaactgacataaaaatacccctcccgattttttggcaataaaaaacgcccgctattgtggacggccaaagagtaactttattgtacgcaaagtttacattaaagtcaagcagaacttacacaatttcacacaaaactgctgtacaggaatataatatgcacatttgtttttgtagacaacacctattgctttttcatataaaagaatccttgcacaataatttatacagtgatataattaattgtgtttgttttactgtgtctttgattataattattaattttaacaatttatttgtgaatattagaacctaagggagatgattatcatcggcaggaaatcacgcaacacagatcaggccttaattaaggcgggcatagaattaattgctcagggtaattacgacccgactgtacgcgctatttgtactttagcaaacgttaaccagggtatgtttgtttactactttggttttaaagaagaatatatgaaagtcctttttcaaaaaatttacgaagattatctttccaaattgcaggattatcctgaaaaggatgccaaagccgctatccagctgcagcagatcttctaccgtatgacaaaatattttatcgaaaacttcaatacggcaaactttctgactgaagccttatatcacagcaaagctgcctcctatttcacaaactaccgcgtccagcattttatcttcgtccgcacacttatcgaacaggcccagcgtgaaggcgatatctgcagcgatatgaacagttatgaaatctacacgactttgcagagtatactgatccagccgataattatcaaaaataatatcttacagcagcataaaaacgaaccgctgatggataaactaaaacttattgacgtttcctcagaaagcagtctgcaaaaaaggctgcgcgttgcttttaaaggcctncgcccctgataaacgcctctgacaatattnaaaaaagcagttgacatttttccagaatcatatataataatatcgttgcttagtaatccaagcagcttcaatgactccgtagctcagttggatagagcgtttgactacgaatcaaaaggtcgcaggttcgaatcctgccggggccaccattgccattgacgcattcctttccggaatgcgtttttttattgccntcnggcaccgacatgcctgtccgataccagcaactttcccgctcccatttttgcttttctttaatatttttaatattaaagcttgaaaataatgctataataaaattaaatatctattttatcctaaagactggaccgtaaataagcggagggcattatgttgaatatacctcaggaaaaacttacagcaataaaaaattttgcacaccaatatatctttaagctgctttgtcagcaggacattccctttatcctcgctcatctcgacccgcagctaatcggnatcggtgccgctgagcacaattattatgatacaccacagncagcnaaagattttattctttcactggaagggcagattcccgcctgtgaattattnaatgaagaatggacnatcctcccgctggcacaaggcctctatcttgcccaagggcgtcattatcttacctccgacgaggatcagcagntnctcgttcagacacatcagcgggcaacgatcgtcatacgngatctgggcagtgatttcagctatgtctacatcaatctttcccatccctatcaggaattgcagggtacagaaaactttccttttcaggtaggctcgcagacttataaatatatggaagcagagcttaacaaagccaaagaacaactgcagcaaaagcagcagcaaatggaagtcgtactgcattctgtcaacggcggcgtcaaatccagcaatgacgacgatacctattcttatgcctatatcagcgaagagctgcctggtatgtttggttatactatggaagaattnaaaaaatttaccggcaacaacgctatgggaatggtctatccnccggatctgcccagggctttggctgactgcaacgaatgttttaaggacggaaatcctacttactcgacaaaataccgcgtgccntgtaaagacggcagcctgaaatgggtcatggacagcggccgtaaaacaaaaactcctgagggcaatacgatcatcaacagtatttatctggatataacaa

SEQ ID NO: 551 - DNA, 4000 bp, Escherichia coli
  misc_feature (781)..(781): n is a, c, g, or t
  misc_feature (908)..(908): n is a, c, g, or t
  misc_feature (1401)..(1401): n is a, c, g, or t
  misc_feature (2914)..(2914): n is a, c, g, or t
  misc_feature (3022)..(3022): n is a, c, g, or t
  misc_feature (3370)..(3370): n is a, c, g, or t
gctggaaaaaaagaccggaccggagccttcgcagcaccggcactcaatgccaggctcattgcagcctaagaatcctgcttgcgaaggatccgctcgaggatctcggtcatatcctccacattatcgagcaccttgcgggatacatgaatgggctgatccatctgcagggcaagcacgatagaatcacttgggcgtgcatcgagctcgataattttcttacccagctcattttccatgtgtagaataattcgggcaaaaaaagtgccctcatccacatcgttgatcacaacccgctcaattttagtttcaagacccttgaggatgagaccaatcaggtcgtgcgtgaggggacgctccttcttcaccttgttaagggtcatattaatcgcattcccaatcgctggatcgacataaatgacaaaagtcttttcctcgttgcccaaaaaaatagcacacccattggaggtaggcataacacctttgatcgtgacgatagcggaatcctgattcattgtgttattatctcgttgctttcttagcttcgcaagaactttacttttttttacaactattagggatgaattctgctccaaaagtacaaccaatacaaaaaaacctctttttagtgggaatgatggggacggggaaaagtacgatcggtaagattttggctcagcgcctgtcgatgaagtttatcgattcagatagcgaaattgagaaagaaagtggctccagtatacctgagattttttcagaccaaggagaaagtacattccgcaanatggaacgaacttttatcaaccagataaaccaggaccaacccgcggtgatcgcttgcggtggagggttgtgcataccagcaggaatgatggaactcctcaaatccaaaggtcatgtaatttgcctgntggccaatccgaccaccctcctcggacgaactcaaaaagacagcaaccgaccccttctgcaagttgcccaacctttgcaggcactggaaaaactacttcaggaaagggaggggcgataccgcgaggcagacaccattatcgataccgatgaactcttgccggagcaggtggtcgaaagaattattgagcatgccctgtgaacgcccgcctggcttactcctgccccatcgattctttgatcttctttaaaaaaatggcaggcgggcggacaagcttaccatcctggtcaatgaatgcgtgggtggtattccccgtgcacaaaacctcctggtttcgaaccacctgatagtggatttgaattttggcactgggtggctcctttatgctcacacgaacaaccaaacggtcatcaaagtgtgccggcttgcgaaattttgcttcgcagtgaagaaccggtagcaagtacccatctttttctaggtcccggtacggncaacccaactgatccagcaactcgattcttgcggcttcaaaccaagtaaagtaattcccatggtaaaccacacccatttgatccgtttcctgataccgaacccttatgccaacttcagccaaaatcatctctatattttctaggaagtatttaaatacgccaagcacgatttagacccatgggactaggaaaaacagagcgcagaataaccatagctatcggtttaatcattggggtaagtgtatcgtcgatgttggtaaaacatgcattggatgtaaaagaagagcagtcggcaaagcgtccagggaactaccactccatgcacagtgcagtgggcaatgttgcatttcctcccctgcccgaggcagtaaaaagcgccgtccccaatggtattgtcgtcttttttgaagcgaaccgcaccagtttgtcggaatcgcccgagaagatcgtcagcacatgggtcatcgaaacatcgggctctttccgttcggaaaggctattcgttttggcagaagtagaccacggggacttgcccaaaattcagtttttcagggcttctgaagtatatgtgaaactgaatgcagcgcactcgcgcgaatcattggaagatgggctcgatgaagaaaagttcttcattattggccaaaattcagcatcctctgaatacatcgtacaagtgagaaacttctccccttctgacctgatgcaggcaaaacactttttgcaatctctccgctgtgtgcaatctgtcaggcttgttccttgggcaccgatgcgttagtcgatttctatctcgttgaccacaggcaaattttcggtagtttagtttctttaaacggtcggtgatatatccttttatttcactcacccaacctcaattcaaacagtacaaattagcatcgtgaatgtagatatcaaggacgcgggggtagcccgcaaaatagcaacggtaagcttcgattcagacgaagtgagcaaacacgagtccaaagtctgccaggaactaggcaaattagtaaacattcccggttttcgtaaaggaaaagccccggcaaatgtaattcgcaagaagtatgctaaagaattaaaggacgagttgaaccgcaaagtatccactgctgcctatgaagctgtgctcgaaaacaaagacatcaaagtatattcggtgttaaaagtggacgctggcgaattggaaccttcccagtccgcatctgtggaggtaactgtggacattgaacctgaatttgacctccccaagtacaaagagtacgagctcaccgttgaaccaactgatgtaaaagaagaggatgttaccaaagaattggatgcaatccgggagcagcgtgcaagttttgatgtggtggagcgagcatcccaaaaaggagattatgtaaagtgctcctacgaaggcacactcgatggcaaaccagttgcagaaattctcctcgataaacccatgtacggcaagcaggcaaacacatgggaagaagccggaaaccagacaggaatgggngtggatgcgattgctgaaggagtactgggcatggctgcgggagacaaaaaagaagtgagtgctgactttgcaaaagactttgaagtggaagcactggcgggcaagtcngtgacttatcagcttgaggtgcatgaagtgcgcgaaaaaaaggctcctgcattagaggatgaggaatttcttaaatctctcaaaattgagagtgtggatgaattgaaagaaaaagttaccgagcagattaagtaccgcaaggagcaggagaatgttaacctgaagcgcaagcagatcacccagaatattctggacaccgatgacttcccccttccccaacaagcggtagaggaagaatccaaagcgattttccaaaaccgtatccagcaggcaacccaacagggagcaaaacctgaggagatcgaaaaaaaccgcgatgaatggtggaaagagtcccaaacccagggncaggcaagagtaaagctcaccctcgtgctttccaaaattgcagaagaagaaaaaatcaccgtcgaaaaagaggatttagcccaggcagcaacgcgggaagctatgatgcgacgggaagacccgactaaatttatcaaagaactcacccaggaccgtgcccgattgaaccggctccgggaagatatcgtttacgacaagacgcttgttaaaatcgccgaattatcgaaagaacaaatttgcgacatcgagggcgagcatacacactgattataccatgggtgcctacttaccacttccttatgtttatgaacgcgaaggccgccaagagcgtgcttgggatatttacagtcgtttactgcgtgaccgtattgtttttattgggacacctatagatgactatgtagccaactccatcatcgcccagttgcttttcctgcaaatggaagacccgaaaaaggatgttcatttgtacatcaattccccgggtggcagcgtgtccgacggaatggccatttatgacaccctcaacttcatgcagtgtgatgtggtaacttattgcatcggtatggccgccagtatgggcaccgtgcttcttgcagcaggcaccccgggcaagagatttgccctacc

SEQ ID NO: 552 - DNA, 4000 bp, Escherichia coli
  misc_feature (1985)..(1985): n is a, c, g, or t
  misc_feature (1989)..(1989): n is a, c, g, or t
  misc_feature (2009)..(2009): n is a, c, g, or t
  misc_feature (2561)..(2561): n is a, c, g, or t
  misc_feature (2657)..(2657): n is a, c, g, or t
  misc_feature (2891)..(2891): n is a, c, g, or t
  misc_feature (2900)..(2900): n is a, c, g, or t
  misc_feature (2918)..(2918): n is a, c, g, or t
  misc_feature (3747)..(3747): n is a, c, g, or t
  misc_feature (3860)..(3860): n is a, c, g, or t
  misc_feature (3879)..(3879): n is a, c, g, or t
  misc_feature (3884)..(3884): n is a, c, g, or t
  misc_feature (3956)..(3956): n is a, c, g, or t
ctggtcttttacgttgttgagccagaccgcttccgtgttgttgatggtctcgccaaccatcgccagcaggttgactggaccgctctggttcgaacgcagttgatcgatgacatcgacccgccgcttgtagttttccgcttgccgttggcgttcgagatatcgcgcctttacatccgccagctcacggtttttctgttcggcctgttccatcttgatggcgatcgactttttctgcttgtcgagctgcatccagtacgctccgttgagcacaccagctaacagcaggcacacaatcactttcagcagaggcgaccctacttcgcccatgtcgaccgagggcatcgaagacgcggacgccttcttgctcttcggtttcggcgctcccagcagattgattcggatcataggttttcaaaactcctcaaggccaaacctacggctacggccaattgcccggcattctgttccaccagctccgcgcccagcccttcgaccggaggcgtgatcttctggaacggattgaacagttctaccggcatcgagaactcctgccgcaaggcttcgaccagccccggcactttcgacgaaccacccgccaggtaaatcttctcgatgtgctctcccgccgcgctcgcgcggaagaagtcgaatgtcttctggatctcgagcacgataatttcggtcacttgctgcaggatcggcgtctttgcgtcttcgctgaccgttcccaccttgcgtcccagcttcagcgactctgcatcgtcgaaactcaaatcgagttctttctgcagcgagtccgtgtactggtgtcctccaacgctgacgtcgcgcgggaacaagggcgtcgtgcccttcacgatgttgatattcatcacgctcgcgcccagattcaaaagtgccaccacttgtcccggcgcgggctcgtagttgtactcatagcagttctgcagcgccagggcatcgatgtccacaatagccggggttttgccggccatcgagagtacgttggtgtagttcagaatcttgtccttcttgacggccacgagaagcacatccatttgcgggctgcccgcgtcttcagacagaatctggtagtcgaggttcacatcccccagatcgaacgggatgtgctgggcggcttctttctggatcgtttcggccagttcctggtcgctcatcgaaggcagcgaaattttcttcacgatcacagagtgtccgctcaccgccgtcgcgaccgctttcgtcttgatggcgttgtctgcgaacagcttcgaaatcgcgctcgataccgtccccgagtccacgatcatcgaatcgacgacgatatccggagccagcggctccagaccaaggtgcgccacttcgatgccgttgcggcccttcttcagctccaccgccttgatgctcgaggagcccacatccagaccaacaatcgttttcgatccgaatccaaacatgtgcccgccttttgtagcgccggcttatgccggcaatatttcgttacagtgacccggctgcctttacggctgccttcggtttcttcttgcccttcgtctccatctggttcgacttctcttccatccactcgtcgagcttcgacttcttgaagcgccaacgattgcccagcttgaaggcggggattttctgctccccgacgtacttgtacaaagtgtccggactgacccccaggtattgcgacgcctggcgaatgttcatcacttctcttgagtcggccatattcagtgtcccctccacagaatcaaccctctcttccctccgctcttggcggcgtttgagaggaaccgtaggaggaaattcctcgctcagtttcgtgttcgagtgaatttcagtgagccgagcatatctcaacccggaaaagccccgcctcgaagcgaatttccgtgttttattgggttttatgcctgttttctggaaatgacccggcacgtagttgcatgccgtgcctatatgttgtatgtaagatnggancgatactataggatgtagtncttatgcgttcgaggccgggtcactgcgtggaaagtaactgaagtactagagacggtacggaggtaccggcactaccgcgaatgccccttctttttcaacgaattcccacaggcgccctctgaattagtctggtgtcgtctgacctgttcggtgttttgccggattatgaccgattcgtctgttcaatcgtcacagaatgctggagttgccgcccctaaggttctcttgtgagccctgacgaactgcttctgcccactctcaaacgctactggggatacgattccttcctgcccctgcaggcagagatcgttcgcagcttgctcgctcaaaaagacacctgcgtgatcatgccgaccggaggcggcaagtcgctctgttatcagcttcccgccgccctgctcggcaagacagcgatcgtcatctcgccgcttatcgcgctcatgcaggatcaggttgcgcaacttctacagatgggaatcccgaccgcagccatcaatagcgccatgccgcgctccgaacagacaagcatcatgcgcgaggctgtcggcggntcctatcgactgctctacctttctcccgagcgactctcgcaaccggagacaatctcgtggctcaagcaagtccccatcgccttcttcgcgatcgangaggcccattgcatttccgaatgggggcacgagttccgccccgagtatcggcagctcagttcgctacggacaaactttcccacgctgccaattgcggccttcaccgccagcgcgacgcgccaagtgaggcacgacatcctcgcccaacttaaattgcgcgcgcctgaccgctacatcgcgagcttccatcgtaagaatctgcgttacatcgttcgacagactgacacgactgancagcgaccngctctgctgcgtgcactnaaccactaccgtgagggcaacatcatcgtgtacgcccccacgatttcagaggtagaagagacagtcgactatctggccgaccagggcatacccgccgttgcgtatcacgggcagatggaagcccagcagcgtcgccgcaaccaggaaaaatggacctccgacgaagtccgggttctcgtcggaaccatcgcctttgggctcggaatcaacaaggcctccgtccgcgccgtcattcatttgtccctccccaagtcgctcgagcagtactaccaggaggctggccgtgctggccgcgatggtcagccctcagattgcgttttgctttggagaaagaaagacgcagggttgcttgcttacttcatcgctcaaatcggcgacgccgaggaaaaagatcgcgcctggcagcgttatcaccagatcaagaatttcgttgagtccaacgcgtgccgtcatcgccagatctgtctgcattttggcgagactcctaaatggacaacctgcgattcttgcgacttctgcggatgcctgcctccgtggctccagttcggagcgaccgtttccgctacacgccgcaggaaatattctttgcccgccggatacgtttcccctgcatccgcaccgactgcgaacccagagttgcgtgagtacatgaaggaatggcggcgacgcacgtcacaggaacagagtgtgccgtcattcgtcgtgatgcacgattcatcgctcgacgaactctgctcgaaaccgcccaccacactcgcggagttgcaggaaatcagaggcatcggagaacgcaagtcggaactttacggcagtcagattctggaagcgntacgccggttccaagaaggtgcacgagccgcaacgcctcgtggcagcgcaaccaatgctgcggcggagacattgcgtctgctgcaggaaggacgcacctttgacgaaatcgcnaagttgagggaacgacagntcacnaccgtcatcaacgccgtcgcgtgcctcgtcgaaagcggagatgttcccttcgatgacacttgggtggacgcnggccgccgcgctcaaatcgaagtcgcctgcgcccaacacggaac

SEQ ID NO: 553 - DNA, 4000 bp, Escherichia coli
accagcagcacctgcaggagctggacgctctgcaaccatagcttcagttgtgatcaataagccagctattgatgcagcatcttctaaagctgtacgagttactttagctggatcaattacaccaaatccaaacatgtcgccatattcttcagtttgagcgttaaatccaaatgaatcgtcatcactttcacgtacttttcctgcaacaactgcgccatcaacaccagcattttcagcaatttgacgtaatggagattctaaagcgcgtcgaacaattcccacaccagcttcttgatcagagttttcacctgttacatttgctagagctttggctgcttgtactaatgcaactccaccaccaacaacaacaccttcttgaacagctgcacgagttgcgtttaatgcgtcatcaacacgatctttacgctctttaacttctgtttctgtagcaccaccaacacgaataacagcaacaccaccagccaatttagctaaacgttcttgtagtttttctttgtcgtaatctgaagttgtttcagcaatttgttgtttaatttgtgcaacacgtgcttgaatttcagctttttcaccggcaccatcaacgattgttgtttcgtctttagttatagcaactttctttgctgttcctagcatatccattgttactgactctagtttcattcctaaatcttcagaaatcacttggccgccagttagaacggcgatgtcttgtaacattgcttttcgacgatcaccaaaacctggagctttaactgcagaaattttcaatccaccgcgaagtttatttacaactaaagttgctaatgcttcaccttcaacatcttcagcaattatcatcaatggcttaccagattggattacagtttctaataatggtaccattggctgtagtgatgatagttttttctcgtgtaataagatcaaacaatcttcaagctctacagtcatcttgtcagagttcgttacaaagtatggtgataggtaaccacgatcaaactgcatgccttctacaacatcagtttcagtttccagacctttattttcttcaactgttataacaccttcattaccaaccttttgcattgcatcagcaatttggttaccaattgcggcttcgccatttgcagaaatcgttccaacttgtgcaacttcagcactatcttttacttcacgagccatttctcttattgaagtaaccactgttgcaactgcagtatctataccgcgcttcaaatccataggattcattccagcagcaactgactttaagccttcacgaacaatcgcttgagctagaacagtagcagttgttgtaccatctcctgcagtgtcatttgttttggaagctacttccttaaccatttgtgcacccatgttcatgaacttatcttctagttcaatctctttagctactgatacgccatcttttgttatacgaggtgaaccaaatgatttgtctaaaacaacattacgaccttttggtcccaaagttacttttactgcgtctgcaaggatgtttacaccctctagcatcagattacgtgcatctgtgccgaattttacgtcttttgctggcataatttatgctcctaaattcttgttataattaaagcagaccaagtatgtctgactctttcatgattaataactcttcgccatcaatcgttacttctgtgcctgaccatttgccaaacaaaactttgtccccagctttaactgccatagggattaattcaccattatctttgcgagcgccttcgcctgctgagataatttcgccttctgctggtttttctttagctgattctggtatgatcaagccgcctgctgttttttcttcgccttcaatacgacgaactaaaacgcgatcgtgcaatggtgtaaatgccatgaagattgctccatttaaaatataacgcggaggtttaacgacattagcactcacctccgccgagtgctaacggaggttgtttattcagagtcttaaggctagtcaatacctaagattaaggtttggtattcctatttataatataacctgataggtgagcgccatgacaaatatcattaacaaactttcagaaatttccacaaattatgatgcaatattttgcgacttatggggatgcttacacaatggcatagcaccctttgaagaagcaattaacgcattagatgaattctcgaattcaggtggaatagtgcatttactaacgaattcacctcgcccctcttctgatgtctataaacaattagacaaaattggcgttcctagaaatatttatcaaggcattacagcgagtggagatgcatcaagagaagctttgatctcgggcaaatatggtgcaaaaatatttcatataggtccttcgcgcgatgaaatatttttcaaaggtttaaatgaagataattctcaactaaatattcagattgaccgtgttccttttaataaagcagaaggcattgtgtgtactggcttatttgatgacgacgttgaaacaccttttgactatactgaacaattaattgaggctaaaaaccgtggtttaaagatgttatgcgcaaatccagatatacaagttgatagagggacacatagaatttattgcgctggtgccattgctaaggcatttaatgacatgggcggtactgcagataattatggcaaacctcattctcccatttataacctggcacgagttagattaaataagattgcaggtaaagttattcctgataaaaagatcctgtgcgttggagatggtattaaaacagatattcacggagctgttatggaaaatttagatagtttatttgtcactggtggcttagccgcagaggaaacaaatacatttaaacaacctgaagcatcaaaattaggcaaatttttagctgcatcccaattgacaccaacctattccataggccatttgcgttaaacaagagtatttcacatgcgaacaataagagattaccagttcatagccgacgaagatcgtggagcagtagctgcaattggaaactttgacggcgtacatttaggccaccaagcggctctaaatttggtgcaagaaattgcaaaagagagtggctcatacgtcggaacactcacatttgaaccacatccacgtgaatatttcgccccaacatctactgcctttcgcttaatgagtgcagacgcaaaagctaatcgtcttgaaaagttaggtgtcgaacgcctttatcaactaaactttaatgcagctctatccgctttaagcgctcgtgagttcgctcgcgatgttattcataatgctttgggtctaactcatgttatagtgggagcagacttttgttttggcaaagatagagcaggtgcagcctcagatctaatacaattcggtaaagagttcggcttcaaagtaacaatagcagaattattaaaagataatgatcaagtgttttcatcaacagcaattcgtaatgctttatctgatggcaagccggaggatgccgcacgaatgcttggccacttacatcgcattgaaggcccagtaattcaaggtgatcaaaggggtcgagaactaggttaccctacagcaaacctttcaataaatggactgcatccaccgaaatatggtgtatatgcagtaaccgttgatatattagatgggccatcacaaggtaggtactttggcgctgcttcaatcggcgaaagaccaacttttggtgtctataaacctaatttggaagtatttttatttgattttcacgctgatatttatggtgcaaatatctcagtagcacttgtaaattatcagcggcctgaactaaaatttgatactcttgatgctctaatagttcaaatgaataaagattgtatggtcgctaaagaaactctaaataatttgtactcatagtgttataatttttcaaaataatctgcgtaatcatttatagcaacttcccccaaactcgaaatattataaataccacgctg

SEQ ID NO: 554 - DNA, 4000 bp, Escherichia coli
  misc_feature (445)..(445): n is a, c, g, or t
  misc_feature (811)..(811): n is a, c, g, or t
  misc_feature (860)..(860): n is a, c, g, or t
  misc_feature (1323)..(1323): n is a, c, g, or t
  misc_feature (1635)..(1635): n is a, c, g, or t
  misc_feature (1986)..(1987): n is a, c, g, or t
  misc_feature (2012)..(2012): n is a, c, g, or t
  misc_feature (2632)..(2632): n is a, c, g, or t
  misc_feature (3366)..(3366): n is a, c, g, or t
  misc_feature (3422)..(3422): n is a, c, g, or t
  misc_feature (3438)..(3438): n is a, c, g, or t
  misc_feature (3563)..(3564): n is a, c, g, or t
  misc_feature (3854)..(3854): n is a, c, g, or t
  misc_feature (3938)..(3938): n is a, c, g, or t
  misc_feature (3968)..(3968): n is a, c, g, or t
agcgtcttcgcctgctttaatcatagcctcggctgacttgagaaccttctgagcatttgcccagctctctgctgtgtagtctgatgctgtcatagcaagaatctttcttgcttctttcttgagtgattcataaggtgaaacaacgattggctttgatgtaagcttgtatgttgtacaaccttcgtttgtaatttcgattgtagcgccgtctctaacgcctgtgatatctgctgtctgacctgaaccgctgctgagaataatgcttacttcgtcaacattatcgaacttaacaacatagttgccgtcagaatctttttctgtaagagcaacgcccggccatgcgcctgtgagcttctgtgtatcattccaagcatagattttgtagcttgcagatgggctgtaaggcttgattgttacggaaacagaaccctctgcaggctctggntcgccgccgcctccctgctgattaccgttggttactgtcttaaccgatgtgtagttgccgttctgaatttcgagaacagcaccgtcataaagacctgtgatatcgcctgactgtgagccgctgccgttgttgagaacaacgctgaatgacttgtcggctgaaacaggaagtgtgagttcatatgtgtttgcctgacctgaaacggctgctgccttttgacccggccatgcaccgttgagtgctgtgcttgcacctgtccaagcgtaaacattcggagcgcctgctgtgctcttgattgtaagctttgatgtctgacttgctgtcggaccgggaacagttgtgctctgtgtcgggctggttgtaggnttttcgtcgttttcgccgagcttgaggaatgtgaatttagcctctgagnttgccttgtcgtttgtagcctcaacagttacttcgattgtatcgttcttgtaagctgtctgaccgattgtgaatgtgtcgccgtccttaacaacaaacttgttaccgccgtcaacagaaacctttgcgctgtcgcattccttgagagaaacagtaacctgctctgtgccgtagaacttcggctcgcctgtgattgatacaagcggctgaccgtcagcattttccataaggattgtgccgtttacaccgctgttgaaagttaccttaccgtcagtaacaactgaagatgagttgtcataagtattgattacatagctgccgtcttcccaaagagttgaaacatcaacagttacgcttgaatttttgttacagccgattactgcagctgcctgatctgttacgccgttcttatcgtatgtacggccgaaagcaacaccgcttgtagctgagagcttaacatttgngccggcaccgatggatacatgcttgttacggaactgaccaaccttctgccactgagcaagaagagttttgtccatgtcgttccagttcatatcacttctgagtgcgtgacccgatccgccgtaaccgtcaaatgcaacgccgggatagagaggacggttggtttcgtcaccgtagaaaatctgaactccgcccgggagaaggaggaatgcagccgcattgtaaagcattgtgttctcatcgccacgggtaagtgtttcatcgtgtgatgacataaatgaaagaacgttaaagccttcctttgtgttgatctngtctgcatagccctgatatgtgtttgcaacactaccgcttgcaagagcaccgccgcctgtaactgcgaagttaatcattgagtcgaagccgccctcggaatagtatgtgtcgtagcctacaccgtgatcccaatgctcgcctgtcatccagaaatcttctttccagtcagcacctgctttgcccttgttgttggatctccactctctgagagcagaaacacaagcctgcttgagctggttccaagaagccttatcaacatgctttgcagtatcgcaacggaaaccgtcaacaccgtactccctaacccactctgaaagccaggttgaaaggtagcctgttactgtgtttgnntcaccgtattttgcgagcttctgancatatgtaccttcctgagtccactttgttttgaggatcggaggaattgtaacatcctttgtctgctctgttctgaagtcgggaagtccgctgagtgacattgtaagatcaccgccggcaccctctgtatatccgggaagaccgctgcggatccagtcattgctccaccatttgccccagtcttcttctgatgttttatagtcaatgtggtcgtttacttcacctacatctgtgagcttgtatttgaagtctaacgcaccgtcaaggagagtaccgaagccgaactgctccatatctgcaacggtgttgtagcctgtgtggttcattacgatatccatgataactctgataccgtgctcatgcgctgtgtcaacgagagttttgaactcctcttttgtaccgaagtttgcatcggtttcggtatagtcaagaacatagtagccgtgatatgagtagtgagcaaagcccttacctgaatcacaatagccgtgagtctgctcatacggagctgagatccaaattgcgtttacaccgaggttatcaaaataaccctcttcaattgactgagtaacacctgcaaagtcgccgccgtggaatgtaccggggtttgtatcccagccntcaagcggtttgccgtccttgtcaagtgttctgccgtatgaatggtcatttgcggtgtttccgttcttaaaacggtcggtaagcaggaaatacacattggcattatcccatgtaaagccgtcatcttcaacaagtgaacctgcggcagttgatgatgcagatgtgctgctgtcatcggaaactgttgcagcacttgccgaaccaaatgctacggaagcaccggggagagccatacaaagtgtcaaaacggcactgagcgctctcttcatacttctttttttcattgtttgattactcctttcaaagcttttaaaacgtagggtcaaacatccctagacaatttgattttatcacaaaactctcacaaaaactacacataatccttttattttgtaaaaatagcaagttacacaatctttacactggaattttatgcaaaattacccttgtcgctcttctgtttttatttataaagacagtttcaattgcccccctgccgaaaattacataaatacggtcgggaataataagatttgtacttaacaaaactttattcccgaccgcaattttcgctttttaatttttatcttatctgagtcttacattcaaaaatctgagtttaaaggttgagccgacgccgagtttggaatctgcggtaatatatccgcctgttttttcaacaattgattttgcaagcgacagacctatgccgacgcttgacggggatgaatttngtgctttatagaacctctcaaaaatgtggggcaaatccttcgggctgattccgcanccgttgtcgcttatgntgatttccgaatacatactgttcctttcggcagaaattctgacataaccgccgtcggtatgctcaatacagttttttacaatgtttgaaaccgcttcgcaaatccagcgaaaatcgcaattaagnntaaaatcatttttgacggttttttcaattctcacatcacggatatcggcaagaacctctgtgcgtgaaatgcactcgtcaattattttttcaaccgacacatctccaaacttcaattcaacagttcccgaatcaagcattgagagcgtgagcagactttttacaaggaaatttatcgaatgggcattatgcgctatatccataacaaaatcccgtctgatttcaacgggcatatcatcgtcatcaaggatattttcggttgtaatcaaaattgaagtcagcggtgttttnagctgatgtgaaatgtcggcaagcgaatttttgaggatttctttctctcgcattgaattgtcggcatactcacgaagcattacngttgttttttgaatctcctgctttaacagngacatatcgtcgtcggttgagccgtcaaggtc

SEQ ID NO: 555 - DNA, 4000 bp, Escherichia coli
  misc_feature (48)..(48): n is a, c, g, or t
  misc_feature (198)..(198): n is a, c, g, or t
  misc_feature (466)..(466): n is a, c, g, or t
  misc_feature (949)..(949): n is a, c, g, or t
  misc_feature (964)..(964): n is a, c, g, or t
  misc_feature (988)..(988): n is a, c, g, or t
  misc_feature (990)..(990): n is a, c, g, or t
  misc_feature (1138)..(1138): n is a, c, g, or t
  misc_feature (1259)..(1259): n is a, c, g, or t
  misc_feature (1364)..(1364): n is a, c, g, or t
  misc_feature (1394)..(1394): n is a, c, g, or t
  misc_feature (1599)..(1599): n is a, c, g, or t
  misc_feature (1610)..(1610): n is a, c, g, or t
  misc_feature (1617)..(1617): n is a, c, g, or t
  misc_feature (1694)..(1694): n is a, c, g, or t
  misc_feature (1880)..(1880): n is a, c, g, or t
  misc_feature (1931)..(1931): n is a, c, g, or t
  misc_feature (2005)..(2005): n is a, c, g, or t
  misc_feature (2015)..(2015): n is a, c, g, or t
  misc_feature (2024)..(2024): n is a, c, g, or t
  misc_feature (2045)..(2045): n is a, c, g, or t
  misc_feature (2052)..(2052): n is a, c, g, or t
  misc_feature (2983)..(2983): n is a, c, g, or t
  misc_feature (3408)..(3408): n is a, c, g, or t
ttgcccaaagccacgctgtatgtgagcttagagccttgctctcacttnggaaaaacaccgccttgtgccgacttaatcatctctaaaggggtgaaaaaggtggttgtgggctgtgtagatccttattcggaggtgagcggaaggggcatagaacgcttgcgaaaagcaggtgttgaggtgcttgtaggcgtgttaganaaagagtgtttgttcttaaatcgcttctttatcacctcgaacacgcttcaacgtccatacattatattgaaatgggcgcaaactctcgacggctttatcgattgcaatggcgaggcaacagctatttctattccttttacttcgatgttggttcacaagctaagagccgagagtgacgccatacttgtgggcaataatacagagaaaaaggaatgtccaagattgaatgtgcgccactggagtgggcaagatcctaagaaagtggtgntgtcgagcaaaacaactattcccgagttgctatcgtctttgcacgcagaaaatattcaatcgctaatggttgaaggtggattaaaaacccataactcgtttattgaggccgacttatgggacgaaatacatatagaaacggctcctttcacagtgggaaagggcacccgtgcgcctcaaattcctgctaatgcaaaactaattgagcacgaggattgggacggaaaccaaacttttgtgttggtgaaagaaaacggcttgttagggaagtagtgcttttaaggtgtcgagcttatgctttctgtcgatagagtagtcgttactatatttatcaacgaatagatataggctataagctttattcaaaatcacttctttaaaggggttagaaaggtagtctgcttcggcaaaatacaactcagcaagcatctctaacttcaacaaacgctcgttttctggaaagctttcagcctctttcatcacntcatcaatagtggcngtgtggtagaactgatagtctccnangaactgagtgtataggtctttgatggcttctctgcgcttttcatagtcttttttagccattgctcgttgcaaagcagccgcaaactcttttactaatcgaataaaataatcttgtcttatcatgatgcacaaagataagaaaaaaagnaattgacgatttatttttcattacttttttgaacgaagcagtgcattaaaacaacgaaagacgtatctttgtagtgatgatagaactaaaactgaaccaattgcaggtgggttatgcctcnaaaggaaagcaggtgcccattaaccaatgcgcctttgatgtggagatagcccgcaatgagctgatttgtttgattggaaagaacggcgttggcaaaacaactctnttgcgaacgctggctggtttcattgcaccngtggcgggagaggtgttgataaacggccaattggtgggcaactacactgcaagtgagctgtcgaagctggtgagtgtggtgctaaccgacaagatagacacgggcgaaatgagcgtttttgagttggtttcgttgggcagattgcctcatactgggttctttggacgtttgaatcagcatgacatcgaattggtaaatcaggctntttcgctcttnaacattnagcatttgaaacataaaaaggtgcagatgttgagcgatggagagcgtcaaaaggcgtttatagcaaaggctatggcncaagaaacaccgctaatgttgttagatgagcccagtgctttcttggattatccaagtaaagtggaactgatgcaacagctcaatagattggcaaaggaatacaataagattgtgattctatccactcacgacctcgatatcgccttaaaagccgacccagagctgtggtttatgtcttcagaaggncaactcatcacgggcagatgcaatgatgaggcgatgaaaaagcaggtggcngagttgggatatagcctgtaatagtggggcggtttcagggtggtttcggctttcaataaggctattttcctttntaaagcaccncaaaaagantgcaacatcatttttattctnatctatngagcgtgacaatcaaaaaaaaacgtttgcggttggggatttcataattaatgtttaactttgcagttgaacaattatttcaagagaatctttttgagtttactaagcgaaaagattaagttgtaatagcatttcattaatatttaggtgcaaatcaccattattgaagcaacaaacagcatcattgcgtttggtgaaaagcctcgcccctatagttaaatggatagaacgaaggtttcctaaacctttgatccgagttcgattctcggtgggggtacaaggcaaaagcattctacttgaaataaaagtaatcgaggatgattatctaaataacgaagaagggaaagtacttacacaagcactttccctttattttgtgtccataggagcacattttaagtagaagaaaaatgaaaaagtgaattccaacgaacttcacagctcatcggaattctttacgtaacataattaaaacagatttattttatttgatattctcatatgcacgaatagcctcaacaaatcgattgttcacgtctttgaacgtatataaaccgtcattattgggcgttaatcccttaagtttgagctcaaacaccattggtggtgtcttaagatcgagcggtttgagtcctcgaagctggtctgttgattgataaacgagattcaatgcaacgaaaacctcaccttttttgtctacccatttctcgaaaacaagtttgcatccgatgggcgttttcttttcaattgtattgggaagcgaatagggttcgatacccaatgctgcgccaacgctggcaatattagagtcgtgtccacacaaaaaggtgaactttctcttgtctgcattcagctcatcgttgatataaaccaacaaaggatgagccacattcactgccactatgggtgctgcaaagagcacatctccatanacatctttcacttttgcaatcttttcccaatccgatagcgtcaaatcgtggccaaaagccgccttctttgcgtcgctctcttcgtagtattgcaagataaaagcatctgatgcagtgtttgcaagtttcaaagaacccttcatttgaggctcttctccaagctctaataatatctttgtattgtaattatcaaacgaacaagcaatcccctccttacaagctggagagttttttaaatcaagtgtgttttcaatgatatcgtaactgctttttaattcttcgttgattccaacaataccacgttttcctcccattgcagctatttgcttcaaagcttcctttttgaattcttctgacaccttagtgagccttggaaagaagataggatccatcttacttggcgagaatctatggtgaacttggangtctgcgataggcataaatcctgcagaaaaatagcgtgcggtagctattgtgcgctgcatactgttggcatataccaatatgtcatcgtgcaaaggtacataattttcttgaaataatccttcttttacgagccattttctaaaaaattgacccatgatagtttctaaagcacctcctcgaagggttaattcactcgctgaagagctccaatctgtccactgatgtggggtgagtttgcccaatacactccctccatttgaaagaggagagcgtatgttgtggcgactcaaaacaacgacttctttgagcgaatacttttctttgaaactatcgctacgtttgatttgcgctgttaaagttatggggttgagccataaacttagcagtaataatgatagaaagatgtacttacgtttcatgatgtttggtaggataagttaattaaaacttgacttggagtcgggtttctaatattcccacatgattattgtcgtatcctgcacgatcagttactttggtgtaagatgcacgcaaacgccaaatcatgtatttattgaggtagtaattgtaggttaacgaccagtcatttgc

SEQ ID NO: 556 - DNA, 4000 bp, Escherichia coli
  misc_feature (175)..(175): n is a, c, g, or t
  misc_feature (183)..(183): n is a, c, g, or t
  misc_feature (190)..(190): n is a, c, g, or t
  misc_feature (295)..(295): n is a, c, g, or t
  misc_feature (316)..(316): n is a, c, g, or t
  misc_feature (523)..(523): n is a, c, g, or t
  misc_feature (2925)..(2925): n is a, c, g, or t
  misc_feature (3045)..(3045): n is a, c, g, or t
  misc_feature (3086)..(3086): n is a, c, g, or t
  misc_feature (3114)..(3114): n is a, c, g, or t
  misc_feature (3402)..(3402): n is a, c, g, or t
cgcgccggtggcggtgtggccccgaatcgagtagccggtggcaacgaccgtcagcgagcggccacccggagcgatcgggacgggcaccgcggactgcccaggggagacagccgcgaccacgcgggccttcgcctcgatcgcgagcgcctgctgctggtacgaggcgatcgcggcntgattcanctgctgncggctcgagagcgtcgccaggtacgaggcgcgttgcgagcgggcctgctcgagcacgagcgtcgactgcgaggcgacctgcgcgaggccctgcaaatggcgctcnttctgttggagcccgcgcgtnagggccaccgtgttgtgcttcgccgcccgcgtctgctcgatcacgacgcggtcctggtcggcgatccggtcgagcgagtcgaggttcccgagggcgtccgcgaccgaggtggcgcccagcacgaccgccagcgggtcggtgtcaccctgttcgtagagcagctgcagcctgttggcgagcgaccgctccgagaccttcagcgtgcgntgtgcgacgcgcagccgttcgcgcgcggccgctagctcgcccttcacctgagcggctcggatccgcagctccacgagtcgcgtgcgctcgcgcgcgaggcgcgagtcgagcgagtagagctccagcacaaccccgcgcgagcgggcggccaggtcggcgttctgctgcgtcagcccgcgaatcgtggaatccgactcggcggcgacggtcgccgaagggaccactccgacgagcaaaagcagggctccgacgacgaccggccaatagcggagcgtgcgtatctcccccggcacgacgcggcaccgtaccacacgagtttgtgccaatccgtgcacaatccggcatttggcccttttgggtcaaggaagccgtttgcggtcgtccgacaaggttgttagggtgccgtgcttgtgacgtaccggccctccttttgggggcgcctgtcgagccgattacagccccccctccgctcgacaagacgtaaggcgccggcactggtcatcgcattggctgcggcttctgcactgactgctgcttccgcgtcggctgatccaagcgtcgcctccaagcaggcggaagcgcagagcgtgatgtcgcagatccagcagctcgactcgagcctggagcgagcggtcgaggcctacaacctcgccaacgtcaagctcaaccggatcaagcacgacctgaccgacaacacgcacgcgctcgtggtggcgaagaagagcctcatccactcgcaggcccagctctcggcccggctggtggacatctacacctccggcgaccagaacgccggcctggcggtgctgctcggggcctcgagcctcgacgacatgctcggccggatggacgcgagcgaccgcgtctccgagcaggactcgctcgtgctcaagcaggtcgcccacttccgccgcgaggtgcagcaccggcagcggttcctgcagcacgctcacggcgagcaggtgcaggtagttgcagagcgcgatgcggcgcgtgcctcggtcgagtcgcagctcgggcagcgcaagcagctgctcggctcgatccagggcgagatcgcgcacctgaaggcggtcgacgccgccaggcaggcggagctccagcgccaggcgctcgccgcgcagcagtcctcggagcgacaggcttcgctcgcgccgacggtcgggatcggctccggcagcacgatctcgccgccgacgcccgcgccgccggccacccatggcggcgtcgtgggagtcgcgatgcagtacctcggcacgccgtacgtctggggcggcgcctcgccgtccgggttcgactgctccggcttcgtgatgtacgtctactcgcaggtcggcgtctcgctcccgcacagctcgtacgcgcagtacggctacggcagcccggtctcgatgagccagctccagccgggagacctcgtcttcttcgacggcctcgggcacgtcggcatctacgtcggcggtggtacgttcattcacgcgccgcacacgggcgacgtggtcaagatctcctcgctcagcggctggtacgcgtcgacgttcgtcggcggccgcaggctctagctcgagtagagctcctcgatctcgcgcgcgaagtgctccgcgacgacgcggcgcttcagcttcagcgtcggcgtcacctcgtcctcctcggcggtgaagtcccgcgggaggactcggaagcgcttgatctgctcgaagcgcgagagctcgccgttcacgccgtcgacgaccgcctgcacccgctgctcgatctcctccggcgggagcccgtcggcagccgccggatcgaccgtgatcagcgccgccacgtagggccggcggtcgccgagcacgagcgcctgtgagacgagcggcgaagtcttgagcgcgttctccaggttctgcggcgcgacgttcttgccgccggccgtgacgaggatgtccttcttgcggtcggtgatcgagatgaacccgtccgcgtcgatcgagccgacgtcgcccgagcgcagccagccgtcctcgccgagcacctcgcgggtcgcctgctcgtccttgtagtagccggcgaagaccgtctcgctgcggatcagcagctcgccgtcctcctccacgcgcacctcgaagccgggcagggcgggcccgacggtgccgaagcgaaagcgaccgggccggttgaccgaggcggcggtggtgcactcggtcaggccccagccttcgacgatcaggatgtcgatcgagtggaagaacgcggcgatctccttcgagagcggcgcgccgccggagacgccgagccgcagccggccgccgagccggttcttgatcttcgaatagaccagccggtcggccacacggtgccggagcgccagtccacgcggaaccgcttcgccgcgctggcgcaactcgctgacctgccgtccgacnccgagcgcccagtccagcagccgccgccgcggtccgtgcacctgctcgaactgcgccagcaccgccgtgtgcaccttctcgtagagccgcggcacgctcggcagcagcgtcgggcgcacngccggcatcgcctcggcgacccgcagtggatccgggcagancgcgatcgtgaagcccttgtgcgcgccnagcaggtgcatcagccgcccgaagttgtgagcgagcgggaggtagaggagcatcacgtcgtcgccgagcgcgaactccggaacgcgatcgatgcacgtcgccatctcgtagtagttgcggtggcggatcatgcaggccttcggcgggccggtcgtgcccgaggtgtagatgaaggtgaacaggtcctcctcgccgatctgggcctccgcctcggcgagagcatccgggttggcggcggcgtgcttgcggccccgggcgcgcacctcgtcgaggtcggcgaaggtgagnacgtgccggagctcgacatccgcgatcttcgcgcgctggtcctcgtcttcgacgagcacaccgatcgcgtccgagtgctcgagcacgtagcggcagtccttcggagagctgttcgcgtagacggcggccccgacggcgccgatccgcgcgagcgcgtaatcgaacagtgcccactcgagcgtcgtctgggcgaggatcccgaaggcgtcccccttgcgcacgccgagcgcgagcaggccgttggcgagctcgtcgaccgtgcggccggcctcggcccatgagacctcctcccagccgtcctcgccctcgacgaggtacgcgggcctgtccaggtcggcggcgaccgcctggcgccagagctgtccgatggttcgcacggcgccagcttacgctggaagggaagcggcaaggggcggcgaatctgcccggtcccactacacttatcaacagcgaaagcggcctcagatgcgaactacctggaacggatcactcagcttcggactggtcaccatcccggtcggcctggcgccggcgacggcgccgaaggcccgtgcctccgacgtcaccttccggaccctgcaccgcgagtgcgggacgc

SEQ ID NO: 557 - DNA, 4000 bp, Escherichia coli
  misc_feature (1973)..(1973): n is a, c, g, or t
  misc_feature (1985)..(1985): n is a, c, g, or t
  misc_feature (1995)..(1995): n is a, c, g, or t
  misc_feature (3545)..(3545): n is a, c, g, or t
agaaaaggaatattctcttatatttaaggatctaaaaaaccaaacagatgaaaattaatttaaaattgtccttgtcctgcttagtgggtttgatttgcctgaatactagtgcacaagagaccagcactgcaaaggcttctgatagtattaaaaaagccacaaaggaattgcctttggaaccgtctagatctatagctttcaccaccgataaaggtacctggacttccttggatgtaagcccagacggtcaaaccatagtttttgatcttatgggagatctatacaccatgcccatttcaggaggtaatgctaccgccatcacccatggattggcttacgaggttcacccgaggttcagtccagatggaaaatctttagcgtatatttcagacaagagtggttcagataatatttggctcatggaccttagctccaaagaagacacccaaatctctaaagagcaaaaaaataactttttctcagtggcctggtcaccagatggagattatttggtgggtgctaaaggcaggagaaacataaaattacatttgtatcacaaggatgggggtggtggagcaccattaattagtgagcctaagggtttaaaagccatagatcctttttttggtgcggacggtaaaacactctacttttcacaaagaaatggtgcctggaattacaatgcgcaattgccccaataccaagtaggaacttatagcatggaagatggtgccacagatgtaattacttctaggtacggttccgcatttaccccaaccctttcaaaagatggaaaatggttggtctatggtactaggtttgaggaccaaacaggtctaatattgagagaccttaacacaggggaagaatcctggctggcctatcctgttcaaagagacgagcaagaatctatagcgcctttaggggtccttccagccatgtcttttaccccagattctaatgcattaattgtttcttatggtggtgacattcacagaattaccctatcagataagacggcttctaaaattccatacacggcttcagtagctttggaattaggtccgcaattggattttaaataccctatctcagatgcagacactgctatggcttctcaaataagggatgcaaagccttcaccagatggaaaaagattggcctttactgccttgaacagactttatgtaatggatttacctaatggtacaccaaaaagagtgaccacacatgattttacagaagcacaacctgcctggtcaccagatggatcacaaattgttttcaccacttggaatggatctgaaggacatttgtataaagcccgtatgggaagaagaacggctgtagttaaactcactcaaactacaggtatctatacacagccaagatggtcttacgctcaggacaggatagtttttcttgcaggaagtaatcaagtgtataaagatgctataggtccaatggcctctaacgctactgaagaccttatgtggatctctggtcaaggtgggagcaaccaacttattgccaagtcaaaaggtcgggaaatgcctcatttcactaaggtagacaacagaatttatctttacagcggtagtaaggggcttgtttctatccgttgggatggtagtgatgaaaaggagcacttaagccttactggaattgaaacctacggatcttctgattattttcaagaagaccatgacgctgcttttggttgggacagcagcggggcagccagcgctagcgtggctgcagctttgccctctaatccagatgcttggagagaaaataataaggcctctagagcctcagaaattgaaatttcaccagatggcaaaacagccttggcaaaaattaataatgacatttatactgtgattgttccaaaatttggtcagacgcctaaaatatctttagccaaggcagacgctgcttcgtttcctgccaagaaattaactgtatttggnggagaatttccngtatggggcncagacagcaagcaggtgtattggtctcttggggctagtttctttacttacaatttagcagacgccaaagcctatgaagaaaaactcgctgcagataagaaagcaaaagaggccgctaaaaaattggctgatgcggcaaataaaggaagtgattctaatgacaaatcagataaaaatgaacaagaagacgctaccaaagatggtttagcggctacagatagtgaagacaaaaaagacagtcccaaagcctttgaagccaaggaattaaaggttaaagtggctttttctaaagacttggccaaaggcaatttactattacaaggagctagaattattacgatgaacggagaagaggtcatagaaaacggagacctattgatcaaggaccatagaattgccgctgtgggtgcctcaggcactttaactgttccagaaaacactacgctcatgaatatgagcggaaagaccattacaccaggatttatagacacccacgctcatatgtggcctaattggggtgttcaaaagaatcaagtatggatgtatgcggccaatttggcctatggagttactacaacaagagacccacagactggtaccacagacgtactgacctattcagatatggtcgatgctggaaagattgcaggccctagaatttattctactggccctggagtaggctattggtcttataaaattcaaagccttgatcacgctaaagaggtgcttaaacagtacagcgaatactacaataccaaaagtatcaaaatgtatttggtgggtaatagacagcaaaggcaatgggtaattatggccgccaaagagctcaaacttattccaacaacagaaggtggtttagatttcaaactcaatatgacccagcttttagatggttatccaggacatgaacattccttgcctatataccctattttcccagatgtggtaaaaaccattgcagaggctaaaatggcggtaacaccaactttgttagtttcttacggggggccatgggcagagaatttttactatgccacagaaaaagtatgggaagatgagaagttacagttttacaccccatatgaagaattggctcaaaaatccagacgtaggccaggatggtttatggaagaggagcatgtctttaaaaagcatgcagaattcatgaatgatttggaagcagcaggaggtattggaggtattggaagccatggccaattacaaggattgggctaccattgggaattatggtccgtaggaagtggtggaatatctgcccacggcgcattaaaatttgcgaccattttaggtgctaagtcactaggtttagacacagacttaggaagtattgaagtaggtaaaatagcagatttggttattctagatgccaatccgttagaagatttgagaaacaccaatacggtgtctaaagtgattaaggacggtaagatgtatgacaccaaagccctagatttagaatggccttctgagaagaaagcccctgaatattattggcaaacaccccttccagaaaaacttccagggatnaaatagataaaaaaaccataataaaagcccgcttatagcgggctttttaatgcgctataatttttatccctaatcttttccaattgttttgggagccaatggtgggctaacccaatctattttttcggaaggataataatttactttattcctgtcaaaaaacagggattgtaaagccaatcttcctttgtactcattccagtctcttttttcagggctgctccaagccaattcagcatatcctggtaatctaggaaatgccaggtattctatctcatcactattgctaatggtttcagaccagagtggggcctctatacctaggatcaattcactgggaaccccttttgcataagtttccggcgtccaaatataagcggtgtctaccggcacataacccgcccagtgcagtccataaggagaatcttccttgtactgcatgtctaaataggcct

SEQ ID NO: 558 - DNA, 4000 bp, Escherichia coli
  misc_feature (1989)..(1989): n is a, c, g, or t
  misc_feature (1991)..(1992): n is a, c, g, or t
  misc_feature (1998)..(1998): n is a, c, g, or t
  misc_feature (2003)..(2004): n is a, c, g, or t
  misc_feature (2015)..(2016): n is a, c, g, or t
  misc_feature (2018)..(2018): n is a, c, g, or t
  misc_feature (2024)..(2025): n is a, c, g, or t
  misc_feature (2045)..(2045): n is a, c, g, or t
  misc_feature (2054)..(2054): n is a, c, g, or t
  misc_feature (2057)..(2057): n is a, c, g, or t
  misc_feature (2076)..(2076): n is a, c, g, or t
  misc_feature (2941)..(2941): n is a, c, g, or t
  misc_feature (3058)..(3058): n is a, c, g, or t
  misc_feature (3934)..(3934): n is a, c, g, or t
  misc_feature (3936)..(3936): n is a, c, g, or t
  misc_feature (3940)..(3941): n is a, c, g, or t
  misc_feature (3944)..(3944): n is a, c, g, or t
  misc_feature (3947)..(3947): n is a, c, g, or t
  misc_feature (3949)..(3950): n is a, c, g, or t
  misc_feature (3954)..(3956): n is a, c, g, or t
  misc_feature (3960)..(3963): n is a, c, g, or t
  misc_feature (3967)..(3968): n is a, c, g, or t
  misc_feature (3970)..(3972): n is a, c, g, or t
  misc_feature (3977)..(3977): n is a, c, g, or t
  misc_feature (3979)..(3979): n is a, c, g, or t
  misc_feature (3981)..(3981): n is a, c, g, or t
  misc_feature (3983)..(3983): n is a, c, g, or t
  misc_feature (3986)..(3987): n is a, c, g, or t
  misc_feature (3991)..(3992): n is a, c, g, or t
  misc_feature (3996)..(3996): n is a, c, g, or t
  misc_feature (3999)..(3999): n is a, c, g, or t
tctgggtggctgtgtacgatgccggccaggccgcaggcacgggctgtcgccatgtcgtgtttgctgacggaaaatgattcgcgtggcgacgggtggatgttgtcgacctgccggcaggcaccgtctgcggtgagcagccaaaccgcctcgtgcgggtatgcggctatcgccccggcgcggacagtttcggcgtgctggtgtagcgcggcgcatggattgcgacacagcggcgcatgatctgcgactgcgccgccgcctaaaccgtccattattggcgtttgaaaaccgcgcgctccagcaccgcgcggcggatctgatagctgctggcgtgggaggcgtgggcgacccagctctggatcacgggctcgatgtcgaccaggtcgatatcgccggcggcgtagcggcgttcgagcgcacgtagttttttctgcatgcgtttgacgctgtttttgcgaatctttcgatgtgtgggccatattcgatatccgaggaagtcgagtccgcggccgtggcgtgggctgacgggaaatatctgggtcttgttattgagctgcaggcgcagattgtcgtgcagccagtcctcgagcacgcggcgctgtgcgtgcaggcgcgctttgtcgtggtcgacgatgagccagtcatccatatacctcatatagcggcgtgcgccgacgtgctgttttgcgaatacgtcgaaatcgtgcaaatagatattggcgcacagctgcgacgtgaggttgccgatgggaaggccgggatgccaggtttcgatgatgccgagcagcaggtatagcgttggacggcaagcgattcggcgttctagctgcgtgcgcagaacgtcgtgatcgatcgatgcgaaataacctgcgacgtcggccttgagcgcgtagacgcggccgtgtgtggcccgcacctcgcgcagccattgttgggctttgtctgcaccgcggtgcacgccccggccgggacggcaggcgtagctctgatcgatgaatcgcgactcccaaatgggctcgatcgcggcgattaggctgtgctgtacgacgcgatcgcgaaagggcagcgcggcgaccaaacgctttttcggctcgtgcacatggaaacgccgatacgggccagtttcgtactcgcgccagatcagttcgttctgtagttgtatgagctcgccctcgaggttttgctcgaagcgcagcacgtcggcctggtggcgtttgccgcggcgcgcgcggacgtaggcgtcatgcaggttgtcgaagctgtatatctccgggaacaggttgttgtatgtcttcatatcgagccaaagcggcgacgatcgagcctcggctgaggcctactacacgatcgatgcctgttaatgtttcggcatgggccgaggatcaagcgcccttttgatgtcgtgctgacagcgccaccgtgaccgcgctgtttctgacgatcttcaagagcaggccggcaaccgatgttgctgttgcgattgccgcgggcgttgttcaagttcaacgccgacaaccccgcatccgaggcgttgttccagttgccaccacggatcggcaggcgcaatgcgcttaaccctgttttgcgtgtttaatccagccgccgatcatgcgaccgatctcgtcgagatgacgcgaccagatttcgtattgtcggaacggcaggaacttcaggtcttttgcgagccgcacttcgcggcgcagcagctccagttcggtatccagctctgcgagtgtcgtctttttgtgataccgcttgccgcagacgatcacgagccgcagcagccgccacatagagccgcgcagctcggcgctgagcacgtgacgctccgatttcgggaaatgccgtacagctatatagccatactcgatcatcgcctcgacccgctgcgcgacttgaagctgttgcattagagacggcccgcgctatcgcgcagggccgcagaacacagatgaacaggcatcaggcaacaaaagcaggccggcaaccgangnngctgcngcganngccgcgggcgnngntcaagnncaacgccgacaaccccgcanccgaggcgntgntccagctgccaccacggancggcaggcgctcgccgctgcctgtgttgaaataatcaccagtcggcgcggggctcagcggcgcacagcccagggcgcgcaggcgctgcattgctgccgacgagatcgcggtattgccgacatcgacaatgcccgggaagtcgctcccgttgagcgcgtactcgccagagctggcgtatctgaccgtgccggcgctgcccggcgcaaccaatgcgccggtggcgccgtcgatggcttgccaggccgggcttgcggccgacatatcaattacatctgacgcagcatcgttatttgcgagcacgttgatttcgtagtcgaggatgcgcaggccgggcgcccattcccaaacgttgccgtgcagatcggccaggccgaacggggtgccgtcgtggcgccagctcggcgggccgctgccggttaaggtgcgtgcatcgcccgctgagctgccgatcgccaggccgtcggcgcgtacgccgtgctcgccggtggcgtaatcccgcccgtcggcgttgttgccgccgggcgcgtggccgtcgcgcaggcacacgcattgcactgcgccccattcggcgttggtcatgacgtgccagtcggggccgttggcgcgtgccagggctacggactggtcatgattgatgtcataaatcggctcgaccccgggcgccgagatcatctcatcgctgcgccgatggccggtgaactgcccgatcagaatttccggcttctcgacgccgtcaacgataaacgccggatgcgtgccgctgccaacatcgccagggatatcggccaggtcgaatttcgggatgacggtcatgtagcacggctgcccttttgccgtatagcgcaccgtgttgagaccgccgganccggactcgacggcacggcgcagggtgtcgggaatattaatcgtcagtggcatcggaggcttcctcggggtcgggtgttgctgcagcgtcgcgcgctagggcttgctgcatgtaagngctgtacagcgcggcgtatagcgcaccgtgggtgacggttgcgccggtcggctcgccggtttgtgggtcgatcaacgggatttctgcggctgggtcgaacggcgcggtgagcgagcccagcgcggtcgtgctagctgcgcccgcggcggtgacgatgcgctgctcgtcgaaccggatcagcggcgtcgcgttgagtgggttgtcgatgacgatctggtggcagcgctgccacgccgcgcccgtcacgtcggtttgcttgtattgcatcggatgctccggtgttaccagttttggattgctacacggcgccaggtgttagcggcgacgcatatatatttgtagctgctgtcccacgcatgctcgccgggctggccggccgcgctgctcgatgccggcgggctggactcgcgcaggcgcaggcgcccgccggcaatatcgagcgcagcaccgggggtgttggtgccgatgccgacgcggccctggccgtcgatatgtagctgctggatgagcgtgcgcaggtagcctgtcggcaccgagcgcgcggcctggccggcggtgtcgtgcgcggcggcgacggcggacaggatctgattgatggcgcggtcgtcgagtacctgccgggcggcctgaccggctagatccagggcgtaggtgactgtatcgataatctgcaggaatgcctcgaggcccgggtagcgagacagttcgagcgcggttccggcgttattgcggtagagcacgagatagccgccctggcccgcgaccgaaaatgcgtcgccgctggctgtattggacaggcctgcggccacgtcctgctgcaggttgacggcggcgatggcagccgtcgatgcgttttcggatcgagtggccgatccngnagcnncgnttncnntctnnnccgnnnngtanngnnncgccngnananccnncagnntagngtng

SEQ ID NO: 559 - DNA, 4000 bp, Escherichia coli
  misc_feature (1)..(5): n is a, c, g, or t
  misc_feature (7)..(13): n is a, c, g, or t
  misc_feature (16)..(17): n is a, c, g, or t
  misc_feature (19)..(19): n is a, c, g, or t
  misc_feature (22)..(27): n is a, c, g, or t
  misc_feature (30)..(39): n is a, c, g, or t
  misc_feature (41)..(43): n is a, c, g, or t
  misc_feature (45)..(60): n is a, c, g, or t
  misc_feature (62)..(62): n is a, c, g, or t
  misc_feature (64)..(70): n is a, c, g, or t
  misc_feature (72)..(72): n is a, c, g, or t
  misc_feature (74)..(79): n is a, c, g, or t
  misc_feature (81)..(81): n is a, c, g, or t
  misc_feature (83)..(100): n is a, c, g, or t
  misc_feature (102)..(105): n is a, c, g, or t
  misc_feature (107)..(114): n is a, c, g, or t
  misc_feature (116)..(117): n is a, c, g, or t
  misc_feature (119)..(124): n is a, c, g, or t
  misc_feature (126)..(128): n is a, c, g, or t
  misc_feature (130)..(133): n is a, c, g, or t
  misc_feature (135)..(142): n is a, c, g, or t
  misc_feature (144)..(158): n is a, c, g, or t
  misc_feature (160)..(162): n is a, c, g, or t
  misc_feature (164)..(165): n is a, c, g, or t
  misc_feature (168)..(170): n is a, c, g, or t
  misc_feature (172)..(174): n is a, c, g, or t
  misc_feature (176)..(179): n is a, c, g, or t
  misc_feature (181)..(183): n is a, c, g, or t
  misc_feature (185)..(187): n is a, c, g, or t
  misc_feature (189)..(190): n is a, c, g, or t
  misc_feature (192)..(197): n is a, c, g, or t
  misc_feature (199)..(202): n is a, c, g, or t
  misc_feature (204)..(215): n is a, c, g, or t
  misc_feature (218)..(224): n is a, c, g, or t
  misc_feature (226)..(243): n is a, c, g, or t
  misc_feature (245)..(247): n is a, c, g, or t
  misc_feature (250)..(251): n is a, c, g, or t
  misc_feature (254)..(257): n is a, c, g, or t
  misc_feature (259)..(260): n is a, c, g, or t
  misc_feature (262)..(275): n is a, c, g, or t
  misc_feature (278)..(285): n is a, c, g, or t
  misc_feature (287)..(287): n is a, c, g, or t
  misc_feature (289)..(291): n is a, c, g, or t
  misc_feature (293)..(296): n is a, c, g, or t
  misc_feature (299)..(299): n is a, c, g, or t
  misc_feature (301)..(304): n is a, c, g, or t
  misc_feature (306)..(312): n is a, c, g, or t
  misc_feature (314)..(315): n is a, c, g, or t
  misc_feature (318)..(322): n is a, c, g, or t
  misc_feature (325)..(330): n is a, c, g, or t
  misc_feature (332)..(334): n is a, c, g, or t
  misc_feature (338)..(353): n is a, c, g, or t
  misc_feature (355)..(356): n is a, c, g, or t
  misc_feature (358)..(361): n is a, c, g, or t
  misc_feature (364)..(387): n is a, c, g, or t
  misc_feature (389)..(415): n is a, c, g, or t
  misc_feature (417)..(417): n is a, c, g, or t
  misc_feature (419)..(419): n is a, c, g, or t
  misc_feature (421)..(425): n is a, c, g, or t
  misc_feature (427)..(427): n is a, c, g, or t
  misc_feature (430)..(437): n is a, c, g, or t
  misc_feature (439)..(439): n is a, c, g, or t
  misc_feature (441)..(443): n is a, c, g, or t
  misc_feature (446)..(455): n is a, c, g, or t
  misc_feature (457)..(468): n is a, c, g, or t
  misc_feature (470)..(470): n is a, c, g, or t
  misc_feature (473)..(482): n is a, c, g, or t
  misc_feature (485)..(491): n is a, c, g, or t
  misc_feature (494)..(496): n is a, c, g, or t
  misc_feature (498)..(501): n is a, c, g, or t
  misc_feature (503)..(512): n is a, c, g, or t
  misc_feature (514)..(515): n is a, c, g, or t
  misc_feature (517)..(524): n is a, c, g, or t
  misc_feature (526)..(527): n is a, c, g, or t
  misc_feature (529)..(529): n is a, c, g, or t
  misc_feature (532)..(533): n is a, c, g, or t
  misc_feature (535)..(540): n is a, c, g, or t
  misc_feature (542)..(545): n is a, c, g, or t
  misc_feature (547)..(551): n is a, c, g, or t
  misc_feature (553)..(556): n is a, c, g, or t
  misc_feature (558)..(558): n is a, c, g, or t
  misc_feature (560)..(565): n is a, c, g, or t
  misc_feature (568)..(570): n is a, c, g, or t
  misc_feature (572)..(574): n is a, c, g, or t
  misc_feature (577)..(580): n is a, c, g, or t
  misc_feature (582)..(582): n is a, c, g, or t
  misc_feature (584)..(595): n is a, c, g, or t
  misc_feature (597)..(602): n is a, c, g, or t
  misc_feature (604)..(611): n is a, c, g, or t
  misc_feature (613)..(634): n is a, c, g, or t
  misc_feature (636)..(639): n is a, c, g, or t
  misc_feature (641)..(642): n is a, c, g, or t
  misc_feature (644)..(644): n is a, c, g, or t
  misc_feature (646)..(648): n is a, c, g, or t
  misc_feature (650)..(652): n is a, c, g, or t
  misc_feature (654)..(665): n is a, c, g, or t
  misc_feature (667)..(674): n is a, c, g, or t
  misc_feature (676)..(677): n is a, c, g, or t
  misc_feature (679)..(681): n is a, c, g, or t
  misc_feature (683)..(695): n is a, c, g, or t
  misc_feature (697)..(704): n is a, c, g, or t
  misc_feature (706)..(710): n is a, c, g, or t
  misc_feature (712)..(712): n is a, c, g, or t
  misc_feature (714)..(715): n is a, c, g, or t
  misc_feature (717)..(720): n is a, c, g, or t
  misc_feature (722)..(723): n is a, c, g, or t
  misc_feature (725)..(726): n is a, c, g, or t
  misc_feature (729)..(740): n is a, c, g, or t
  misc_feature (742)..(743): n is a, c, g, or t
  misc_feature (745)..(748): n is a, c, g, or t
  misc_feature (750)..(760): n is a, c, g, or t
  misc_feature (762)..(763): n is a, c, g, or t
  misc_feature (765)..(767): n is a, c, g, or t
  misc_feature (769)..(770): n is a, c, g, or t
  misc_feature (772)..(783): n is a, c, g, or t
  misc_feature (785)..(786): n is a, c, g, or t
  misc_feature (788)..(788): n is a, c, g, or t
  misc_feature (790)..(799): n is a, c, g, or t
  misc_feature (802)..(814): n is a, c, g, or t
  misc_feature (816)..(825): n is a, c, g, or t
  misc_feature (827)..(827): n is a, c, g, or t
  misc_feature (829)..(839): n is a, c, g, or t
  misc_feature (841)..(847): n is a, c, g, or t
  misc_feature (849)..(849): n is a, c, g, or t
  misc_feature (851)..(858): n is a, c, g, or t
  misc_feature (860)..(866): n is a, c, g, or t
  misc_feature (868)..(868): n is a, c, g, or t
  misc_feature (870)..(881): n is a, c, g, or t
  misc_feature (884)..(885): n is a, c, g, or t
  misc_feature (887)..(895): n is a, c, g, or t
  misc_feature (897)..(902): n is a, c, g, or t
  misc_feature (904)..(904): n is a, c, g, or t
  misc_feature (907)..(915): n is a, c, g, or t
  misc_feature (917)..(920): n is a, c, g, or t
  misc_feature (924)..(929): n is a, c, g, or t
  misc_feature (931)..(941): n is a, c, g, or t
  misc_feature (943)..(951): n is a, c, g, or t
  misc_feature (955)..(956): n is a, c, g, or t
  misc_feature (958)..(959): n is a, c, g, or t
  misc_feature (962)..(970): n is a, c, g, or t
  misc_feature (974)..(976): n is a, c, g, or t
  misc_feature (979)..(979): n is a, c, g, or t
  misc_feature (981)..(984): n is a, c, g, or t
  misc_feature (987)..(989): n is a, c, g, or t
  misc_feature (991)..(991): n is a, c, g, or t
  misc_feature (993)..(997): n is a, c, g, or t
  misc_feature (1001)..(1003): n is a, c, g, or t
  misc_feature (1006)..(1006): n is a, c, g, or t
  misc_feature (1009)..(1009): n is a, c, g, or t
  misc_feature (1014)..(1014): n is a, c, g, or t
  misc_feature (1018)..(1019): n is a, c, g, or t
  misc_feature (1021)..(1027): n is a, c, g, or t
  misc_feature (1029)..(1030): n is a, c, g, or t
  misc_feature (1032)..(1032): n is a, c, g, or t
  misc_feature (1037)..(1039): n is a, c, g, or t
  misc_feature (1043)..(1043): n is a, c, g, or t
  misc_feature (1045)..(1047): n is a, c, g, or t
  misc_feature (1049)..(1055): n is a, c, g, or t
  misc_feature (1057)..(1061): n is a, c, g, or t
  misc_feature (1063)..(1064): n is a, c, g, or t
  misc_feature (1066)..(1066): n is a, c, g, or t
  misc_feature (1068)..(1068): n is a, c, g, or t
  misc_feature (1070)..(1070): n is a, c, g, or t
  misc_feature (1072)..(1073): n is a, c, g, or t
  misc_feature (1075)..(1075): n is a, c, g, or t
  misc_feature (1077)..(1079): n is a, c, g, or t
  misc_feature (1081)..(1081): n is a, c, g, or t
  misc_feature (1083)..(1085): n is a, c, g, or t
  misc_feature (1087)..(1087): n is a, c, g, or t
  misc_feature (1089)..(1089): n is a, c, g, or t
  misc_feature (1094)..(1094): n is a, c, g, or t
  misc_feature (1096)..(1096): n is a, c, g, or t
  misc_feature (1099)..(1100): n is a, c, g, or t
  misc_feature (1102)..(1106): n is a, c, g, or t
  misc_feature (1109)..(1112): n is a, c, g, or t
  misc_feature (1114)..(1114): n is a, c, g, or t
  misc_feature (1117)..(1118): n is a, c, g, or t
  misc_feature (1120)..(1121): n is a, c, g, or t
  misc_feature (1123)..(1123): n is a, c, g, or t
  misc_feature (1125)..(1130): n is a, c, g, or t
  misc_feature (1132)..(1136): n is a, c, g, or t
  misc_feature (1138)..(1142): n is a, c, g, or t
  misc_feature (1144)..(1145): n is a, c, g, or t
  misc_feature (1148)..(1148): n is a, c, g, or t
  misc_feature (1150)..(1150): n is a, c, g, or t
  misc_feature (1154)..(1157): n is a, c, g, or t
  misc_feature (1161)..(1165): n is a, c, g, or t
  misc_feature (1168)..(1168): n is a, c, g, or t
  misc_feature (1174)..(1174): n is a, c, g, or t
  misc_feature (1176)..(1177): n is a, c, g, or t
  misc_feature (1179)..(1180): n is a, c, g, or t
  misc_feature (1183)..(1183): n is a, c, g, or t
  misc_feature (1186)..(1186): n is a, c, g, or t
  misc_feature (1189)..(1189): n is a, c, g, or t
  misc_feature (1192)..(1193): n is a, c, g, or t
  misc_feature (1195)..(1196): n is a, c, g, or t
  misc_feature (1201)..(1201): n is a, c, g, or t
  misc_feature (1205)..(1205): n is a, c, g, or t
  misc_feature (1210)..(1210): n is a, c, g, or t
  misc_feature (1213)..(1217): n is a, c, g, or t
  misc_feature (1219)..(1219): n is a, c, g, or t
  misc_feature (1221)..(1225): n is a, c, g, or t
  misc_feature (1228)..(1228): n is a, c, g, or t
  misc_feature (1231)..(1231): n is a, c, g, or t
  misc_feature (1234)..(1234): n is a, c, g, or t
  misc_feature (1237)..(1241): n is a, c, g, or t
  misc_feature (1243)..(1246): n is a, c, g, or t
  misc_feature (1250)..(1251): n is a, c, g, or t
  misc_feature (1255)..(1255): n is a, c, g, or t
  misc_feature (1258)..(1258): n is a, c, g, or t
  misc_feature (1262)..(1263): n is a, c, g, or t
  misc_feature (1267)..(1267): n is a, c, g, or t
  misc_feature (1269)..(1271): n is a, c, g, or t
  misc_feature (1274)..(1274): n is a, c, g, or t
  misc_feature (1276)..(1277): n is a, c, g, or t
  misc_feature (1279)..(1279): n is a, c, g, or t
  misc_feature (1282)..(1286): n is a, c, g, or t
  misc_feature (1288)..(1288): n is a, c, g, or t
  misc_feature (1291)..(1291): n is a, c, g, or t
  misc_feature (1294)..(1296): n is a, c, g, or t
  misc_feature (1299)..(1303): n is a, c, g, or t
  misc_feature (1305)..(1307): n is a, c, g, or t
  misc_feature (1309)..(1310): n is a, c, g, or t
  misc_feature (1313)..(1313): n is a, c, g, or t
  misc_feature (1315)..(1315): n is a, c, g, or t
  misc_feature (1318)..(1322): n is a, c, g, or t
  misc_feature (1324)..(1325): n is a, c, g, or t
  misc_feature (1328)..(1331): n is a, c, g, or t
  misc_feature (1334)..(1334): n is a, c, g, or t
  misc_feature (1337)..(1343): n is a, c, g, or t
  misc_feature (1345)..(1346): n is a, c, g, or t
  misc_feature (1349)..(1349): n is a, c, g, or t
  misc_feature (1351)..(1352): n is a, c, g, or t
  misc_feature (1354)..(1355): n is a, c, g, or t
  misc_feature (1357)..(1367): n is a, c, g, or t
  misc_feature (1369)..(1369): n is a, c, g, or t
  misc_feature (1373)..(1376): n is a, c, g, or t
  misc_feature (1383)..(1384): n is a, c, g, or t
  misc_feature (1387)..(1387): n is a, c, g, or t
  misc_feature (1390)..(1394): n is a, c, g, or t
  misc_feature (1397)..(1397): n is a, c, g, or t
  misc_feature (1402)..(1402): n is a, c, g, or t
  misc_feature (1412)..(1412): n is a, c, g, or t
  misc_feature (1421)..(1424): n is a, c, g, or t
  misc_feature (1436)..(1442): n is a, c, g, or t
  misc_feature (1445)..(1448): n is a, c, g, or t
  misc_feature (1450)..(1453): n is a, c, g, or t
  misc_feature (1457)..(1464): n is a, c, g, or t
  misc_feature (1467)..(1467): n is a, c, g, or t
  misc_feature (1472)..(1473): n is a, c, g, or t
  misc_feature (1475)..(1481): n is a, c, g, or t
  misc_feature (1483)..(1483): n is a, c, g, or t
  misc_feature (1486)..(1487): n is a, c, g, or t
  misc_feature (1489)..(1491): n is a, c, g, or t
  misc_feature (1494)..(1495): n is a, c, g, or t
  misc_feature (1497)..(1500): n is a, c, g, or t
  misc_feature (1502)..(1510): n is a, c, g, or t
  misc_feature (1513)..(1513): n is a, c, g, or t
  misc_feature (1524)..(1524): n is a, c, g, or t
  misc_feature (1526)..(1526): n is a, c, g, or t
  misc_feature (1529)..(1529): n is a, c, g, or t
  misc_feature (1532)..(1533): n is a, c, g, or t
  misc_feature (1537)..(1538): n is a, c, g, or t
  misc_feature (1540)..(1540): n is a, c, g, or t
  misc_feature (1546)..(1547): n is a, c, g, or t
  misc_feature (1551)..(1552): n is a, c, g, or t
  misc_feature (1554)..(1557): n is a, c, g, or t
  misc_feature (1559)..(1559): n is a, c, g, or t
  misc_feature (1564)..(1564): n is a, c, g, or t
  misc_feature (1569)..(1569): n is a, c, g, or t
  misc_feature (1571)..(1571): n is a, c, g, or t
  misc_feature (1581)..(1581): n is a, c, g, or t
  misc_feature (1586)..(1587): n is a, c, g, or t
  misc_feature (1597)..(1598): n is a, c, g, or t
  misc_feature (1600)..(1600): n is a, c, g, or t
  misc_feature (1602)..(1603): n is a, c, g, or t
  misc_feature (1609)..(1612): n is a, c, g, or t
  misc_feature (1615)..(1615): n is a, c, g, or t
  misc_feature (1619)..(1621): n is a, c, g, or t
  misc_feature (1632)..(1635): n is a, c, g, or t
  misc_feature (1640)..(1640): n is a, c, g, or t
  misc_feature (1645)..(1646): n is a, c, g, or t
  misc_feature (1653)..(1653): n is a, c, g, or t
  misc_feature (1655)..(1655): n is a, c, g, or t
  misc_feature (1657)..(1657): n is a, c, g, or t
  misc_feature (1659)..(1659): n is a, c, g, or t
  misc_feature (1661)..(1661): n is a, c, g, or t
  misc_feature (1663)..(1663): n is a, c, g, or t
  misc_feature (1667)..(1670): n is a, c, g, or t
  misc_feature (1679)..(1681): n is a, c, g, or t
  misc_feature (1683)..(1683): n is a, c, g, or t
  misc_feature (1689)..(1689): n is a, c, g, or t
  misc_feature (1691)..(1691): n is a, c, g, or t
  misc_feature (1695)..(1696): n is a, c, g, or t
  misc_feature (1703)..(1706): n is a, c, g, or t
  misc_feature (1708)..(1709): n is a, c, g, or t
  misc_feature (1711)..(1711): n is a, c, g, or t
  misc_feature (1713)..(1716): n is a, c, g, or t
  misc_feature (1718)..(1720): n is a, c, g, or t
  misc_feature (1844)..(1845): n is a, c, g, or t
  misc_feature (1987)..(1987): n is a, c, g, or t
  misc_feature (1992)..(1992): n is a, c, g, or t
nnnnncnnnnnnnagnncnaannnnnnaannnnnnnnnnannncnnnnnnnnnnnnnnnntncnnnnnnntngnnnnnncngnnnnnnnnnnnnnnnnnntnnnntnnnnnnnngnngnnnnnngnnngnnnnannnnnnnnannnnnnnnnnnnnnngnnngnnttnnngnnnannnngnnnannncnnannnnnnannnngnnnnnnnnnnnngannnnnnngnnnnnnnnnnnnnnnnnntnnnggnngannnngnngnnnnnnnnnnnnnnggnnnnnnnngngnnngnnnncgngnnnntnnnnnnnanngannnnnaannnnnnannnccgnnnnnnnnnnnnnnnntnnannnnaannnnnnnnnnnnnnnnnnnnnnnntnnnnnnnnnnnnnnnnnnnnnnnnnnntntncnnnnncncgnnnnnnnngncnnngtnnnnnnnnnncnnnnnnnnnnnntnaannnnnnnnnnatnnnnnnnctnnnannnnannnnnnnnnntnngnnnnnnnngnncnggnntnnnnnntnnnncnnnnncnnnnancnnnnnncgnnntnnncgnnnncngnnnnnnnnnnnncnnnnnngnnnnnnnngnnnnnnnnnnnnnnnnnnnnnncnnnnanngncnnntnnngnnnnnnnnnnnncnnnnnnnngnncnnngnnnnnnnnnnnnncnnnnnnnngnnnnngncnncnnnngnntnngcnnnnnnnnnnnngnngnnnncnnnnnnnnnnngnncnnngnncnnnnnnnnnnnngnnancnnnnnnnnnncgnnnnnnnnnnnnncnnnnnnnnnntncnnnnnnnnnnntnnnnnnncntnnnnnnnntnnnnnnncncnnnnnnnnnnnnggnntnnnnnnnnncnnnnnncnccnnnnnnnnntnnnncttnnnnnncnnnnnnnnnnncnnnnnnnnnccgnngnngcnnnnnnnnncgannncgncnnnnccnnncncnnnnncccnnnccncgnccacngccnncnnnnnnncnncncccgnnncccnannncnnnnnnncnnnnngnncncncncnncncnnncncnnncncnaacgncnccnncnnnnnctnnnncntcnncnncncnnnnnncnnnnncnnnnncnncancncctnnnncgcnnnnnccngcgccncnngnnccnggnccnccnncnncccgncccncgccnccnnnnncncnnnnnccnccncgnccnnnnncnnnncccnncgcnccncgcnntccncnnnccncnncncgnnnnncngcncgnnnccnnnnncnnncnncgncntcnnnnncnncgnnnncgncannnnnnncnncgncnncnncnnnnnnnnnnncnccgnnnncgcctcnnccnccnnnnncgncgccnccgccgccgncgtcgtcgnnnncgtcgtcgtcgnnnnnnngcnnnngnnnntcgnnnnnnnncgncgtcnngnnnnnnncntcnncnnncgnncnnnncnnnnnnnnnccntcgcgcgcgtngncgncgnngccnncntcgcgnncgcnncnnnngncgcgncgtcncncgcgcgtcgngtcgnngcgcgcgcgnncncnngcgcgnnnncgncggnnngtggacgtcgnnnnacggnggtcnncacgcgngncncnanangggnnnngacgcgcgnnncnccgcgngngggnnaaaaagnnnncnngngnnnngnnncgcgcgcgtcggcgaccgcggcagagcgcgacgacgacgcgcgcgacggtcgcgcgcgtcgcgaaccgcgcgcgagggcacgcggaggcgctgagcgccgaacgcgagcgaacgggcgcgcganncggcgacgtcgggacgcgacgcgcggaagcgcgggacggcgatcgagcgggacgccatggcggacgcgccgacgccgacgaacgcggatcacgcgcgagagaagtcgcggtattacgcgcaccggatcgatttgttcgatangtacnacgcgcgggagctgacgcggatcgaagaggcgaaggcgcggggggaagggattaaagtgaccctgccggacggcgcgcaaaaggatgggacgcgattcgcgacgacgccgttcgacatcgcgttggggatacacaagaagctggcgcagagcgcgctcgtggcgaaggtcgatggggagttttgggacatgcgacgaccgttggagggggactgcgcgctggcgttgtttactttcgacgacgaagaggggaaggagtgttattggcactcgagcgcgcacgtcttgggggaggcgttggagttggagtacggggcggatttgaccatcggaccggcgatcgaggagggtttctactacgattgctacttgggcgagcgcacgctgacgccggaagacacggaaatcatcaaggggcgcatggaaaagatcatcaaagaaaaacaagaatttcaacgcatcgtcgtcagccgcgccgaggcgttggagatgttcgaagagaacaagttcaaaattgagttgatttccaacttgcccgaagacgcgacgatttcgtgctatcgctgcgggccgatggtggatctgtgccgcggtccgcacttgccggacaccgcgtggttgaagagcgtcagcgtgaaccagtgctcgcgagcccactggcgcgcggacgtcaccaaggacccgctcgtgcgcgtgtacgccgtgactttcccgagcgacaaactcatgaaggaatacaccacgcgcatcgaagaagcgaagaaacgcgatcaccgcaccattggcttgaaccaagagctgttctttttccaccatctctccccgggctcgtgttttttccaaaagcacggcgcgcgcatctacaacaacttggtccaatttattcgagaaaagtattgggaatacgagtatgacgaagtcatcacgccgaatatttacaactttgacctctggaagacgtccggtcacgcggcgcactacaaggaaaacatgttcagcttcaacgtcgaaaaggaagagtttggtctgaagccgatgaactgcccgggtcactgcgtcatgttcgcgcatcgacacagaacgtaccgtgaactccccatgcgtgtggctgatttcggtgtgctgcaccgaaacgagttctcgggtgcgcttcacggtttaacgcgcgttcgccgcttccagcaagacgacgcgcacatcttctgccgtgaggatcaaatggaacaggagttgagcggtttcttgcagttcttagatgatgtgtacgaagtgtttggtctcacgtacgagatgaagctatcgacgcgtccagagggatacttgggtgagttggaggtgtgggacaaggcggaggcggcgctcaagtctgcgttggaccgaagcggcagagagtggaagctgaacgaaggtgacggcgccttctacggtccgaagattgacatcactgtcttcgatgcgctcaagcgtcgcttccagtgtgcgacggtccagctcgactttcagcttccgattcgatttgacctgtcgtacgtcgacgaaaacaactcgtcggtgaggccgatcatcattcacagagctatcctcggttctgtcgagcgtatgttcgcgattttgaccgagcactttgcgggtaagtggccgtattggttgtcgccaaaacaagtcatgattgtgccgatctctgaagcctcgagagactactgctacgaggtcaagcgccaactccgcaaggccggtcatttcgcggaagtcgacgtcacggatcgtaagatgcaaaagaaggttcgcgaggcgcagctcgatcagttcaactatatcttggtgtgcggcgaaagcgaaaaagcgaacgaaacggtgaacgtgcgcacgcgtgataacaaggtccacggtgagcacaagctgaccgcgctgctcgaagtgctcgcgcgcgaacgcgccacgcgaagcttgacgtgctgtttcgaagacgagggttccccggaagatgcggcacctgccacgaccgcgta

SEQ ID NO: 560 - DNA, 4000 bp, Escherichia coli
  misc_feature (1)..(13): n is a, c, g, or t
  misc_feature (15)..(20): n is a, c, g, or t
  misc_feature (23)..(24): n is a, c, g, or t
  misc_feature (27)..(29): n is a, c, g, or t
  misc_feature (31)..(32): n is a, c, g, or t
  misc_feature (34)..(34): n is a, c, g, or t
  misc_feature (36)..(36): n is a, c, g, or t
  misc_feature (39)..(46): n is a, c, g, or t
  misc_feature (48)..(49): n is a, c, g, or t
  misc_feature (51)..(53): n is a, c, g, or t
  misc_feature (55)..(55): n is a, c, g, or t
  misc_feature (58)..(58): n is a, c, g, or t
  misc_feature (60)..(63): n is a, c, g, or t
  misc_feature (66)..(67): n is a, c, g, or t
  misc_feature (69)..(71): n is a, c, g, or t
  misc_feature (74)..(74): n is a, c, g, or t
  misc_feature (76)..(82): n is a, c, g, or t
  misc_feature (86)..(92): n is a, c, g, or t
  misc_feature (94)..(101): n is a, c, g, or t
  misc_feature (105)..(113): n is a, c, g, or t
  misc_feature (115)..(118): n is a, c, g, or t
  misc_feature (120)..(123): n is a, c, g, or t
  misc_feature (125)..(126): n is a, c, g, or t
  misc_feature (129)..(137): n is a, c, g, or t
  misc_feature (139)..(139): n is a, c, g, or t
  misc_feature (141)..(142): n is a, c, g, or t
  misc_feature (144)..(144): n is a, c, g, or t
  misc_feature (146)..(146): n is a, c, g, or t
  misc_feature (149)..(149): n is a, c, g, or t
  misc_feature (152)..(158): n is a, c, g, or t
  misc_feature (160)..(163): n is a, c, g, or t
  misc_feature (165)..(167): n is a, c, g, or t
  misc_feature (170)..(170): n is a, c, g, or t
  misc_feature (172)..(177): n is a, c, g, or t
  misc_feature (179)..(186): n is a, c, g, or t
  misc_feature (189)..(189): n is a, c, g, or t
  misc_feature (192)..(192): n is a, c, g, or t
  misc_feature (194)..(197): n is a, c, g, or t
  misc_feature (199)..(203): n is a, c, g, or t
  misc_feature (205)..(206): n is a, c, g, or t
  misc_feature (208)..(212): n is a, c, g, or t
  misc_feature (214)..(217): n is a, c, g, or t
  misc_feature (219)..(220): n is a, c, g, or t
  misc_feature (222)..(223): n is a, c, g, or t
  misc_feature (227)..(227): n is a, c, g, or t
  misc_feature (229)..(230): n is a, c, g, or t
  misc_feature (232)..(240): n is a, c, g, or t
  misc_feature (243)..(244): n is a, c, g, or t
  misc_feature (246)..(249): n is a, c, g, or t
  misc_feature (251)..(251): n is a, c, g, or t
  misc_feature (253)..(253): n is a, c, g, or t
  misc_feature (255)..(256): n is a, c, g, or t
  misc_feature (258)..(261): n is a, c, g, or t
  misc_feature (263)..(263): n is a, c, g, or t
  misc_feature (265)..(266): n is a, c, g, or t
  misc_feature (268)..(270): n is a, c, g, or t
  misc_feature (272)..(272): n is a, c, g, or t
  misc_feature (274)..(291): n is a, c, g, or t
  misc_feature (294)..(294): n is a, c, g, or t
  misc_feature (296)..(298): n is a, c, g, or t
  misc_feature (300)..(302): n is a, c, g, or t
  misc_feature (305)..(313): n is a, c, g, or t
  misc_feature (315)..(316): n is a, c, g, or t
  misc_feature (318)..(318): n is a, c, g, or t
  misc_feature (320)..(320): n is a, c, g, or t
  misc_feature (322)..(322): n is a, c, g, or t
  misc_feature (324)..(328): n is a, c, g, or t
  misc_feature (330)..(338): n is a, c, g, or t
  misc_feature (340)..(344): n is a, c, g, or t
  misc_feature (346)..(349): n is a, c, g, or t
  misc_feature (351)..(351): n is a, c, g, or t
  misc_feature (353)..(354): n is a, c, g, or t
  misc_feature (356)..(357): n is a, c, g, or t
  misc_feature (360)..(360): n is a, c, g, or t
  misc_feature (363)..(365): n is a, c, g, or t
  misc_feature (367)..(368): n is a, c, g, or t
  misc_feature (370)..(371): n is a, c, g, or t
  misc_feature (373)..(374): n is a, c, g, or t
  misc_feature (377)..(377): n is a, c, g, or t
  misc_feature (379)..(380): n is a, c, g, or t
  misc_feature (382)..(388): n is a, c, g, or t
  misc_feature (390)..(392): n is a, c, g, or t
  misc_feature (394)..(399): n is a, c, g, or t
  misc_feature (401)..(401): n is a, c, g, or t
  misc_feature (403)..(405): n is a, c, g, or t
  misc_feature (407)..(409): n is a, c, g, or t
  misc_feature (412)..(412): n is a, c, g, or t
  misc_feature (415)..(425): n is a, c, g, or t
  misc_feature (427)..(428): n is a, c, g, or t
  misc_feature (430)..(432): n is a, c, g, or t
  misc_feature (434)..(435): n is a, c, g, or t
  misc_feature (437)..(438): n is a, c, g, or t
  misc_feature (440)..(444): n is a, c, g, or t
  misc_feature (446)..(449): n is a, c, g, or t
  misc_feature (451)..(455): n is a, c, g, or t
  misc_feature (458)..(459): n is a, c, g, or t
  misc_feature (462)..(464): n is a, c, g, or t
  misc_feature (466)..(467): n is a, c, g, or t
  misc_feature (469)..(471): n is a, c, g, or t
  misc_feature (473)..(476): n is a, c, g, or t
  misc_feature (478)..(478): n is a, c, g, or t
  misc_feature (481)..(484): n is a, c, g, or t
  misc_feature (486)..(486): n is a, c, g, or t
  misc_feature (489)..(490): n is a, c, g, or t
  misc_feature (492)..(492): n is a, c, g, or t
  misc_feature (496)..(496): n is a, c, g, or t
  misc_feature (498)..(498): n is a, c, g, or t
  misc_feature (500)..(500): n is a, c, g, or t
  misc_feature (505)..(505): n is a, c, g, or t
  misc_feature (507)..(508): n is a, c, g, or t
  misc_feature (518)..(520): n is a, c, g, or t
  misc_feature (524)..(524): n is a, c, g, or t
  misc_feature (526)..(527): n is a, c, g, or t
  misc_feature (529)..(531): n is a, c, g, or t
  misc_feature (533)..(534): n is a, c, g, or t
  misc_feature (536)..(538): n is a, c, g, or t
  misc_feature (540)..(540): n is a, c, g, or t
  misc_feature (542)..(545): n is a, c, g, or t
  misc_feature (547)..(547): n is a, c, g, or t
  misc_feature (550)..(550): n is a, c, g, or t
  misc_feature (552)..(552): n is a, c, g, or t
  misc_feature (554)..(559): n is a, c, g, or t
  misc_feature (561)..(562): n is a, c, g, or t
  misc_feature (564)..(564): n is a, c, g, or t
  misc_feature (566)..(568): n is a, c, g, or t
  misc_feature (570)..(570): n is a, c, g, or t
  misc_feature (573)..(576): n is a, c, g, or t
  misc_feature (578)..(578): n is a, c, g, or t
  misc_feature (583)..(583): n is a, c, g, or t
  misc_feature (587)..(587): n is a, c, g, or t
  misc_feature (590)..(590): n is a, c, g, or t
  misc_feature (592)..(592): n is a, c, g, or t
  misc_feature (595)..(596): n is a, c, g, or t
  misc_feature (598)..(598): n is a, c, g, or t
  misc_feature (601)..(602): n is a, c, g, or t
  misc_feature (610)..(611): n is a, c, g, or t
  misc_feature (616)..(616): n is a, c, g, or t
  misc_feature (620)..(622): n is a, c, g, or t
  misc_feature (628)..(628): n is a, c, g, or t
  misc_feature (637)..(637): n is a, c, g, or t
  misc_feature (639)..(639): n is a, c, g, or t
  misc_feature (644)..(646): n is a, c, g, or t
  misc_feature (649)..(650): n is a, c, g, or t
  misc_feature (652)..(653): n is a, c, g, or t
  misc_feature (658)..(658): n is a, c, g, or t
  misc_feature (668)..(668): n is a, c, g, or t
  misc_feature (671)..(671): n is a, c, g, or t
  misc_feature (673)..(674): n is a, c, g, or t
  misc_feature (680)..(682): n is a, c, g, or t
  misc_feature (688)..(688): n is a, c, g, or t
  misc_feature (693)..(693): n is a, c, g, or t
  misc_feature (1969)..(1969): n is a, c, g, or t
  misc_feature (1979)..(1980): n is a, c, g, or t
  misc_feature (1986)..(1986): n is a, c, g, or t
  misc_feature (1988)..(1989): n is a, c, g, or t
  misc_feature (1992)..(1992): n is a, c, g, or t
  misc_feature (1997)..(1997): n is a, c, g, or t
  misc_feature (2012)..(2013): n is a, c, g, or t
  misc_feature (2018)..(2019): n is a, c, g, or t
  misc_feature (2025)..(2025): n is a, c, g, or t
  misc_feature (2027)..(2028): n is a, c, g, or t
  misc_feature (2039)..(2040): n is a, c, g, or t
  misc_feature (2045)..(2046): n is a, c, g, or t
  misc_feature (2051)..(2051): n is a, c, g, or t
nnnnnnnnnnnnncnnnnnncannaannngnntntnaannnnnnnntnngnnnancantnnnnacnngnnnttnannnnnnnattnnnnnnngnnnnnnnngacnnnnnnnnncnnnntnnnntnngcnnnnnnnnncngnncnanaancannnnnnngnnnnannnggngnnnnnncnnnnnnnnatntgntnnnnannnnngnngnnnnnannnntnntnncggntnngnnnnnnnnntanntnnnntntncnngnnnngngnngnnntnannnnnnnnnnnnnnnnnncanannntnnncannnnnnnnnannantngntnnnnnannnnnnnnncnnnnntnnnnangnnannaanaannngnngnntnnccngnncnnnnnnntnnnannnnnncngnnntnnnaantgnnnnnnnnnnntnnannngnnannannnnntnnnntnnnnnggnnacnnngnngnnntnnnnancgnnnngntannangatngncntgaantnngaaccggatnnnaacngnnannncnnannnanannnntncancntnnnnnngnnantnnncnagnnnngncaacngatnttncnaanntncannctcaaaannctganacgnnncttgangaaggtggngncaacnnngtnncnnctgcngagcttgctncantnngggatnnnactgtncctgncaaagccgacaaagtgacatttgcaacggcggggaacatagcagggctcgacagcgacgggaaccttgttgactcgggggtcagcgccagcaatatccagagcagctattataacatcggcaatccaggcaagcaggggtttggtgtcggtattgtcccggcaagtattttaccagcaggaatgtcaatccttcctgggacagagaccgtggggcatgataattacgggaattatcagttccaggacggcagcatcgtttgttgtgtgccgatacattggatgaaaattggaaccggcagcaacgggcttgatgtgaatgatatttccgttgtcccgtattctgaatatgcatcggaatcagaggcgaatgccgccgggtattttctgccgagatgctttatcgacggcggacaagtcaaggcctgttattttgtggataaataccattgcagcaaaaatgcctggggaaccgggtatattgcatcctcaattaaagatgggctgccgatttccacagattctgcgcacaatccgattgcagatttgacggcttgtgccagcaattactattccgaggccatcaacgctgcaaaagcccgggacggcgagaacgggaacgctgctgctgatcctcagtggttttgttgttcacggtttatcattgtcaatcttgccatgctctcgatggcccatgggcaggctgccacagcaactacatattgcgcctggtatgacgccgagggcgcaacgaattatcccaaaggttgtaacaatgatgcgctgggggatattgatgacggaactatctcgtacatatcggacgggtatgacaactgcggtaaaaccggctctggcgcaccatttgccaagacaacccataatggtcaaaactgcggtgtcgcagacctgaacggcaacatgtacagaattaatatcggtattacatcggatggaaccagctattatgttgccgatgaagcaacggcaatgaaagattttacagccgggaattcaggtgcaacggatcattggggagcaaccgggattgcggccatgatgacagaaatactgattccgtatatggaggatggtgcatggacatatatgggttctggaacaaaccaggtgctgtcagaagtggtggccggcaatgggtctctcttgcgctctgttggaatgccaaaagattccggagggtacgatggtgtgggcacaaaccagtttgggaaagacggggtgtatcaatacctgttacggaatgagctctgcgtgctntccggcgggnnttggancnncgnttcgngggctggggtttggnnttcgnnttggancnnctctcgggcgnnttcgnncacgnctgtggggttgtcgctcgcctgttaccctgtctgagggcgcgatagcgcccgataaaggagtgaatgatgtcagaacctgcgcttaatagaaaatttatggaaatgatgaagttgttgaatatttacatcaatcattttcctaaatatgaaaaatatgcgttatctaatcaaatcagacggacggcgtacggattgtatgatctcatcaccgaagggcagaaaaaatactataaaaaaacaacattaacaaaccttgacatctcccatgaaaaactcaggatgcaaatttttcttgcgtatgagttggggtattttggatttaaggatggtcgcaagaataccaaggggcggacagaagaacagagatactctgctatttccaggcaaatagacgagttgggcaaaatgattggcgggtggataaaaaagataaaagagcaaaatcaatggaagtaacgggaaaactatttatatgcgtgctatccggcgggaattggaacaacgattcgaaggctggagtttggaattcgaattggaacaactatcggacgaattcgaacacgaatgtggggttgtcgctcgactgcaaagcctcaaactcagaaactttgagacagtggaattacagggatagtttttccggcaatgtgcgaaatcaacaagatgtgcgtttttggtaggccggaccggctcgaagatcaagcatatttaaatttggagttgtatttgaaacggattggaaacttattcgataacacatttagctatgaaggcttatatcaggcataccttgatgccagaaaaggcaagcggaagaaacaggcttgttttgattttgaaatagctttgggtggaaaccttgagtcgcttcacaaggaaatccattggggaacctatacgcctcaaccgtataagaaatttacggtttatgagccgaaagagcgtataatctatgcccctgcgttcatggacactgttgtgcaacacgctatttaccgggctatttaccctatttttgacaaaacatttattgatcaatctttcgcttgccggaaggggatgggtactcataaatgcagccagcaaacacaaaaatacatgcgagcctgtggtgatgatgaatatatcttaaaacttgacatcaggaaatttttttattccatcgaccggaccatccttcgggaattgattgaaaaagagatcaaggatcaaaggtttgtggatattatgatgatgtttgcagatatggacactccagttggtgtccccattggcaaccttttgagccaaatatatgccttaatttttatgaatccagtggaccattttataaagcgggttttgaaaataaaaagatatgtccggtacgtggacgattttatcttgatcggaattaccagagatcagtgcctcgaataccgtacaagaattattgatttcttgaattctgagttaaatttaaaactgtcaaaatcaacaattcaaaaggtaaaaaagggcgtcaattttgtcggataccggacatggaagtcaaagaaatttatcagaaaatacagtctgtataaattcagaaagatggtaaaaaggaataaccaggccgccacaatttcgattctggggcatgcaaaatacacggcatctttgccgtacatgtttaaaattttaggggaagttaaaaatgatattaaaataccagaagattttcaaaaaattcgacgacaagcactccacaacaatcacgctcgttgagccagattataatgataatgacgagcgaaggattaccgagttgtgcacaataggtgaagacacatatgtccatgtccccgatggggtcgtattgcctgaacaaccatttgatatcgatgtcggcatggaatctgttaccctaaccccagaactaaagaaagaaataaaagctctctcaccacatgtccgactgtcatat

SEQ ID NO: 561 - DNA, 4000 bp, Escherichia coli
  misc_feature (585)..(585): n is a, c, g, or t
  misc_feature (587)..(587): n is a, c, g, or t
  misc_feature (2793)..(2793): n is a, c, g, or t
  misc_feature (2952)..(2952): n is a, c, g, or t
  misc_feature (3230)..(3230): n is a, c, g, or t
gatcatctgcatttttctcagtgagaatttggccgctgtcaaagtccatgaggaaatagccgcgggcagcaatcgtagggctggcggggatgatcaggttgttagccgctagtaaaggcgtcggtaaaaaaaacaccagcatacaaagggccaatgatttacctgacgaaaaaactcggtttgttataaatagcataagcgtaaaagtttttaaggcaaaaaaagggataaattaatagggttagtttgtgttgttattaatttaaagtttagggttctagggtgacaattataacatgagccgattattgaaagttactccgttataaaatggagtgcggaataaccgattttgctgagccgttgcatcagtcggtcggcttcattgacagagacaatagggccaaactgaagtttatgcagtaatctgtgagatttagaggtggttacaatgcgtgattttggtaagtgtttgtggcttaactgttgttgtaggttttgagcgttctctaggtgttgaaaagcaccgacttggagataaacatgcgtttttttatctgaaagcgtcgatgagcgaggtaagtnantgctaggtttggaggtattgatagactgaattctaacaaatccggttcctttttttaaaatgtcaagtttagccgctgcggtgtatgacaggtcgataagacggttgtcgtgaaaaggaccgcgatcattgatacgcagaataacgaaacgtttattgactagattagtgacttttacataagaaggaatgggcagtgttttatgggctgctgtcatggcaaacatgtcataagtctcaccattcgctgtttttttaccatgaaattttgtgccataccaggaagcaacgcccaaggcctgataattgtgactgtgattaagcgtacggtagcgttgacccagtacttcatattcaggcgggttgccggcacgtgttcggggttcaaaccgcggagtggcattgggtatcgccataatattggcgggtataaaatcaggcggttggtcttgttctgataacagtggcacggtacagctattgagcgataataaaatcgctccagtgagcagtttacctgttttagtcatgggctattttgagtgtattgattgcttcactgagttggaaaacggccatcgcatagagtggactatggttgtaacgggtaatggcataaaagttttgtaaccccaaccataaatcaatcgtttctttttgttgaaagcgcagtaatttaacacgatcagtaaaattgagttgttcagggaaggccagatgtagattcctctctttgagtgcggcaacggtggtatcaggccttagcccttttgaaagggcacggttaaaggcattggttttatgttgaattttaaaggcgaccggttggtcgggttgccagtggtgacgaatgaaataattggcaatactggcaaaaacatcgccgtaattggaccagatatctcgttttttatcgccatcaaaatcagcagcataactgatgaaactgctcggcataaattgcgggatgcccattgcgccggcataggaccctgtgggtattaaggggtcgatcgcttcgtctcgacataagataaggaattgttttaattcgttagtgaagaaagtttctcgtttagggtagccaaaggcaatcgtggcaagggcgtcaatgacgcgatgtttgccggtgatttttccgtaataggtttcaacaccaatgatggcgacaatgatttttgcagaaacaccgtatttttgttcaacacggctgagttcagattcgtgttttttccagaaggagacgccttgttgaattcttttaggggttaagaagatttctttatattgatgccagaccagacgtttttcagccggtttagaaatggctttaattatgggtgcttttatttccactgtttggaagagggcttcaagcgcggtgcggttaaaggcatgctttttgaccatgtcatcgataaagccattgattttggaagcaagcgaagggctgcttgggttggcggctggcttagttttatcgacctttcgggtaaggtaaataatatcgccgggctggactttattgaggtcttttatttgagggttagtggccagaatagtgggccaagcatggctggggaggttgagctttttgaatgccccccataacgtatcgccctgggcaataatgtattgttgaggtgagtcctttgtaaaggtatcgggggttttctcagccgcgcaaggtgtgagcgcaacagtactgagtaaaccaataaaaaacctgatggtgcggtgttttttttgaagagtcataggtatagggatgataggcctgtaggagcagtggttaatgagacagtaaatttttatgcgtatgaatagacataagaataccgaatccgatcagcagtgtcaccattgaagtgccaccataactaattaacggtaagggtacgcccacgaccggtaaaataccaataaccataccaatgttgacaaagacataaacaaagaaggtgaaggataaactaccggctaacagccggcaaaaggtgtcttgggcattaacagcgatgtaaagtgaacgcagggtgatgagtaaatataaaaataataaactgacgcaacccagtagcccaaattcttcggcgaaaacggcaaagataaaatcagttgagcgttcagggaggaactctaatttggcctgcgtgctttcaagccagcctttaccgtaaagtccgccggagccaatggctattttngattggatgatatggtagcctctgcctatggggtcgctctcaggattgaggaaggtgatcacacgggcacgttgataatcatgcatgaaatgccataaaaccggtgtaagcgctatcaggccacccagtgatgaaagcataattcgccatgagatcccngcgaaaaaaaagacggcggctcctgaactggcaattaaaagggcggtgcctaggtcgggttgttttgcgatcaggaaagtcggaatggcaattagcagtagggcgataaacaattctttccaacgggggggtaaagcatgctctgaaaaataccaggcaattgccgcaggcgtggttattttgatcatttcagacggttgaaagcggaaaagtcctaaatcaagccagcgctgagccccttttcccatctcaccgataatcagtaccgcgagtaacanaaggatgccgatgatatataaattcacagcatatcttttgatttgattcggggggatttgggcgataaacagcataataaaaaaagcgatagcgatgcgtgtggtttgacgcaataaggtctctaaatgttgaccgctggtactgtataaaatgagacaactgagtaaggaaagcagaatcaagccagctaataacagactgtcaaggtgaatacgacttaaaaaacggccgataactgagttattctggaagtgttcagggcgtgtttcgttaatcattatgggatgttttgtttaaatactgagtaattatctttttggctatgggtgcggcagcggttccgccatggcccccattctcgacaatgacagcaaccgctattttaggtgcattagcgggtgcaaaggcaataaataaagcgtgatcaagcagtttttcctttagtttttcagcgtcatatttttctttttgtttgacggtaaatacttgtgccgttccggttttaccggcgattttatagtttatgttttggctgagtttgtacgcggtacctttaggggtatgtacgacattaatcattgaattaataatatcactgacataagcggggtcaatattaactttttcggtaataggtttgggttgggatgccttcgcgggctttattaaatgggggcgaatgctgatgccctggttggctaaggtagcggttgcaacggctagttgcagcggggtggtttgcatgaatccttggccaataccggtgatt

SEQ ID NO: 562 - DNA, 4000 bp, Escherichia coli
  misc_feature (2197)..(2197): n is a, c, g, or t
  misc_feature (2595)..(2595): n is a, c, g, or t
  misc_feature (2742)..(2742): n is a, c, g, or t
  misc_feature (3413)..(3413): n is a, c, g, or t
  misc_feature (3419)..(3422): n is a, c, g, or t
  misc_feature (3427)..(3427): n is a, c, g, or t
  misc_feature (3429)..(3431): n is a, c, g, or t
  misc_feature (3434)..(3434): n is a, c, g, or t
  misc_feature (3442)..(3442): n is a, c, g, or t
  misc_feature (3444)..(3444): n is a, c, g, or t
  misc_feature (3446)..(3446): n is a, c, g, or t
  misc_feature (3448)..(3448): n is a, c, g, or t
  misc_feature (3451)..(3451): n is a, c, g, or t
  misc_feature (3453)..(3453): n is a, c, g, or t
  misc_feature (3457)..(3458): n is a, c, g, or t
  misc_feature (3460)..(3466): n is a, c, g, or t
  misc_feature (3468)..(3468): n is a, c, g, or t
  misc_feature (3470)..(3472): n is a, c, g, or t
  misc_feature (3474)..(3481): n is a, c, g, or t
  misc_feature (3483)..(3483): n is a, c, g, or t
  misc_feature (3487)..(3487): n is a, c, g, or t
  misc_feature (3490)..(3492): n is a, c, g, or t
  misc_feature (3497)..(3501): n is a, c, g, or t
  misc_feature (3505)..(3505): n is a, c, g, or t
  misc_feature (3507)..(3508): n is a, c, g, or t
  misc_feature (3511)..(3513): n is a, c, g, or t
  misc_feature (3516)..(3516): n is a, c, g, or t
  misc_feature (3518)..(3518): n is a, c, g, or t
  misc_feature (3520)..(3522): n is a, c, g, or t
  misc_feature (3530)..(3531): n is a, c, g, or t
  misc_feature (3535)..(3535): n is a, c, g, or t
  misc_feature (3537)..(3538): n is a, c, g, or t
  misc_feature (3541)..(3542): n is a, c, g, or t
  misc_feature (3545)..(3546): n is a, c, g, or t
  misc_feature (3551)..(3552): n is a, c, g, or t
  misc_feature (3560)..(3560): n is a, c, g, or t
  misc_feature (3562)..(3562): n is a, c, g, or t
  misc_feature (3564)..(3564): n is a, c, g, or t
  misc_feature (3566)..(3572): n is a, c, g, or t
  misc_feature (3575)..(3578): n is a, c, g, or t
  misc_feature (3580)..(3582): n is a, c, g, or t
  misc_feature (3584)..(3587): n is a, c, g, or t
  misc_feature (3592)..(3593): n is a, c, g, or t
  misc_feature (3595)..(3596): n is a, c, g, or t
  misc_feature (3598)..(3598): n is a, c, g, or t
  misc_feature (3603)..(3603): n is a, c, g, or t
  misc_feature (3605)..(3608): n is a, c, g, or t
  misc_feature (3610)..(3610): n is a, c, g, or t
  misc_feature (3615)..(3615): n is a, c, g, or t
  misc_feature (3618)..(3620): n is a, c, g, or t
  misc_feature (3623)..(3625): n is a, c, g, or t
  misc_feature (3629)..(3629): n is a, c, g, or t
  misc_feature (3632)..(3634): n is a, c, g, or t
  misc_feature (3637)..(3638): n is a, c, g, or t
  misc_feature (3640)..(3650): n is a, c, g, or t
  misc_feature (3653)..(3658): n is a, c, g, or t
  misc_feature (3660)..(3663): n is a, c, g, or t
  misc_feature (3665)..(3666): n is a, c, g, or t
  misc_feature (3669)..(3678): n is a, c, g, or t
  misc_feature (3682)..(3683): n is a, c, g, or t
  misc_feature (3686)..(3687): n is a, c, g, or t
  misc_feature (3689)..(3693): n is a, c, g, or t
  misc_feature (3695)..(3696): n is a, c, g, or t
  misc_feature (3704)..(3706): n is a, c, g, or t
  misc_feature (3708)..(3709): n is a, c, g, or t
  misc_feature (3713)..(3716): n is a, c, g, or t
  misc_feature (3721)..(3721): n is a, c, g, or t
  misc_feature (3723)..(3723): n is a, c, g, or t
  misc_feature (3725)..(3727): n is a, c, g, or t
  misc_feature (3729)..(3729): n is a, c, g, or t
  misc_feature (3734)..(3734): n is a, c, g, or t
  misc_feature (3742)..(3744): n is a, c, g, or t
  misc_feature (3747)..(3747): n is a, c, g, or t
  misc_feature (3754)..(3754): n is a, c, g, or t
  misc_feature (3760)..(3761): n is a, c, g, or t
  misc_feature (3765)..(3768): n is a, c, g, or t
  misc_feature (3772)..(3772): n is a, c, g, or t
  misc_feature (3778)..(3778): n is a, c, g, or t
  misc_feature (3782)..(3782): n is a, c, g, or t
  misc_feature (3784)..(3785): n is a, c, g, or t
  misc_feature (3796)..(3796): n is a, c, g, or t
  misc_feature (3801)..(3803): n is a, c, g, or t
  misc_feature (3807)..(3808): n is a, c, g, or t
  misc_feature (3812)..(3812): n is a, c, g, or t
  misc_feature (3816)..(3817): n is a, c, g, or t
  misc_feature (3821)..(3821): n is a, c, g, or t
  misc_feature (3825)..(3825): n is a, c, g, or t
  misc_feature (3833)..(3833): n is a, c, g, or t
  misc_feature (3836)..(3837): n is a, c, g, or t
  misc_feature (3840)..(3840): n is a, c, g, or t
  misc_feature (3846)..(3848): n is a, c, g, or t
  misc_feature (3854)..(3854): n is a, c, g, or t
  misc_feature (3858)..(3858): n is a, c, g, or t
  misc_feature (3860)..(3861): n is a, c, g, or t
  misc_feature (3867)..(3867): n is a, c, g, or t
  misc_feature (3870)..(3870): n is a, c, g, or t
  misc_feature (3874)..(3874): n is a, c, g, or t
  misc_feature (3876)..(3876): n is a, c, g, or t
  misc_feature (3879)..(3879): n is a, c, g, or t
  misc_feature (3882)..(3884): n is a, c, g, or t
  misc_feature (3889)..(3890): n is a, c, g, or t
  misc_feature (3892)..(3893): n is a, c, g, or t
  misc_feature (3900)..(3900): n is a, c, g, or t
  misc_feature (3902)..(3903): n is a, c, g, or t
  misc_feature (3906)..(3908): n is a, c, g, or t
  misc_feature (3913)..(3915): n is a, c, g, or t
  misc_feature (3919)..(3921): n is a, c, g, or t
  misc_feature (3924)..(3924): n is a, c, g, or t
  misc_feature (3926)..(3926): n is a, c, g, or t
  misc_feature (3930)..(3930): n is a, c, g, or t
  misc_feature (3932)..(3932): n is a, c, g, or t
  misc_feature (3934)..(3936): n is a, c, g, or t
  misc_feature (3938)..(3938): n is a, c, g, or t
  misc_feature (3943)..(3943): n is a, c, g, or t
  misc_feature (3945)..(3945): n is a, c, g, or t
  misc_feature (3947)..(3948): n is a, c, g, or t
  misc_feature (3953)..(3953): n is a, c, g, or t
  misc_feature (3958)..(3958): n is a, c, g, or t
  misc_feature (3970)..(3970): n is a, c, g, or t
  misc_feature (3975)..(3975): n is a, c, g, or t
  misc_feature (3977)..(3977): n is a, c, g, or t
  misc_feature (3979)..(3979): n is a, c, g, or t
  misc_feature (3984)..(3985): n is a, c, g, or t
  misc_feature (3989)..(3989): n is a, c, g, or t
  misc_feature (3992)..(3992): n is a, c, g, or t
  misc_feature (3994)..(3994): n is a, c, g, or t
  misc_feature (3998)..(3998): n is a, c, g, or t
gataccgactgggaagtggacattgaccttgaggtgctgattgacgccctgctgaccagccccaagttcatcaagtccctggcaatcctcatccgcaacgcccagaccaaagacagccgccggatgcagaacctctacggcaccaccgcccagcgccccagccctaaacctgccacgaaaggccgcctctcgtgaccatcgcctcgcttcctgccatcaaggtctacatcgccttcaacccgacggcgagcggcaacaccctgaccaccgcgaacacggttcccctgaccaactcgtcctactggacagactgctcggcgtacctgcgcgacttctccaccaagtcaggcaagcagcactaccttgaccgcgtagaagcgaccaccctcaaggccacgctgaacaaccgcgacggcttcttcaacggatcgccgaacaccatcacggcgcgtctgcccatcgccatcaccgccacttggtctggcacgacctaccccaccttctacggcatcattgacagcgtttcggagaaggtcggcgacgccctgaactccgacctcgacattgaggccagcgacctgctcaagtacctgagcctcaagtacctgcaccgcccctcgttctggcagacctacgcggcctcccctgccgcgcaatcgtggtatcggtgctcgaactacgccgtcgctacggtcacgagcgcacgtccaactctgccggaactgccatcacctacaacatcatcaactcgacggtgaacttctacgtcggcggcaacgtcacggtcacggggctcgcggggcttaccacgttcaacatcacgaacctgcccatcgcctcggtaacgtcctctggtggcgtggtcacgtccttcacggtgaacgtgacggtcacggcgaacaccacgtcgcagtctgcagggctggtctacctcaacacgctctacgactacatgggcaacaccaacggcacgttctcggggcagatctcctatccggacaacggcgttatcatctacgacaccgacggctgtgtggatctctcaggctcgggcaacgtcgctgccggtgcgctctccctgcctcgtccttcgtcctcgcccaacttcggcggcattgacttctgggtgctcggtcagcagaccagcctgaaccagattgcccaggtctatttcaacggcaccgtctcaagctcgtactcggtagtcctctcggtgggcaacgcaggcgtcttgcactgcttcatcggtggctcgtcatcggcggcagcctcaagcagcaacttcatcaacgacggctactggcaccacgtcgggctcgccatcatctcgggagcgctgtatctctactgcgacggggtgttctacgccactggtcagaccgcgacggagattacctacccgactggcggcatcgtcatcggtgcaaacgcctccaacgtgttctcctacaacgggcaaatagacgaaatcgtcatctctagcgtggcctcgacggttcccaccgaaatccagcagcgttaccgcgcaggctccatgcttcagttgggctaccccgtcacgccgaacaagtgctactcggcagaccgcatcggggaaatcctgaccctggcaggcttcggcacgattaccggcggaacctcaagcgcccaggcttccctgagcgtccctcagctcgtcattggcaacggcccgaacaccgccggaaccaccccctactcctacggctctgggcagggcgcagtcgccaccgaaccgtactactgggacagccccatcaacggatcaacggcgctcgacctcatccagcaaatcaccgacacggacattggctcgttctaccagtaccgcaacgggcagttccacttcaacccccagacgtactacggcacatggtcattcaccccagcctctacgccggtgggaaccccgacctactcatggacgaagggcagttacgccaacgtcaataccatctcggacgatggcaccggctacccctacgaaatcaacgggctggacattctcaccgatgacgtagacctctggactacggtacgcatcacccctcaggctggcgtagaccaaatctacgagaacaccggcaacgagggtcgctggggatactcaaccctgagcaagtcctccaccgtctcgtgctcgctggccgacgcgcaatcaacggcctacttcctcggntacatcttccgcactccgctcccccgagtgaacagcgttacgctaacgagcgaggtgacggtgggcggtgtcgagggatacaacctgccagtcatgctgggcgcaaacttcgccgacgtgattgccttccgacgcacccctcccaacgccggaacctcgccctacatcaacctgcagatggcagtcgagagcatcacgcacgacttcagcgccgaccctggctactggcacacgacgctgaccctcgacccgtaccccgtgaggaactaatggcaatcaagaacacgaccacctacggcgcacagctcacttccctcggcgacggatcggatagttcgttctggcggcagggtggcgcgtggagttcaggcacccccacgaacgccggtatcagcatnggcacggccttctcgggcaacccctacatcgctacggtcggtctggtgacaaacgccaacatctcgggcttcttgacctacctcgtcacgttcaacctcggcgcaacggcagccgcccagcctgcgacgggtctgttcgtagggctnggcaacggagcctcatccacgccgttctacagttacgagattggcgtcttggagaactcgggtcagcagttctcgggctcgtacatctaccagcctggcagcatccagcccttctacctgaccctgcaggcaaagaccgcaagcggaaccgcgaccctcgcgttcggcagcatcaccgtcatcggcatcaactaaggagcatcatgtccgacacacgcaacgcaatcgtcgagtgggcgaagtgggcgcacgacaacaaagcgcacttcaactacaccgaaggccccgagcgcatgagcgccatcggcgtctatccccccaagttccccatcaacgctgactgctcggcgttcgtgacgtggtgctactggatcgcgggcgcaccagaccccaacggcctgcactacgaccacgagggctacaccggaaccctgcttcacgggctggaaatcccccgagaccaagtccagcctggcgacgtaatcgtctatggccctggcaccggctggcacaccgcgctcgtcatcgaggccggagccgaccccctcaccatctcacacggccagcagggagaccccagcctcgtccgagtgagccaagacggacgccagccccagcgttacctgcgcttcaagaccgaaggcacccctcgctaccccgacaccaagccngccccnnnnccggncnnnccngccgccgncncncnccngnccgnngnnnnnnngncnnncnnnnnnnncncacnacnnncccannnnncccncnnagnnnccncngnnncgcccgcnncgcngnnggnngannaaccnnccaccaanangncnnnnnnnggnnnncnnntnnnnaaggnngnngnggccntnnnngnggccnttnnngannncccngcnnnatnntnnnnnnnnnnnacnnnnnntnnnncnnctnnnnnnnnnngttnntcnncnnnnntnncttcctgnnngnnttcnnnnggggngncnnnanggtgntcaatcannnccncatcatncttcannacgnnnnagcnaccaangcgncnnacctcgccgcngagannntcanngaanaaanngaanaaancaagaagnagnnccnccccannncgggcncgangnngcgcgncgntatngnccncannnagaanncnntcggacncnncgnnntgaannnggannnggngnagancnannngnacaancncnncggcnggcantcggcggataantaatncncngcaannaaanccncngggnct

SEQ ID NO: 563 - DNA, 4000 bp, Escherichia coli
  misc_feature (141)..(141): n is a, c, g, or t
  misc_feature (164)..(164): n is a, c, g, or t
  misc_feature (231)..(231): n is a, c, g, or t
  misc_feature (281)..(281): n is a, c, g, or t
  misc_feature (299)..(299): n is a, c, g, or t
  misc_feature (359)..(359): n is a, c, g, or t
  misc_feature (367)..(367): n is a, c, g, or t
  misc_feature (381)..(381): n is a, c, g, or t
  misc_feature (406)..(406): n is a, c, g, or t
  misc_feature (449)..(449): n is a, c, g, or t
  misc_feature (451)..(451): n is a, c, g, or t
  misc_feature (574)..(574): n is a, c, g, or t
  misc_feature (586)..(586): n is a, c, g, or t
  misc_feature (633)..(633): n is a, c, g, or t
  misc_feature (1184)..(1184): n is a, c, g, or t
  misc_feature (1760)..(1760): n is a, c, g, or t
  misc_feature (1871)..(1871): n is a, c, g, or t
  misc_feature (1988)..(1988): n is a, c, g, or t
  misc_feature (1991)..(1992): n is a, c, g, or t
  misc_feature (1994)..(1994): n is a, c, g, or t
  misc_feature (2000)..(2000): n is a, c, g, or t
  misc_feature (2543)..(2543): n is a, c, g, or t
  misc_feature (2624)..(2624): n is a, c, g, or t
  misc_feature (2637)..(2637): n is a, c, g, or t
  misc_feature (2862)..(2862): n is a, c, g, or t
  misc_feature (3224)..(3224): n is a, c, g, or t
  misc_feature (3227)..(3227): n is a, c, g, or t
  misc_feature (3345)..(3345): n is a, c, g, or t
  misc_feature (3479)..(3479): n is a, c, g, or t
  misc_feature (3555)..(3555): n is a, c, g, or t
  misc_feature (3809)..(3809): n is a, c, g, or t
  misc_feature (3981)..(3981): n is a, c, g, or t
tcctccagacgggcggcgggaccgggctcggccacgcggtggacgggatcacccggtcgagcaccgcacccgtgcccacggtgacgccgctgccggcgccgcggcccgacagcgtctgggtgccggaccgatatctccccnctccgcacaccgggggaaccgtnctcgtcccgggccactgggagcgtcgcgtctccgaccacgagtcctacgtcccgccgctcaccacgntcaaccccgccgacgggcgcctccagacgtttccggccggcgtgaggccncgagccgaagagcgcacngccccgtgacggccttcttccgccggcaccgcgtgttcgtcgtcctcctcgccctcggtnccctcgtnacgaccctcgtcgngtaccggatccggaagcagcaggcngccgccgtgccccggcgtcagctcgagatcgtcgtggccgtgntnaagccgatccggaaggacctcgacgtcaagctcgcctacaccgcggacgtgctcccgaaccagcaagtcgcgatcttctccaaggtgagcgggtacatcaagcggctcggcgccgacctcggngacttcgtcagngagggccagctcctggtcgaggtggaggcgccggagctcgccgccgncgtcgagcaggcccgcgccgccgtggcgacggcggcggccaacctgaaggtcgccgagtcgaatctggaatccgcgaaggccaacgccgtcaaccaggaagcgaacctcgtcaaggcccgcaccgtcgcgaccaacgacgcgcggaacgccgcgcggctcacggacctccacggccgagggctcatcgcggcgatggacctggacaacgcgaagacgaacgcggagtcctcgcaggcgtcgctcgccgccgccgaggcgcagctcgccgcggcacgcagccagatcgacacccagcggagccaggtcgcgctcgcgcaatccaacgtcgacggcgctcgcgcgttcctcaagatcgcccagaccaacctcgacaacgcccgcatcctcgcgccgttcgccggctacatctcggcgcggaacctctacccgggcgccgcggtcaactcccagcaggcgggcacgtcgacccaggcggtgggcatcctggtcctccaggacatcgcgaccgtcaaggtgcagctcgaggtccaggaacggcacatcaccctcntccgtctcggctcggtcgcgcgcgtcctcgtcgacgcctaccccgagcgcatgttcgaggcgcgggcgacgcgcatcgtccacgccctcgatccgaggacgcgcacgctgggcgtcgagatgatgatcacgaatcccgacgcgctcctcaagcccggcatgtacgcgcgcgtcgagctggtcatcgcgcatcatcccggtgcgatcctggtccagggcgaggcgatctcgaatgagggcgacacgccggtcgtgttcgtcgtcaacgacggtgtcgtcggcaagcggacgatcgccaccggcgtcggggagggcacgctcgtcgaggtcaccaaggggctcggcggagacgagctcgtcatcgtcgagggaaaggagctggtccgcgacggccagcgagtccgcgcggaggcgaggaagtagcatgtggatgacgctgctcgccctgcgcaactcgatcgccatcctgatggccgcgctggccgtggccatcctcggcttcgtcgccctcgggcgactccccatcgatctcttccccaacatcaacctgccgatcatcaacatcgggactgtctanacgggcgccggcgtcctcgacatcgagaagacggtgacctatccgatcgagaaggccgtcagcgccgtcagcgacgtgaagttcgtcgactcgaagtcacggcaggggctntccacggtgcggctctggatgaactggggcgccgacgtcaacaacggccagacggaggtcatccagcggatccagcagatcctcagctcgctccccacggggatcaggcagccgttngtnntnaggttngacctctcgaacatcccggtgtgcctcgtcaccgcgtcggggggcgggctcgacgagaagcagctgtatgacctcgcctacaacacgatcgagcctcagctcgagcggttgggcggggtcgcctcggcgtcggtggacggcggcaaagtgcgacagatcacggtcaacctgaaccgcgaccagctcttcgccaaggggctgtcggtgctcgacgtcgtccgcgccgtcaacgactcgaacttcctcctgcccgccggcgacatcaaagtcgggcgactcgactacaacatctacaccaacaaccagttccggctcgtccagccgatggaggacatcgtcgtccgcaagtcgggcgggagcggtgtgccgatccacatcaaggatctcgggtacgtcgtggactcgcacgagacgcagaccgccgtcgtgcggatcgacggtgcgcgcggcgtcttcatgcgcgtcaacaagcagccgggcgcgaacaccgtcacggtggtcgaccaggtccgggaactcatcccgaaggtcatcggcgtgccnccgggcgtgaaggtcggaatcacgttcgaccagtcgatctacatccgccaggccatcgagagcctttggcacgaggccatncagggctcggcgntggccttcatcgtcatcctgatcttcctacgctcgctcacctcgaccctcatcatctcggtcgccatcccgctctcgatcctgctctcgttcatcgtcatgtacttcctggggcagacgctcaacgtgttcacgctcggcgggctcgccctggccgtgggtcgtctggtcgacgactcgatcgtcgagctggaaaacatcaaccggcacctggcgatgccgggcnaggagcgccggcgggcggtgctggacgccgcccgcgaagtcgcgatgccgatcttctcggcgaccattacgacgatcatcgtcttcgtgcccaccgtcttcctcgagggtcagatcaagctcctcttcatcccgctgacgttcacgatctcgatctcgctcttcgcctccttcctggtgtcgcggaccgtcacccccctcctcgccctgaaagtccttcggccggagaggtcgatcgacccggcctcccgatcgctccgcgatcgggtcttccgattctcacggagcttcttcgaacgcacggaggaggtgtaccagcacatcgtcgtctgggcgctgggccatcgtcggctcgtcatcggntcnatcgccgtcaccttcgtggcgagcctcttcctggtcttggcaccccgcgtcggtctcaagccgctcatcgggacggagtttttccccccctcggacgaggcgcagttccgaatcaacntcaaggcgccgatcggcacgcggatcgaggagaccgagcgaatcgtcaaggggatggagtccatcgtccgggcggccgtccgccccgaagagctgaagacgctcgtcaccaacgtcggcatcccgcagggtcgntcagccgtcttcaccggcaacacgggcccgcacagcgcgacggttcaggtctacctgacgacggcggacaagcggnagcggagcgaccgcgagatcgtgaacgcgatccgaccggcgttcgtcgggcagtttcccggcacgcgctaccagttcgtcgccggcggcctcgtctctcgcgtcgtcaacttcggttcggagacggcgatcgaggtggagatcctcgggtacgacctcgcgaccgccgaggccctctcgcgtgaggtcgcacggatcatgcagtcgacggagggcgtggccgacgtcaacgtcagccgcgacgcgaactatccncagttcgatgtcagggtcgaccgggagaaggcggcgtccgccgggctctcgcagcgtgacatcgcgcaggccgcgctcttctccctgaactcgaactccagcgtcaacccctcgatcttcaccgacccgcggacgggcaaccagtacaacctcgtcgtccagctcgacgagncgtaccggcagacgcccga

SEQ ID NO: 564 - DNA, 4000 bp, Escherichia coli
  misc_feature (1985)..(1986): n is a, c, g, or t
  misc_feature (1998)..(1998): n is a, c, g, or t
  misc_feature (2022)..(2022): n is a, c, g, or t
  misc_feature (2028)..(2028): n is a, c, g, or t
  misc_feature (2062)..(2062): n is a, c, g, or t
  misc_feature (2065)..(2065): n is a, c, g, or t
  misc_feature (2208)..(2208): n is a, c, g, or t
  misc_feature (2220)..(2220): n is a, c, g, or t
  misc_feature (2222)..(2222): n is a, c, g, or t
  misc_feature (2232)..(2232): n is a, c, g, or t
  misc_feature (2237)..(2237): n is a, c, g, or t
  misc_feature (2240)..(2240): n is a, c, g, or t
  misc_feature (2245)..(2245): n is a, c, g, or t
  misc_feature (2249)..(2250): n is a, c, g, or t
  misc_feature (2253)..(2257): n is a, c, g, or t
  misc_feature (2259)..(2260): n is a, c, g, or t
  misc_feature (2264)..(2264): n is a, c, g, or t
  misc_feature (2270)..(2271): n is a, c, g, or t
  misc_feature (2273)..(2274): n is a, c, g, or t
  misc_feature (2276)..(2276): n is a, c, g, or t
  misc_feature (2282)..(2282): n is a, c, g, or t
  misc_feature (2289)..(2289): n is a, c, g, or t
  misc_feature (2295)..(2295): n is a, c, g, or t
  misc_feature (2299)..(2299): n is a, c, g, or t
  misc_feature (2302)..(2303): n is a, c, g, or t
  misc_feature (2305)..(2305): n is a, c, g, or t
  misc_feature (2308)..(2308): n is a, c, g, or t
  misc_feature (2310)..(2310): n is a, c, g, or t
  misc_feature (2314)..(2314): n is a, c, g, or t
  misc_feature (2318)..(2319): n is a, c, g, or t
  misc_feature (2322)..(2322): n is a, c, g, or t
  misc_feature (2328)..(2331): n is a, c, g, or t
  misc_feature (2336)..(2336): n is a, c, g, or t
  misc_feature (2339)..(2339): n is a, c, g, or t
  misc_feature (2349)..(2351): n is a, c, g, or t
  misc_feature (2357)..(2358): n is a, c, g, or t
  misc_feature (2362)..(2364): n is a, c, g, or t
  misc_feature (2371)..(2371): n is a, c, g, or t
  misc_feature (2379)..(2379): n is a, c, g, or t
  misc_feature (2382)..(2382): n is a, c, g, or t
  misc_feature (2384)..(2384): n is a, c, g, or t
  misc_feature (2388)..(2388): n is a, c, g, or t
  misc_feature (2391)..(2393): n is a, c, g, or t
  misc_feature (2395)..(2397): n is a, c, g, or t
  misc_feature (2399)..(2402): n is a, c, g, or t
  misc_feature (2405)..(2405): n is a, c, g, or t
  misc_feature (2412)..(2412): n is a, c, g, or t
  misc_feature (2414)..(2414): n is a, c, g, or t
  misc_feature (2416)..(2418): n is a, c, g, or t
  misc_feature (2420)..(2421): n is a, c, g, or t
  misc_feature (2423)..(2429): n is a, c, g, or t
  misc_feature (2431)..(2431): n is a, c, g, or t
  misc_feature (2434)..(2434): n is a, c, g, or t
  misc_feature (2440)..(2441): n is a, c, g, or t
  misc_feature (2446)..(2447): n is a, c, g, or t
  misc_feature (2450)..(2451): n is a, c, g, or t
  misc_feature (2454)..(2455): n is a, c, g, or t
  misc_feature (2458)..(2461): n is a, c, g, or t
  misc_feature (2465)..(2467): n is a, c, g, or t
  misc_feature (2471)..(2473): n is a, c, g, or t
  misc_feature (2475)..(2476): n is a, c, g, or t
  misc_feature (2479)..(2481): n is a, c, g, or t
  misc_feature (2484)..(2486): n is a, c, g, or t
  misc_feature (2488)..(2490): n is a, c, g, or t
  misc_feature (2492)..(2493): n is a, c, g, or t
  misc_feature (2496)..(2497): n is a, c, g, or t
  misc_feature (2499)..(2499): n is a, c, g, or t
  misc_feature (2501)..(2502): n is a, c, g, or t
  misc_feature (2505)..(2507): n is a, c, g, or t
  misc_feature (2510)..(2512): n is a, c, g, or t
  misc_feature (2514)..(2516): n is a, c, g, or t
  misc_feature (2519)..(2519): n is a, c, g, or t
  misc_feature (2521)..(2522): n is a, c, g, or t
  misc_feature (2524)..(2527): n is a, c, g, or t
  misc_feature (2529)..(2529): n is a, c, g, or t
  misc_feature (2532)..(2532): n is a, c, g, or t
  misc_feature (2535)..(2535): n is a, c, g, or t
  misc_feature (2538)..(2546): n is a, c, g, or t
  misc_feature (2549)..(2549): n is a, c, g, or t
  misc_feature (2552)..(2553): n is a, c, g, or t
  misc_feature (2557)..(2557): n is a, c, g, or t
  misc_feature (2559)..(2560): n is a, c, g, or t
  misc_feature (2564)..(2565): n is a, c, g, or t
  misc_feature (2568)..(2568): n is a, c, g, or t
  misc_feature (2571)..(2573): n is a, c, g, or t
  misc_feature (2578)..(2579): n is a, c, g, or t
  misc_feature (2581)..(2581): n is a, c, g, or t
  misc_feature (2584)..(2586): n is a, c, g, or t
  misc_feature (2588)..(2590): n is a, c, g, or t
  misc_feature (2592)..(2594): n is a, c, g, or t
  misc_feature (2598)..(2598): n is a, c, g, or t
  misc_feature (2604)..(2604): n is a, c, g, or t
  misc_feature (2606)..(2607): n is a, c, g, or t
  misc_feature (2611)..(2619): n is a, c, g, or t
  misc_feature (2621)..(2624): n is a, c, g, or t
  misc_feature (2626)..(2626): n is a, c, g, or t
  misc_feature (2628)..(2629): n is a, c, g, or t
  misc_feature (2631)..(2631): n is a, c, g, or t
  misc_feature (2634)..(2634): n is a, c, g, or t
  misc_feature (2637)..(2637): n is a, c, g, or t
  misc_feature (2640)..(2640): n is a, c, g, or t
  misc_feature (2645)..(2645): n is a, c, g, or t
  misc_feature (2650)..(2651): n is a, c, g, or t
  misc_feature (2654)..(2655): n is a, c, g, or t
  misc_feature (2657)..(2660): n is a, c, g, or t
  misc_feature (2664)..(2664): n is a, c, g, or t
  misc_feature (2667)..(2669): n is a, c, g, or t
  misc_feature (2671)..(2673): n is a, c, g, or t
  misc_feature (2675)..(2675): n is a, c, g, or t
  misc_feature (2677)..(2678): n is a, c, g, or t
  misc_feature (2681)..(2681): n is a, c, g, or t
  misc_feature (2685)..(2685): n is a, c, g, or t
  misc_feature (2687)..(2689): n is a, c, g, or t
  misc_feature (2691)..(2694): n is a, c, g, or t
  misc_feature (2699)..(2699): n is a, c, g, or t
  misc_feature (2702)..(2702): n is a, c, g, or t
  misc_feature (2704)..(2705): n is a, c, g, or t
  misc_feature (2707)..(2709): n is a, c, g, or t
  misc_feature (2713)..(2715): n is a, c, g, or t
  misc_feature (2717)..(2717): n is a, c, g, or t
  misc_feature (2719)..(2727): n is a, c, g, or t
  misc_feature (2729)..(2730): n is a, c, g, or t
  misc_feature (2732)..(2732): n is a, c, g, or t
  misc_feature (2734)..(2738): n is a, c, g, or t
  misc_feature (2746)..(2747): n is a, c, g, or t
  misc_feature (2749)..(2749): n is a, c, g, or t
  misc_feature (2751)..(2753): n is a, c, g, or t
  misc_feature (2756)..(2756): n is a, c, g, or t
  misc_feature (2758)..(2758): n is a, c, g, or t
  misc_feature (2760)..(2761): n is a, c, g, or t
  misc_feature (2764)..(2765): n is a, c, g, or t
  misc_feature (2769)..(2770): n is a, c, g, or t
  misc_feature (2775)..(2775): n is a, c, g, or t
  misc_feature (2777)..(2778): n is a, c, g, or t
  misc_feature (2782)..(2782): n is a, c, g, or t
  misc_feature (2784)..(2784): n is a, c, g, or t
  misc_feature (2790)..(2790): n is a, c, g, or t
  misc_feature (2792)..(2796): n is a, c, g, or t
  misc_feature (2799)..(2799): n is a, c, g, or t
  misc_feature (2803)..(2803): n is a, c, g, or t
  misc_feature (2805)..(2805): n is a, c, g, or t
  misc_feature (2808)..(2808): n is a, c, g, or t
  misc_feature (2810)..(2810): n is a, c, g, or t
  misc_feature (2814)..(2814): n is a, c, g, or t
  misc_feature (2816)..(2818): n is a, c, g, or t
  misc_feature (2820)..(2821): n is a, c, g, or t
  misc_feature (2824)..(2825): n is a, c, g, or t
  misc_feature (2827)..(2827): n is a, c, g, or t
  misc_feature (2829)..(2832): n is a, c, g, or t
  misc_feature (2835)..(2836): n is a, c, g, or t
  misc_feature (2839)..(2842): n is a, c, g, or t
  misc_feature (2844)..(2845): n is a, c, g, or t
  misc_feature (2848)..(2848): n is a, c, g, or t
  misc_feature (2853)..(2853): n is a, c, g, or t
  misc_feature (2857)..(2857): n is a, c, g, or t
  misc_feature (2859)..(2859): n is a, c, g, or t
  misc_feature (2861)..(2861): n is a, c, g, or t
  misc_feature (2863)..(2864): n is a, c, g, or t
  misc_feature (2866)..(2867): n is a, c, g, or t
  misc_feature (2869)..(2872): n is a, c, g, or t
  misc_feature (2874)..(2879): n is a, c, g, or t
  misc_feature (2883)..(2883): n is a, c, g, or t
  misc_feature (2887)..(2887): n is a, c, g, or t
  misc_feature (2889)..(2892): n is a, c, g, or t
  misc_feature (2895)..(2896): n is a, c, g, or t
  misc_feature (2898)..(2899): n is a, c, g, or t
  misc_feature (2901)..(2901): n is a, c, g, or t
  misc_feature (2903)..(2903): n is a, c, g, or t
  misc_feature (2905)..(2906): n is a, c, g, or t
  misc_feature (2918)..(2926): n is a, c, g, or t
  misc_feature (2933)..(2936): n is a, c, g, or t
  misc_feature (2939)..(2940): n is a, c, g, or t
  misc_feature (2943)..(2951): n is a, c, g, or t
  misc_feature (2953)..(2953): n is a, c, g, or t
  misc_feature (2956)..(2958): n is a, c, g, or t
  misc_feature (2960)..(2961): n is a, c, g, or t
  misc_feature (2963)..(2964): n is a, c, g, or t
  misc_feature (2967)..(2967): n is a, c, g, or t
  misc_feature (2970)..(2971): n is a, c, g, or t
  misc_feature (2973)..(2975): n is a, c, g, or t
  misc_feature (2981)..(2982): n is a, c, g, or t
  misc_feature (2984)..(2984): n is a, c, g, or t
  misc_feature (2986)..(2988): n is a, c, g, or t
  misc_feature (2993)..(2995): n is a, c, g, or t
  misc_feature (2997)..(2997): n is a, c, g, or t
  misc_feature (3000)..(3000): n is a, c, g, or t
  misc_feature (3003)..(3003): n is a, c, g, or t
  misc_feature (3005)..(3006): n is a, c, g, or t
  misc_feature (3008)..(3010): n is a, c, g, or t
  misc_feature (3014)..(3014): n is a, c, g, or t
  misc_feature (3016)..(3017): n is a, c, g, or t
  misc_feature (3092)..(3092): n is a, c, g, or t
  misc_feature (3096)..(3096): n is a, c, g, or t
  misc_feature (3104)..(3104): n is a, c, g, or t
  misc_feature (3138)..(3138): n is a, c, g, or t
  misc_feature (3161)..(3161): n is a, c, g, or t
  misc_feature (3182)..(3182): n is a, c, g, or t
  misc_feature (3191)..(3191): n is a, c, g, or t
  misc_feature (3203)..(3203): n is a, c, g, or t
  misc_feature (3218)..(3218): n is a, c, g, or t
  misc_feature (3236)..(3236): n is a, c, g, or t
  misc_feature (3239)..(3239): n is a, c, g, or t
  misc_feature (3266)..(3266): n is a, c, g, or t
  misc_feature (3278)..(3278): n is a, c, g, or t
  misc_feature (3284)..(3284): n is a, c, g, or t
  misc_feature (3293)..(3293): n is a, c, g, or t
  misc_feature (3308)..(3308): n is a, c, g, or t
  misc_feature (3335)..(3335): n is a, c, g, or t
  misc_feature (3357)..(3357): n is a, c, g, or t
  misc_feature (3359)..(3359): n is a, c, g, or t
  misc_feature (3367)..(3367): n is a, c, g, or t
  misc_feature (3373)..(3373): n is a, c, g, or t
  misc_feature (3376)..(3391): n is a, c, g, or t
  misc_feature (3394)..(3402): n is a, c, g, or t
  misc_feature (3406)..(3407): n is a, c, g, or t
  misc_feature (3409)..(3412): n is a, c, g, or t
  misc_feature (3414)..(3414): n is a, c, g, or t
  misc_feature (3417)..(3417): n is a, c, g, or t
  misc_feature (3419)..(3420): n is a, c, g, or t
  misc_feature (3422)..(3422): n is a, c, g, or t
  misc_feature (3427)..(3429): n is a, c, g, or t
  misc_feature (3432)..(3432): n is a, c, g, or t
  misc_feature (3435)..(3437): n is a, c, g, or t
  misc_feature (3440)..(3441): n is a, c, g, or t
  misc_feature (3443)..(3443): n is a, c, g, or t
  misc_feature (3445)..(3445): n is a, c, g, or t
  misc_feature (3447)..(3450): n is a, c, g, or t
  misc_feature (3453)..(3454): n is a, c, g, or t
  misc_feature (3456)..(3457): n is a, c, g, or t
  misc_feature (3459)..(3468): n is a, c, g, or t
  misc_feature (3470)..(3474): n is a, c, g, or t
  misc_feature (3476)..(3477): n is a, c, g, or t
  misc_feature (3479)..(3479): n is a, c, g, or t
  misc_feature (3481)..(3483): n is a, c, g, or t
  misc_feature (3485)..(3486): n is a, c, g, or t
  misc_feature (3488)..(3499): n is a, c, g, or t
  misc_feature (3501)..(3505): n is a, c, g, or t
  misc_feature (3507)..(3507): n is a, c, g, or t
  misc_feature (3509)..(3510): n is a, c, g, or t
  misc_feature (3512)..(3514): n is a, c, g, or t
  misc_feature (3516)..(3519): n is a, c, g, or t
  misc_feature (3521)..(3521): n is a, c, g, or t
  misc_feature (3525)..(3538): n is a, c, g, or t
  misc_feature (3540)..(3543): n is a, c, g, or t
  misc_feature (3545)..(3556): n is a, c, g, or t
  misc_feature (3559)..(3562): n is a, c, g, or t
  misc_feature (3564)..(3567): n is a, c, g, or t
  misc_feature (3569)..(3569): n is a, c, g, or t
  misc_feature (3571)..(3571): n is a, c, g, or t
  misc_feature (3573)..(3578): n is a, c, g, or t
  misc_feature (3580)..(3582): n is a, c, g, or t
  misc_feature (3584)..(3584): n is a, c, g, or t
  misc_feature (3586)..(3594): n is a, c, g, or t
  misc_feature (3596)..(3596): n is a, c, g, or t
  misc_feature (3600)..(3602): n is a, c, g, or t
  misc_feature (3604)..(3606): n is a, c, g, or t
  misc_feature (3608)..(3608): n is a, c, g, or t
  misc_feature (3610)..(3610): n is a, c, g, or t
  misc_feature (3612)..(3614): n is a, c, g, or t
  misc_feature (3617)..(3619): n is a, c, g, or t
  misc_feature (3621)..(3624): n is a, c, g, or t
  misc_feature (3627)..(3627): n is a, c, g, or t
  misc_feature (3629)..(3629): n is a, c, g, or t
  misc_feature (3631)..(3631): n is a, c, g, or t
  misc_feature (3636)..(3638): n is a, c, g, or t
  misc_feature (3640)..(3643): n is a, c, g, or t
  misc_feature (3645)..(3648): n is a, c, g, or t
  misc_feature (3650)..(3653): n is a, c, g, or t
  misc_feature (3658)..(3659): n is a, c, g, or t
  misc_feature (3661)..(3663): n is a, c, g, or t
  misc_feature (3666)..(3667): n is a, c, g, or t
  misc_feature (3670)..(3670): n is a, c, g, or t
  misc_feature (3672)..(3678): n is a, c, g, or t
  misc_feature (3682)..(3684): n is a, c, g, or t
  misc_feature (3686)..(3689): n is a, c, g, or t
  misc_feature (3692)..(3692): n is a, c, g, or t
  misc_feature (3694)..(3698): n is a, c, g, or t
  misc_feature (3700)..(3701): n is a, c, g, or t
  misc_feature (3703)..(3708): n is a, c, g, or t
  misc_feature (3710)..(3713): n is a, c, g, or t
  misc_feature (3715)..(3719): n is a, c, g, or t
  misc_feature (3721)..(3722): n is a, c, g, or t
  misc_feature (3726)..(3726): n is a, c, g, or t
  misc_feature (3728)..(3729): n is a, c, g, or t
  misc_feature (3731)..(3734): n is a, c, g, or t
  misc_feature (3737)..(3745): n is a, c, g, or t
  misc_feature (3747)..(3749): n is a, c, g, or t
  misc_feature (3751)..(3752): n is a, c, g, or t
  misc_feature (3754)..(3759): n is a, c, g, or t
  misc_feature (3762)..(3762): n is a, c, g, or t
atcagttgacaatattaaaaggtttgttgaagtattggtaaaagaaatagatatggtcgcatctggcgaaccaaccataaagcactttgcaacacataatgaagatgctgctggatatagcctcgtgcaattaatagaaacatcatcaattactggacattttgtagataagaatggtgactgttacattgatatctttagttgtaaatcctttgatattgaaactgcgaaatcagtagtcaataaatacttttcgcctaaacaaattaaagtgacttatttaacgaggcaagcctaatacttaaaaaatatttcaagcaaaaatttaactgtaaataatcagtttttttgacaaatcctgcctaaatacaagagatccaactagcattccaaatatactaaaagcaaaaccaataagttggggagggactatgaaactatcgccaaataggagctcaaggaatagccaagaaaagataccaaatatgatagccaataaagcgccatagtcatttgcttttttccagaagattccaaatattaagggagtaaaggctccaaccaacgttactttataagctgactccaccataccaaaaattgttagttctgaattaaatgcataaatcaatactgctattgcaaacacaattaatgattgtcgcattatcattaatttcttcttatcactgagtccaggaagatattcactaaggatattttcagtaaacataacagatggagctagtagtgtagcagctgtggtgctcattattgccgatataaccgcaccaaaaaaaattacttgtgcaaatattggagtgtattgcatgataaatatcggcaatatagtttcggagccgttagcagctatatttgcgctaaattgaggatttatgatagtggcagaataggcgataaacattggtagaaaagcaaaacagaaatatagcaaagcgcctataagcgaaccccataacgcaattttttgagtccttgcagaggtgattctttgataaacatcctgctgagttatagatccaagcatcatggtaataagactcccaataaaggaaagccataaccaaatactaccgtccggaaaaaaatttaatttaccatttatggatgctaaattgattacaggaataatgcctccagataattcaacaacaaaatatacagtaattatcaatccgataataatgactatcatttgcacaaggtcaataatagcaaccgaaaacatgcctccaagagttgtatatgataatacggcaatagtacctagaatcattcctaaggactctcctataaaaccatttgttataaccttaagaactaaaccaattgctgttatttgagctgctacccagcctaagtaagaaagaataataataagggtaataattacctcgatactacgattgtatctttttcgataaaacgtacttagcgttgaaaagttgaatttataaaggtatttagaaaaaatcacaccagcgataactaaacataaacttgcaccaaatggatcggcaactacaccacttaaaccttcgtcaatgaatgttgaagaaacaccaaagatggcttcagcaccaaaccaagttgcaaaaacagtagcaataacaacaggcaaagaaagacttcttccggcaacagcaaaatcatttgttgtctttactttccttgcagcaaagataccaatagcaatagtaataaagatatagatagaaactaataggaatagcattttgtttgtgctctaaaaaaaagctgagcctaataaggctagcaggctactgtatttgaggatggtttttttcattcttcccttaactgtatttaatctaatgaaagaattaaatgcttaccacaataataaataatttttaacaatatgcaaaacaaaaatttatatctaatatctaagttattcttagttaaaaggagaagtgggtagcaaatgccaaagtagtganntttgtagtgacntatgctgttttttagtgttatgantgagcnaacttgcagtgtttataagggatgtagagaaganaantggcgtccccaaggggattcgaacccctgttgccgccgtgaaagggcagtgtcctaggcctctagacgatggggacatccagaaggcgtaattctactatattttattaataaataaagaaaatttcatatataaattcacanaaaaataaatcntntttacctttnaattnctnattantatnnttnnnnnanntttnttttannanntnaaaatnaaaatanggagcntttnaannanatnanaaantaannaanttaaannnnaggtnagnaaattaaaannnttactnnaatnnnaaaaaancccattanaananaaantannntnnnannnnaanaaaatancntnnnanngnnnnnnngnagngcaggnnaaaannttnnttnnagnnnngatnnntttnnntnnggnnnccnnncnnnannccnnancnnatnnnaannntnnnttngnngnnnnanaanaanaannnnnnnnnaanggnntggnanntaannttncannncaaanngnttnnncnnnannntttnaaatanannacannnnnnnnnannnnantnncnagntanggnattgncctgnnccnnannnntttnatnnntnnngntnntancctngnnncnnnnctgtnggntnnannnaagnnngncnnnnnnnnngnntngnnnnnaaatttanntngnnnaantngnntgnnaagnnaaatnanntaancnaaaaanannnnnttngggngnggncnaacntnnntnnttnnancnnnnttnnagnnnncnnggnaaagntaantnantnnanngnnnntnnnnnnaaanttantnnnnccnncnntnangnntttaaaataaannnnnnnnngattagnnnngcnnttnnnnnnnnnancannngnntnnttncgnntnnnggaaannantnnnggggnnnanacnatncnntnnnggangnnaatgatgttgttgaaaaggtaaataaagaccgaggttttcaagtaggaattcatattgatgcagcgtctggtggntttnttgccccntttcaagaagaacttcctggctgggactttagantgaaaaatgtattatccatctcngcaagcgggcataaatttggngaatcctgnattgggacaggntgggtagtatggcgncagcgtgaaaatttaagngancatgtagctatatcagtcagttacttnggtggaatgggngaatcntataacctnaatttttcaaggccngcaagtgggatttatgttcaatactanaagtttttaaggtatgggattncnggctatcnaaaaanttnnnnnnnnnnnnnnnnccnnnnnnnnnaaannannnnanggntnngnaaaannnaanttnnnggnnangncnnnnttnncnntnnnnnnnnnngnnnnnannantnnntnncnnnnnnnnnnnncnnnnntnanncnnnannnnantttnnnnnnnnnnnnnntnnnntnnnnnnnnnnnnttnnnnannnnantngnnnnnnannngntnnnnnnnnnantttnnngnnncnantnnnaannnannnnaancnanttttnnngnnnnannnngnnnnaaaannannnttnngantnnnnnnnaaannnannnnaantnnnnnanngnnnnnnannnnannnnntnntttngnnannnnttnnnnnnnnntnnntnnannnnnnttnaaaaataaggccaatggtgccttaaagggaatgcatagaaaaaagaatttattctcaaaacactgttaatcaaattcttatttaattcttgtaataagaataattcttatttaaactagcagcgcaaattattatatttttttaatcacaggagtttaaatgaaatttacaaaattagtattagctatagcacttccatttacgatgatttctcaatcgcttgcatgcgagaataaag

SEQ ID NO: 565 - DNA, 4000 bp, Escherichia coli
  misc_feature (1949)..(1949): n is a, c, g, or t
  misc_feature (1953)..(1953): n is a, c, g, or t
  misc_feature (1965)..(1965): n is a, c, g, or t
  misc_feature (1969)..(1969): n is a, c, g, or t
  misc_feature (1981)..(1981): n is a, c, g, or t
  misc_feature (1986)..(1986): n is a, c, g, or t
  misc_feature (1988)..(1988): n is a, c, g, or t
  misc_feature (2011)..(2011): n is a, c, g, or t
  misc_feature (3108)..(3108): n is a, c, g, or t
  misc_feature (3112)..(3112): n is a, c, g, or t
  misc_feature (3145)..(3145): n is a, c, g, or t
  misc_feature (3148)..(3148): n is a, c, g, or t
  misc_feature (3154)..(3154): n is a, c, g, or t
  misc_feature (3164)..(3164): n is a, c, g, or t
  misc_feature (3170)..(3170): n is a, c, g, or t
  misc_feature (3173)..(3173): n is a, c, g, or t
  misc_feature (3182)..(3183): n is a, c, g, or t
  misc_feature (3187)..(3188): n is a, c, g, or t
  misc_feature (3190)..(3190): n is a, c, g, or t
  misc_feature (3195)..(3195): n is a, c, g, or t
  misc_feature (3203)..(3204): n is a, c, g, or t
  misc_feature (3208)..(3208): n is a, c, g, or t
  misc_feature (3210)..(3210): n is a, c, g, or t
  misc_feature (3214)..(3214): n is a, c, g, or t
  misc_feature (3228)..(3228): n is a, c, g, or t
  misc_feature (3230)..(3230): n is a, c, g, or t
  misc_feature (3232)..(3232): n is a, c, g, or t
  misc_feature (3236)..(3237): n is a, c, g, or t
  misc_feature (3251)..(3252): n is a, c, g, or t
  misc_feature (3257)..(3258): n is a, c, g, or t
  misc_feature (3262)..(3264): n is a, c, g, or t
  misc_feature (3268)..(3269): n is a, c, g, or t
  misc_feature (3274)..(3275): n is a, c, g, or t
  misc_feature (3277)..(3277): n is a, c, g, or t
  misc_feature (3280)..(3281): n is a, c, g, or t
  misc_feature (3284)..(3286): n is a, c, g, or t
  misc_feature (3288)..(3289): n is a, c, g, or t
  misc_feature (3292)..(3292): n is a, c, g, or t
  misc_feature (3296)..(3296): n is a, c, g, or t
  misc_feature (3304)..(3304): n is a, c, g, or t
  misc_feature (3309)..(3310): n is a, c, g, or t
  misc_feature (3317)..(3318): n is a, c, g, or t
  misc_feature (3322)..(3323): n is a, c, g, or t
  misc_feature (3325)..(3325): n is a, c, g, or t
  misc_feature (3332)..(3332): n is a, c, g, or t
  misc_feature (3339)..(3340): n is a, c, g, or t
  misc_feature (3345)..(3346): n is a, c, g, or t
  misc_feature (3360)..(3360): n is a, c, g, or t
  misc_feature (3365)..(3365): n is a, c, g, or t
  misc_feature (3367)..(3367): n is a, c, g, or t
  misc_feature (3371)..(3371): n is a, c, g, or t
  misc_feature (3373)..(3373): n is a, c, g, or t
  misc_feature (3379)..(3379): n is a, c, g, or t
  misc_feature (3383)..(3383): n is a, c, g, or t
  misc_feature (3392)..(3393): n is a, c, g, or t
  misc_feature (3396)..(3396): n is a, c, g, or t
  misc_feature (3400)..(3401): n is a, c, g, or t
  misc_feature (3406)..(3406): n is a, c, g, or t
  misc_feature (3409)..(3412): n is a, c, g, or t
  misc_feature (3418)..(3418): n is a, c, g, or t
  misc_feature (3423)..(3423): n is a, c, g, or t
  misc_feature (3426)..(3426): n is a, c, g, or t
  misc_feature (3438)..(3438): n is a, c, g, or t
  misc_feature (3441)..(3442): n is a, c, g, or t
  misc_feature (3448)..(3448): n is a, c, g, or t
  misc_feature (3454)..(3455): n is a, c, g, or t
  misc_feature (3459)..(3459): n is a, c, g, or t
  misc_feature (3463)..(3463): n is a, c, g, or t
  misc_feature (3465)..(3465): n is a, c, g, or t
  misc_feature (3467)..(3467): n is a, c, g, or t
  misc_feature (3478)..(3478): n is a, c, g, or t
  misc_feature (3481)..(3481): n is a, c, g, or t
  misc_feature (3483)..(3483): n is a, c, g, or t
  misc_feature (3491)..(3491): n is a, c, g, or t
  misc_feature (3493)..(3493): n is a, c, g, or t
  misc_feature (3495)..(3495): n is a, c, g, or t
  misc_feature (3499)..(3499): n is a, c, g, or t
  misc_feature (3501)..(3501): n is a, c, g, or t
  misc_feature (3505)..(3505): n is a, c, g, or t
  misc_feature (3507)..(3507): n is a, c, g, or t
  misc_feature (3509)..(3509): n is a, c, g, or t
  misc_feature (3513)..(3513): n is a, c, g, or t
  misc_feature (3515)..(3515): n is a, c, g, or t
  misc_feature (3522)..(3523): n is a, c, g, or t
  misc_feature (3527)..(3527): n is a, c, g, or t
  misc_feature (3531)..(3531): n is a, c, g, or t
  misc_feature (3533)..(3534): n is a, c, g, or t
  misc_feature (3537)..(3537): n is a, c, g, or t
  misc_feature (3539)..(3539): n is a, c, g, or t
  misc_feature (3541)..(3542): n is a, c, g, or t
  misc_feature (3547)..(3548): n is a, c, g, or t
  misc_feature (3551)..(3553): n is a, c, g, or t
  misc_feature (3561)..(3561): n is a, c, g, or t
  misc_feature (3569)..(3569): n is a, c, g, or t
  misc_feature (3572)..(3572): n is a, c, g, or t
  misc_feature (3577)..(3577): n is a, c, g, or t
  misc_feature (3579)..(3579): n is a, c, g, or t
  misc_feature (3588)..(3588): n is a, c, g, or t
  misc_feature (3591)..(3593): n is a, c, g, or t
  misc_feature (3604)..(3604): n is a, c, g, or t
  misc_feature (3610)..(3610): n is a, c, g, or t
  misc_feature (3618)..(3618): n is a, c, g, or t
  misc_feature (3621)..(3624): n is a, c, g, or t
  misc_feature (3628)..(3630): n is a, c, g, or t
  misc_feature (3632)..(3633): n is a, c, g, or t
  misc_feature (3640)..(3640): n is a, c, g, or t
  misc_feature (3643)..(3643): n is a, c, g, or t
  misc_feature (3646)..(3646): n is a, c, g, or t
  misc_feature (3648)..(3648): n is a, c, g, or t
  misc_feature (3650)..(3650): n is a, c, g, or t
  misc_feature (3659)..(3662): n is a, c, g, or t
  misc_feature (3665)..(3665): n is a, c, g, or t
  misc_feature (3671)..(3671): n is a, c, g, or t
  misc_feature (3690)..(3690): n is a, c, g, or t
  misc_feature (3692)..(3692): n is a, c, g, or t
  misc_feature (3698)..(3698): n is a, c, g, or t
  misc_feature (3712)..(3712): n is a, c, g, or t
  misc_feature (3715)..(3715): n is a, c, g, or t
  misc_feature (3721)..(3721): n is a, c, g, or t
  misc_feature (3730)..(3730): n is a, c, g, or t
  misc_feature (3732)..(3732): n is a, c, g, or t
  misc_feature (3735)..(3735): n is a, c, g, or t
  misc_feature (3737)..(3737): n is a, c, g, or t
  misc_feature (3739)..(3739): n is a, c, g, or t
  misc_feature (3750)..(3750): n is a, c, g, or t
  misc_feature (3758)..(3758): n is a, c, g, or t
  misc_feature (3760)..(3760): n is a, c, g, or t
  misc_feature (3763)..(3764): n is a, c, g, or t
  misc_feature (3768)..(3768): n is a, c, g, or t
  misc_feature (3770)..(3770): n is a, c, g, or t
  misc_feature (3773)..(3774): n is a, c, g, or t
  misc_feature (3777)..(3779): n is a, c, g, or t
  misc_feature (3784)..(3784): n is a, c, g, or t
  misc_feature (3789)..(3792): n is a, c, g, or t
  misc_feature (3796)..(3796): n is a, c, g, or t
  misc_feature (3798)..(3798): n is a, c, g, or t
  misc_feature (3803)..(3803): n is a, c, g, or t
  misc_feature (3808)..(3808): n is a, c, g, or t
  misc_feature (3810)..(3810): n is a, c, g, or t
  misc_feature (3813)..(3815): n is a, c, g, or t
  misc_feature (3818)..(3818): n is a, c, g, or t
  misc_feature (3823)..(3823): n is a, c, g, or t
  misc_feature (3826)..(3827): n is a, c, g, or t
  misc_feature (3829)..(3829): n is a, c, g, or t
  misc_feature (3831)..(3831): n is a, c, g, or t
  misc_feature (3835)..(3835): n is a, c, g, or t
  misc_feature (3839)..(3839): n is a, c, g, or t
  misc_feature (3841)..(3841): n is a, c, g, or t
  misc_feature (3844)..(3844): n is a, c, g, or t
  misc_feature (3847)..(3847): n is a, c, g, or t
  misc_feature (3851)..(3853): n is a, c, g, or t
  misc_feature (3855)..(3855): n is a, c, g, or t
  misc_feature (3857)..(3857): n is a, c, g, or t
  misc_feature (3859)..(3859): n is a, c, g, or t
  misc_feature (3863)..(3864): n is a, c, g, or t
  misc_feature (3866)..(3866): n is a, c, g, or t
  misc_feature (3871)..(3871): n is a, c, g, or t
  misc_feature (3876)..(3876): n is a, c, g, or t
  misc_feature (3882)..(3883): n is a, c, g, or t
  misc_feature (3893)..(3893): n is a, c, g, or t
  misc_feature (3897)..(3897): n is a, c, g, or t
  misc_feature (3908)..(3908): n is a, c, g, or t
  misc_feature (3912)..(3912): n is a, c, g, or t
  misc_feature (3922)..(3924): n is a, c, g, or t
  misc_feature (3926)..(3928): n is a, c, g, or t
  misc_feature (3935)..(3935): n is a, c, g, or t
  misc_feature (3939)..(3939): n is a, c, g, or t
  misc_feature (3947)..(3947): n is a, c, g, or t
  misc_feature (3950)..(3950): n is a, c, g, or t
  misc_feature (3952)..(3952): n is a, c, g, or t
  misc_feature (3961)..(3961): n is a, c, g, or t
  misc_feature (3975)..(3975): n is a, c, g, or t
  misc_feature (3977)..(3977): n is a, c, g, or t
  misc_feature (3980)..(3980): n is a, c, g, or t
  misc_feature (3983)..(3983): n is a, c, g, or t
  misc_feature (3985)..(3985): n is a, c, g, or t
  misc_feature (3992)..(3992): n is a, c, g, or t
  misc_feature (3994)..(3994): n is a, c, g, or t
  misc_feature (3999)..(4000): n is a, c, g, or t
atttaagatttttaacagaagatgctgattttgctctagatgttatagatctttgtgttaccgttcttttgtggatagtattcttttttgtttttgaaaaagatagtaatttttttgtagcaagtaatcctaaattattattatcattatttatattggaagaggtattattacttgttgtcatttcatttgtatatttatttttatctttaagactttcatcattatttccatctccatttctattttcattatcattatcattatcattttcatttttattttcattgtcatttttatttttactttcatttttattttcattttcatattcgttttctaaattattactgccattattaaaatcattaatatcattttcataattaaattcatcaaattctgtactattttcgtcataatacttcatatcttcagtattaaaattaaatccattattattaatcatttctatattattttctgtattaggcatatttatataactaatcatggtatctgtatataaattattattaataataatattattatagatattatataattattattactattactattattatagattttatatcattaaaattattattttcatcgattattattattattattattattattattattattattattattattattattatagccattataattactactattattattactattattattactattgttattatgcttattattgataaatttgttatttttaatttagattcaacagtaattctatctaattcataatcatccttatatattgtatttttttttatatcattattatctacaataaagaaatataccttttttaaaattgatatcattattgatttcacttttatatgttttttcttttccttttttattaatttcgtctttaattttttttcctttcaaacaatagaaaaaaaaagaaaaaaagggttgttattataaatgaattattataggtttaaatcattaatattagaatttcatttttttttgaataattttgaatatttttttttaaaatttaatgttatatatttatgtaaatctcttacttttattcaatgtgtcatcaatttgttttttcgtttcttctagtgaacatatattatttttttcatttatttcaattttattttcgacgtcattgaaaatatctgagttatttgaattttccactgtaatttttttatatcaaaaatttattattataatatattaaaaaattgattgaaagatgtaaatttggaaattttaattttttttttttttttattttttaattattaattaatatgttttaatataatcttatctttatttaataaatagtataatataaattttaaatatattcaaaattaatacaaaagcaacatacattccctatttctgtatttgttgtctttattatataaatttaatgaatatttattattatagtaaacattgcttccaactttaattgaagataatgtttcatcatgagatttatttcttttaatataattatttattttattttcactatctttatatatcatattattatattgatatagcacatctgatttagtaaaattatctaacttagaataaaaatttcggtgaaatgatttcattctaatattttgtttctctacattcaatttaaatacagatgagtatttgtcattattctttttcttcaaggaagtattttctttttctttatattcctttatttcattcgtttctttggtatctctaatatctttttcatatttatttttataatcatcaagacataaattaataatactactattcatactactatttctacttttatcttctaatttactaatattgcttccactacttgaattattatcattttcactgttttttttttttttttnaatnaaattaaaaatnattnaaataaaaaaanaaaanantattatattaaaatcaataaaanattttatttaaaaataaaaaaaaaaaatagaataaaataaaataaaaagtaatatatgataatatataaaaaagtccaacctatttaaactgttattactatgttgatatttaatattgacattttcattactattatttagggtacttaaattactattacttcttttcattttactatttgacattgattttaaaatctttgtataatttatatttccatgtttttcaaaatcatatggatttcttcttgtaaatttatgaaattcatatttctttttcgtatttattaacgatatatttttttccaataaatacattgaatctctttttagagtataaaataataataaaaaaaaaattgaattataattatgtatattgatttatataatattaattattaaatataaatattaaaaagtaaaaaattatatataaatatatattatatatatattaaatattatatcgtaaaattactcagtgaaaaaaaatattatatgattatttatgattattcattcattgaaatatatacctaatactttttgaatttaattgattatccaataaactgtaattattattattattattattgtagttgttgttgttgttgctattatatgaaatattgttctcactattgtattcagttttttgggcaagaattggtataaaagacagggaatttttattattattattataaccatctgatatttttttaggtaataatgaacttagtgaattatttttatttttaagtattttatatttatcctctatgatttcaatttctgtaggtggttgaattttttcttgcattaaagataatgcttcataattttctttcagttgtttatgatataaattaagagcaatagtatatttatttactgatgatgaatcttaatattattatttaatgtatatggaaatgtattcatataattattaaaatataaaaataaatattacacacacatacacacacatatatatataatattatataaatagataaatagataaatattaaattattaatgttcattgattctattttttatttttcttttttttttttttttntaanaattttaacaacttaaatatttatatacttttnttntttttntttccttttntttttnttntttttttannattnntntttgnattttcanntttntntttnaaaaatatattttnanantatnntttcttttcatttnnatttnntttnnntttnnttttnntnttnnttnnntnnctntatnaaaattantatannaaaaaannatannanaaatatngcatatnnatatnnatgatttttttttntcatntnatantnaataanttanttttatacnnatnttcnnatatnttnnnntttttnatatntantaaaaaattatnttnnctttcnatattnnaatnattnananttattatattnttntntagatttntntntttntntttntntntttntnttttttnntctntatntnnttnantnnataannatnnntatatatntttttaanttnattanantatatatanctnnntatattatttnattttnatttttanaannnntaannnanncttaatnttntantntnagtaattannnnaanaaatanaaaaattatatatatatananatatanaaatattatatttnaanttttanaatataatntntananantttataaaaantttataantnatnntttntnatnnatnnnttttnattannnntatntnataanttttnantannnatntattnttnntntnattnttantnttnttntttnnnantntntttnntnatatnttaantattannataaatatanaaanaaaaataaganttanaattataaannntnnnattatanatanaatataantanantataaatanaatttttaaaaaananagnatntnaaatttnantaaann

SEQ ID NO: 566 - DNA, 4000 bp, Escherichia coli
  misc_feature (1982)..(1982): n is a, c, g, or t
  misc_feature (1989)..(1989): n is a, c, g, or t
  misc_feature (1992)..(1992): n is a, c, g, or t
cttttattaataaaaatcggaaaattctaaattaaagttaacattaatttattttataatttaaagctttttttttttttttactaaataattattggataatacataatagatttaatttaaaaaatatatatatgtatttttatattactaataataataaaaaaaaagaaatcaaaacaattaataaataaatatattgaaggcattgcaaatattgtatttttaataataattatatatataattatgtaattttttttatttaaaaaatcgaaagttataggtgacttaattcctgaatttaataaaaaacttatagtcttaataatagtaataaaataaaataaaataaatagtagaatatgaatataaagtacagattgaatagaataaaataaaataaatagtagaatatgaatataaagtacagattgaatagaataaaataaaataaatagttaaaacatgaatataaagtacttgaataaaataaaataaaataaaataaaataatatttattatttttttttattgtaatataaatttagataatttaaacatttcacatgataatcaagatttggaaaaaatgtgtcaattatttatatttatgttatttgttaatttttcaagtttttattaatttgatataattaagataattcttattatgattttaaagtaaagtaatatttgcattaatgatatttaatattatttacaatatttcaattaatctttaattataatatttataaatagtcatttaatattatatgccaaactaataaaggtaattttttattatattaaaaaattatataaaaaaatttaaataaaatcatattatttaaagaaaaaagttttaaagaaaaaaatacatatatttttattaaatatttaataaattaaaaagcaaacctaaattttcatttaacaatgaaaaaagaagaaactactcactaatatattttacaataaaataagaaaccgtacaaatcagaaattaataaatagtatattatatttgaattattttcaactttatatgttttttttttttttttttttaacataatcaataataatatattactcaaacatggcaaaataaataataaataaacaatagcagataaaacattaaatatattaaaaaataaactaatcaaaatgtaatattcttttttaatgtttcctttatttccttttatgatgaatttttacttaattcttatatatttaaatttcattttaaaaatagtaataaaaaaaatatattataaaaattttaataaaaaaaaattttttttttgattttttaaaaatgttaaaaaagttttttattttttttggatttattaagttaataataactataataagtaataaaatgtagatgctaattccttttcattaaatacttaataaatataattaaataaaggaaaaaaagataaaataatatatgaaagtataatatataacttataattaaaaatataatattatcatcatatagtataaataaattttttatttgctgctatttttatattattatttttaaaaaaaatattattaaataggaaagaaataatatatatatgaataaatttttttaaataagtatttatttgtttaaaatatatgaaataaaagttacaaattgaaaagaaaaatgtcaaggaatatatctcaggcaccagataggccgtatgattatttatatggttaataatgaaagaattaaaaataaaattattaaattttttttattgtataattaattaataattttaatatatttttatatataatatatatatttttttaattgtttaacaatacaattagatccgaactatacagtatcatgctataaagatcataccaaagctttagcaagagctcaaatgcatgatgttgtacgtaaaattaataatattaaaaatttttattagtattttttttaaanaatgaanatnaaaaaaaaaaaaaaaaagaattaaataaattactaactgtctattttcaaataaattattttgataaatttatgatttttttcaaatttttatttctttgtaattataataaaataataataaataataaataataaataaataaataaataataaataaataaataaataaataaataataataataataataattttcatccgaatatgaaaaaagtcaattattccagttttcaaaaatcttttttcatcattagcacattatcctcctggttattatgttattaaaccacaatcgttaccaaaagatatggggaataataggttaatttttcataaagatccgcaagtaacaggtgtcaatcgttataaatattttagaagacctataataccctatgttgaaagtatgggtggtcaagttgtatatttaaaaaataaagatgattccaataataaatataaaaataaagatgatgatgtgaacaatactaatgattcggatcaagagaataatatcccaaaatccagaacaataggaatacaaactctttatcggtataacttaattattactatatatatataaaatattaattataatattgcctaaaaattatatttttctgatatatttttattttgtattattattatgaaaaataatacaaaataaaaatatataactaattcatttattcattattttaattattttaattaattcaattaaaaattttttctcgaaatcatttataattttcttttttttttttttaaaaaaaaaaataatagtgaaaatgaaactcaaactgatccatattcaccagaatatatcattaaacctggttcgtcaccaccagaaatattggcattagcaaccttaacttatggagcaggtttacctgtcggacaggcagagattgaaatgatagaaagagccagattgaagagagcatgggaagcatccttaccaaaagttgtagataaaaaatcttatcaaaaaagattaaaaatgatggaagccatggaattacaagaatggaaagaaagagaagaagaaatagaaaggttatttagaaataattaaaataaatttaaaatataaataataataataattatatatatattgacatttacgttatactaataaattaatatatttatttaaaatattattgtgatatttcaaaattatcataaaaatacaatattatatataaatgaaatataaaataaatttaatatattaaaataaattaaataaaagattacagaatgaaagattaaagattttaactcaagttattcaaaaaagagaagaagaaaacgaaaaatacaacaacgagcgattagccaaaatatggcaaaaaaaattacaagaaaaaaaggtgttacaagaaaaattacaaagaaaaatggtcaaatgtaattgaattaatttttaattaaaattaataaatatatattcatagatacataatattaattatataaatattataaatatatgaatataattatataacaattattttaatccttttttttacataaatatataattttttaaaaaatatacaatgaataaaagctgtaagaatgcttacaaataaaagaaaaacaataaataagaaaatagaatcaagagacataattaatgagtataataattatggatctagggtaattatatattttaaatatatcaaaatttaataaaaaaaggattataaaaaataattataaataatttgtacacttaacaataataaataaaggtttatgcaccagtagcaagagaaggaaaattgtatgaggaatctcaaaaaatattagaagaacaaaagcaaaacattgaaacaaaaaattttagaggtaaatatattattatcaattaaaaaaaaaaataaaataatatattgcaaaaacttttaattatataaatataattaaaactaaaaagcttaaacgtaaaataaaatgaaataaaaatgatattta

SEQ ID NO: 567 - DNA, 4000 bp, Escherichia coli
  misc_feature (6)..(6): n is a, c, g, or t
  misc_feature (57)..(57): n is a, c, g, or t
  misc_feature (60)..(60): n is a, c, g, or t
  misc_feature (144)..(144): n is a, c, g, or t
  misc_feature (219)..(219): n is a, c, g, or t
  misc_feature (249)..(249): n is a, c, g, or t
  misc_feature (324)..(324): n is a, c, g, or t
  misc_feature (339)..(339): n is a, c, g, or t
  misc_feature (373)..(373): n is a, c, g, or t
  misc_feature (381)..(382): n is a, c, g, or t
  misc_feature (389)..(389): n is a, c, g, or t
  misc_feature (396)..(396): n is a, c, g, or t
  misc_feature (398)..(398): n is a, c, g, or t
  misc_feature (406)..(406): n is a, c, g, or t
  misc_feature (455)..(455): n is a, c, g, or t
  misc_feature (476)..(476): n is a, c, g, or t
  misc_feature (486)..(488): n is a, c, g, or t
  misc_feature (544)..(544): n is a, c, g, or t
  misc_feature (561)..(561): n is a, c, g, or t
  misc_feature (635)..(635): n is a, c, g, or t
  misc_feature (637)..(637): n is a, c, g, or t
  misc_feature (671)..(671): n is a, c, g, or t
  misc_feature (673)..(673): n is a, c, g, or t
  misc_feature (754)..(757): n is a, c, g, or t
  misc_feature (772)..(772): n is a, c, g, or t
  misc_feature (814)..(814): n is a, c, g, or t
  misc_feature (829)..(829): n is a, c, g, or t
  misc_feature (840)..(840): n is a, c, g, or t
  misc_feature (875)..(875): n is a, c, g, or t
  misc_feature (877)..(877): n is a, c, g, or t
  misc_feature (886)..(886): n is a, c, g, or t
  misc_feature (910)..(910): n is a, c, g, or t
  misc_feature (1922)..(1922): n is a, c, g, or t
  misc_feature (1976)..(1976): n is a, c, g, or t
  misc_feature (1988)..(1988): n is a, c, g, or t
  misc_feature (1992)..(1993): n is a, c, g, or t
  misc_feature (2003)..(2003): n is a, c, g, or t
  misc_feature (2259)..(2259): n is a, c, g, or t
acaccnaccttgccacttcttgttgccgatactgctcgccttaccgctggctgaatnacntcaataactggaatctgatatctctctctggcatctcgcaacattgcagcacttgctgtattacatgcaatcacaattgctttnactccagctgcaactaattgatccataatctccagcgcgtaggttctaacttgcgccaatgggcgaactccatanggaccgcgggcggtatcgcctaaataaagnattgactcacctggcagttgatcaatgattgccctagctaccgttaacccaccgacgcctgagtcaaagattccnataggggcgctcttntttggtatttcagaggtggccatttgtgtaagtntaaatggnnagccttnatatccncntgcacatnctttgccccgcataaatgtccgatttgcccatttttggcataaaaattncttaaaaattcgggtgaaatnagggtggatnnncttgctggactggcaagtaacagccaccctatacctaggcagttggtcgtagcttncatatggggttacgaanaattgctcgcttatgcccaaaagggtgtgagcaacctaaatgcctatggaggcttatttagatgaactcaatcncnctatctgcagatcagttcgggattgtatacaacntnctttcatttggacttgtatcaatgcttgcctgcactatctacacattagtttcacaatcacgtgtactacctaaataccgnnnngctctagttatgtcntcaatggttacattcattgcggcataccactacatgagaatnttcaattcatttgangattcatttgntgatggcgctgtaaaggttggaacaggacacggancnttcaacganggttaccgatatgttgactggatnctgacagtacctctactacttgttgaggtagtagcagttcttgctcttgctaaggcagcggcttcttcattaatcacccgcttagttccagcatcagcagcaatgatcgcacttggttacccaggtgagatttcaactgacaacaacaccaaagttctttggggtgttctttcaacaatacctttcctatacatcttgtatgtattgttcgtagagctttcaaagtctctagatcgtcaaccagcaggagttgcagcaaccgttggtcgcttgcgcttgcttttgatcgcaacttggggcgtttatccaatcgcatacttgcttccaatcttgggacaagacgctttggacccagctgcatttgttaatcgtcaaatcggttacacgattgctgacgttttggcgaagtgcgtatttggtctaacaatcctaaagattgcaaggatgaaatccgtagcagagggaatgaaggaagatcactaattagttgatctaatttagaagcggggccaagaaattggccccgctttttttattctaaaggtggctaattaggctctcttgaatcccacccagccagtaataaaccgcatgtagatgcttttgtggatcagagtccttcattaattcatacttctcaaatccatcctgaccaatatctaacctaacggcaagtgctattcgcaaatcattaatcgcaatcagccactgagttggatcagttactgcaatatctgccttaggtaattcatggtcgactggaaaaactagttgttcgcgcagataaagcagatgcttttgcttaaccattcgaagtgagccttcggtgtatttacgaaactcagcagcgctctcaggatcggcgtaggcattgggcaataatcttttcaaaactggatcttctggttgatcaattggtgattcaatatttccaaaagttgctgccataagttgagcaaagggatcatctgattgatagtggtgggtgaaattacgctcacctaatagttcnaataattgctcaactaaattaatgagaatgtgtaactcatcattgcttaacgcnactgataaatcnttannggcggcagancctttaaactcgcccatgatcatccctttgtaatgtggcccataagccatgttcatgtaattgctggactgctcgttccatctcttcacgtgtgccagatgccaccaccgctttaccttcagtgtgaacctgcatcattaatttatgtgctttctcttttgaaaagccaaaaagtttgataaaaacataagttacataattcattaaattaactgggtcatcccacacaattgccacccaaagattgtcgaaaaanttacttaaatctaaagtctcttcaacttgggtttgagaactcatggcctaattatctaactaaaacagttatctcatcactaataccggcggtatttttgctgccagctgtaataactacctggtaggtagcaagaccaggctctgtgactttggtattaaaggtgaataggccactggcatcagttgtgaattcaccgatcgacttaccgccttgcttcacagttaacttgatatcagaactttttggcgatacctgaccaacaacagcataagttgtattaactttaagcgaagccggtagatctaaccttacttttggaataactgaaatagttttttctaaagtctttccttctgatctttcccaactgccttcagaaactaatctgatttcacttttttgtcccacgattaccggtactgcaattacgccagcggcatcagtgactccagcagctaaagtacgccaactgttatctgaactgtttttgatttcaaatctaacatttagagatggaactggagtcttatcaggtagtttgaaagtgccagttaagttaaaggtggagccgtaggcgatctgctctaaatctgttgcaattgtgccaataacttgatctggtgcaatagattttgcaatatctctaaccgcagtaattgctgcagtattttccataccaaaggtccaaacagcaattccgcctagtcgatatttaccaactaaattggttctagctgcataacttttctcatctggaaaccagaccgttctagttgctgtgcaaaagctggctgagtttgttgggtctacataagattttttgtaggtaaaggttgattcggcgtgagttgggttataagtaatcgctgcattatttgttgtagctagtgtcaccgcttcgcgcataacaaccgcagcttttgcaccaactacaactgaggttgcaaaatcttttggacaaacgccttcaacttttgtaatccaatctcggccatagcctggtattccaagaaatacttttgaagctggcatctgtgttgctgcatacttaacagcatcttcactccatggaagtggaccaattggaccaggatttactgttgaaaagtcataagccataattcgaaggcgatcaatgtggggtccaatttctgcccaagaaaaaacccagttaccagctcgtttagtttctggcgcaaaatctggcggggttgttaccgataataattttccttgttcatgcaaggcagtagataactcttttataaaagcaatccaatttggttttgttgttggccaagatgatctgccatcttgggtataaaagacttcaaaatctaggtcgataccatcgtagttatatttaagtactaacgactttattgtttgaacaatattggtacgtgatgttggatttgcaagtaagttagccaggactaacttttttgtatcatctgtaatggtgggaagtaaaagtaatccattggcttttaacctagcaattaccgcttctttagaagttgtgtacctacctaaggcatatttatccttaatatttgtttcaccagttaagccataccaaaatggtgagatatccctgattaaatctaaattaccttcaactgttggcagattacgagccagtgaataatctggtagccagccagacaatattcttcgcggtgggttatcggcattggccggagttaatgttgagagcgtaaatgagaaggcaact

SEQ ID NO: 568 - DNA, 4000 bp, Escherichia coli
  misc_feature (1486)..(1486): n is a, c, g, or t
  misc_feature (2508)..(2508): n is a, c, g, or t
  misc_feature (2511)..(2511): n is a, c, g, or t
  misc_feature (3226)..(3226): n is a, c, g, or t
  misc_feature (3709)..(3709): n is a, c, g, or t
tcctctaccgttacacgaccacccgtcttcgcttgtttaactttagcagcagcatcttctggtggctctgttagcgctatataactctcaggcacacttgatgacatcttaccgccggtcagcccctgcatgaaccggtgataaatagcagcaggcaggaagaagccataacctccgtattccagctccactgctcgcactatttcctctaccccgtgcatgtatgcatctatgttactctcggtaacaggagtgacaggagcgtgtatatatacatccatgtgcatttcgtgcatctcatacttcttgaggctgggatacttctcttctatcctctttgctatctcttccaccgctccaggcttcgtacgcttcacccttatgcttatatacggcttgcactccttagcagtatatcgcttctccacacggaacatgcgcatccgtgcagctatatcccttgtcaatcttatatgggggtcctgatcaacgccaacaggaataactaccggctttggaccgccatactcaaccagctgtggctgcaatatgtccgcattctgtaccagcacgcttatcatgtgtgagatgttcacatcgcctgagaatccgtatatcgcactcaactcactgaagtttacttcctttcctaactcaaaagcgaggtcctgcaatttcttattactggactggaaatatatgtgaccacgctctatatcgaaacccagtgctatgagacttactatatattcattcacacctatctcgtggcatttatcccatgagagaccacgaaccgagtgcgattccatatccgcaatacatgcgaacgcttccccacccatccgctggtgccagataatctcgtccatcaccatcttaccaccgagatgaacacgaccagagggcatgaaaccactcatcactgcgaacttgccctttgcctccatcgctcttagcacgtcctcataaccccgatgccccatgatgatacctcttctcatgtacagatgcggcttctctattcgcttcagaagcggtccaaacctggatatgccaaattcatcgaataatcgcttgtaatccttctcctttatatctgtaacaccccaggggtctatctcttttacacgcatcgctttgctctaccccaatatgtttatctcatactcctgaataacgggattggcaaggagtctcttacacatctcttctacctcgtgcctcaccctttccacgtctccatccttattaccatccccatcttctacttttacatctattataaacgtcttaattgttctcactgccaccacattcgtgaatcctaatagatttaatgccttcttcgtattctctccttccgggtccgcaactccatgcttcagtcttatctttacctctacttccatatctattactatttattgtggctttatatcattggctacttactataattaattatgagcatgagcagtgctantgggacggaagcggaagaaaaagtggaacactacctcaaattgaacaataaatacctcaatgaagcagaggagctgataaagaggaaggattacgttcaagcacaaccatttaaaaaagcgttgacggaaaaagcttcgctgaagctatggggtgctgcgaagaggggcatcgagataaaatctcatggcgaacggtacaaattcgtagcgaagctgaaaacagaacctggagatccagaactgtcgaggttatttgggctcgctggtgcttcgcatcagaatttctacgcgaactggttaccttccgaagttgtaattgactacgcagaagcggagaaggaacttgtagcaaagctcgagaggattctataaaacacttttatgttgaggagagatgcaagcaacttatagcgcagcgggcgtagatacagcccaggagaaagttggtttagcacaattactgacgtatatacgtaaaacgagagagttcaggcgaggcgggggtatcggtgcacagaagctggatataggctattttgcaaatgtgattgatatagggcatgatatgggaatggcaatctcaactgacggcgtcggcaccaagatactggttgcacaaatgatgaataaatacgagactgtagggattgactgtgttgcaatgaacgttaatgatatactatgtgtaggtgctgagcctctttccatgctcgattatatcgcagttcgtgcacccaatccgcgtttacttggggaaataggtaaagggctactaaaaggtgctgaaatcgcacgaataaatatcgcaggtggcgagctcgcacaactgcgagacatgttatctggggtgcgaacggactatgaatttgacctggtaggtactgcaatagggatagtgccccttaaccatctgatcactggggcgaatataagagaacacgacgttattattggactgagaagcagtggcatacacagcaacgggctcagtttggcacgtcatgtaattgcacagcatccnganataattaaccgccattttgaagggttggatagtgataagactctgggcgaggaattactcacacctacccacatctatgtacctgaagttatggatatgctttctcacggtcttgatataaaagcacttgtgcacattacaggtggagggctattgaatttgaacagggtacactctcctttcgggtttgtgatagactatttgccagagccacatgcaatattctcgatactgcaaaagcttggtaatatcacggaagcggagatgttcagtgtctataatatgggcataggattctgcgtcattgtaggggagcatgatgctgatgcggtcattgataccgctatgcgccatgatgttgaagcctacaaaattggttatacagtgaaggataaggacaagaaggttattataaaaccaagaaacttatatgggcttggagataaattcttcttgcggaggtgaaaatggtaaaatggcaaaaatgatgaaatccatagagctgtatgaacgcgcaacaaaatatatgccgggcggcgttagtagtccggtgcgtgcatataaaccatatccattctttacaagcagtggaaagggctcgcggatatacgatgtagagggcaatggatatattgactactgcttagcgtatggacctctcattctgggacacgcaccggaggaagtgaaagaagcgattaaagagcagcttgancgtggctggctctttggcacaccacatgaaggcgagataaagcttgcagagaagattatagcattgtatccctcgattgagatggtcaggttcgttaacagcggtagcgaagcgacgatggcaggtataagacttgcgaggggtttctctggtcgtgataagataataaagatagaaggtggattccatggtgcacatgatggcgttcttgtgaaagcaggctcaggtgccaccactttcggtattcctgattccagaggcatacctcctgatctggtcaagaacacgctccaggtgccttttaatgatatcacagcgctgagcaccatcctggaagcgaacgcaggagaggtcgctgcggtcataatggaacctgttatgggcaacgtgggaccgataccgccggaggataagtatctggaggatgtgaggagattgacgaaggagcatgatgtcctgctcatctttgacgaggtcattacnggattcagactcgcgcttggcggtgcacaggaatattatggggttataccagatataaccatcctgggtaagattgcaggtggcggttttccaataggcatctttggtgcgagtagagcgattatggagcttgtagcacctgttggtggggtatatcaggctggcactttcagtggtaatcctgtctctatcactgcgggtatcaagacgatagagatactggaacgtgagaacgctttaccgcgaataaacgcacttggcgaccgtatgcgtgctgcattaaccgataca

SEQ ID NO: 569 - DNA, 4000 bp, Escherichia coli
  misc_feature (17)..(17): n is a, c, g, or t
  misc_feature (333)..(333): n is a, c, g, or t
  misc_feature (346)..(346): n is a, c, g, or t
  misc_feature (419)..(419): n is a, c, g, or t
  misc_feature (423)..(423): n is a, c, g, or t
  misc_feature (1205)..(1205): n is a, c, g, or t
  misc_feature (1570)..(1570): n is a, c, g, or t
  misc_feature (1977)..(1977): n is a, c, g, or t
  misc_feature (3945)..(3945): n is a, c, g, or t
  misc_feature (3947)..(3947): n is a, c, g, or t
  misc_feature (3953)..(3953): n is a, c, g, or t
  misc_feature (3956)..(3956): n is a, c, g, or t
  misc_feature (3977)..(3977): n is a, c, g, or t
  misc_feature (3980)..(3980): n is a, c, g, or t
  misc_feature (3983)..(3983): n is a, c, g, or t
gcagctgggttgtggangcgtcgaacgcccggcccagggtcgggatgccgacgttgatgatggtgttgtccatcacgcccacgagctcggccaggcagagcaccgcgagggcgatgaacctgccccgggcgcggggggcgggcgccgcttgttggggggagatttctatcgttggggatgtcatggttgtcgtcaccctttcgctgtgatgtttccggagctggaatttgcatggatgaggttggggccgtgctcctggccagagcacagggcggaagccacatgggcgcggtggactgccggatcgctgctgtcgtcgaggccgagcaccanccggagcccgccnggcgccacgcggtttttccgctgcgcgccgccgatggaccgcggctggatctgatgcgtgtccgtgatgtcancagntcgacgcgccaccaagaacactgaggcctcgaacggacgtactgatgttccaagctgtcgtgaccagacatcagccagctcgggggcggccacggcattgaccccgacgatcagtacggcgtcggcgtcatcggcttgcaggatccccgaggcgcagcggacggcagtgccgaaggatgacaagtcggagtcaacgacatggttggtgccgcgcaggtcgagacaattgccgacgcatccggcgacgatgttgtccatgtaacccggcagctcggcttcggtggtcgtatcaggtcccggcgagaaagtgctctccggggcgacgtgccatccctgcagcgccttggctggcaggtcacattcagaaccggcagatgccagcactgtttggaactcatcggcgcggattcgttcattccgctgcagcgaggagtgcttgctacgccgctgtggaatgggtgagatctcgatgggcagcatggttgttcaatttctgcagcaggatccggtcaaccttgatcagcggagttccgtcgagctgtgcgacgtggattcgcatcgcgtacgaccaaggccttctggacggacctcgacgcatccgggaacctcgttcacttccggatccggccttcggatcacggtgtgctccacactgaccggaacgacatggtcgccgaactgatggaagacatcgatcagtgtcagccgccccacgttgtcgagcagccgtggcgcggtgatgagctgggcccgttccctcgggaaggatctgacgggtgtcngaggagatgccggaacgtcccaccaacactcctcggctggtgcaccaggccttccgcagcatccggaaacagggagccaggtcgctgtcgatgaagtacgtgccgtcgacgacgacaagttggcagtcgtatttctcgctgcgctgcaggatgtactccagcttggttggatcgttgtgggggaagacccgtagatctgccccggactgtgcgcaaccagtcgtgatgctctgatgatcgagctgatcggcgatgtggaccacaccgggtccaccgggcgctgacaggggcaccacgttggcgaggaatcccgagctgaacagcacggcgtcgtcgaagcccagccattcggcaagttcctgctngaattctcgatgcagcagcgcggttccgttgtgcagccgggcgccacatgtcgacagtccgtactgcaggacgcgttgtgctgcggtgagcacttcggtgtcgatgctgagcccgggatggtcgttggaggtcagcatgatgacggggtcctcgttgggaagggttccggtgttgtgctgggcgctggcgaaggcctgtccgtacggatagctgccgtcctgcatccctcctcgaacggctgttgaaacttcatgaaaacggtgtgcgtaggtggtgttgaccatggagactccagtctgattcgtgtgatgcgtctgcgtcaccagcaacagtatcgatagtaccactatccacaaggatatccatgagaagcctccaaaagctgtctagagcttgtagagagtgntactatctcctcatgagtgttgtgagagatgtaggaggaggaactgtgtccatctcggtgttgtcgcagagatcaggtgtctcggtcgcgacgatcaagtactacatccgcgaagggttgatccgctcaaccctggatcccaaagcggatgatgtggagaccgtgaaccaactccggctcatccgagggctagtgcatgttgtcggcttgtcgattcggcaggttcgcaagatcctcaacttggttcgcgatcccgaactgagccctgccgccctgatgacaagtgtgaccgcggatctgccgttggcgggagccagggttgctgatgacaccgacttggctggtgctcgtgcggcactggccagtgtcgggttcgatgagttgcctgacgtaccgtacgtcaaccagcttctggccgcgatcgcgttggccgaggagaacggtgtgggcatggatgccgaacatcttgccgcctacaccacagcggctcgcgaatgcgccaagagcgatttcgaccacatgctgttcgattccccgagtcgagaggtgcagaccgcggtgctcggcactttgatctatgactcgattctgatcgggctacggcgtctggctcaccgcgagctcgtcgatcagctcacacccttccagtcccaatagaagaacgagaaggaagtgtttggcatgcagaacatgattcctgaagcgaacacggtgcctgttgcgcagtacctgcgtttcggtccaccggaggtgctgtgcatcacggagacctctgccccagtcgccgggcctcacgacctcgtggtgaacgtgacggccatcagcgtcaacaggatcgacacggatgcgcgggctggtcggaacaagtttctgaccggacgccgcctgccgcagtccacagggttggacttcagcggggaagtggtcggcatcggtccgcaggtccatggtttcgatatcggacagcgcgtatggggattcctcggcaccgatcaactgggtaagcgtggtacggcagcgggaaggatcgcagtggacgcggatctggtcgcgccggcgcctgcttcactggatctggccgagcttgccgcgcttcccttggtcggaatcacggcttggcaggccttggagaaactcggagtcggatcggactctcggctgctcatcgtgggaggtgccgggggcgtggggagcgtggccgttcaggtggcccgagcgcgcggtgcattcgtggacacaataagttcggtgcgacatgacgaactgctcaggcagctgggggcggaatcccgtttcgacccggaacccgccgcatggtcgacgttgacgggtcgctaccaagcggtgctcgacaccacggggaacaacttgtggcagctgcgtcgtctcgttgcgccatccggtcggctgctcacgatttcaccggcgggtattcccgtgagtttcctcaccaagatcctgcccgggcccaccatcattttcatgtcagtacagcccagccgcacaggtttggtgaccttggctgatttggtcgaggcagggcagctgaacccgatcatccgagcacggttcccgcttgctgagatctctcgggcgcacgccttggtcgaggccgggcacggtgagggcaaggtcatcgtcgacatcagttgactccatgatgcgtctcgggggcggtccgaggagcgctgcatccaccctttccatcagaaatctttgatgctcactggaagaaaggttgaatgggctcgttcgtgtcgataccgggcttctcccgggaacagtgctgccggttgcgcgggttcgagtccttggaacaaggcgacgtgggaagcatctgctcggccatccgtgacgaggaagtggtgtacatgctggtgatctggtccattctcgccttcctgatcagttccctgtgctggatcgccggtgacgccctaatcgtcggtttccgcaaacccgacaggngngagcanggngagttcatcgagctcatgggngangangcctacgccttctacac

SEQ ID NO: 570 - DNA, 4000 bp, Escherichia coli
  misc_feature (3814)..(3814): n is a, c, g, or t
tctctcacaaaatcaaactgtccaatcgcaaactctctcgttcgctctctcccatccttatgcctcgagtaactcgattcttgcacttgcttcaacattttcacctttactttgctcaatctcctcgtctcgatggcttttaggaagacgcgtttcgatcgaaactgatgaaagtgactcgtactcaccgcgacagagttccattctctcgtcaaaatcgcattcaaactcaactctgcgttttccttcgtcgagaaactcttctcttccaacacccacgtgaactgatccccgtttttatcttcaccgacgtaatacgcgttcccgttttcgtctcttttcgcctcgctaaaccgttcgcgttcaatcggacagcgatactcttccgctttccttccactcattttcggcgctctttcgaccgttgccaaagcaaattcaaacatcgcagccgcttcactcggcctttttctaccatccccgacgactttctttccagaagcgccgctaaatatcaaatgttccacttcaccgtagcagaaaccatcaaccgcgtgtctcactcgtgactgcaagcgcaaagaaggctgaaaatccgtctcgtttaatcgcgcgcctaagaccacgccaacgtcgaatctgttctgatttccaccaagtttcctaccgatgataactccctcgggatccgataagtattgatgcgctttcgctaacacgcgttcgagcggtaaactctcttgcgcgattgggggatttcgcgcgtaaaatccaatcaccaaagagaggaataacacgctcaatgtgagcgaccaaagcggcatgaaggcgtgcggttgaaactcagacgggtcgagtttaccatctttggtaagtttcggtatgcgattgaacttattcttcggtctgtttggcattgattgtattcttgttgtaaaaccgtcgtatttcccctacgtaagttgtgaggatgtgagcgctaagactgtaagacatatagacaaatgagagatgacacgtatgaaacttcaaggcaatctgtgtaaaactaaacgcaaaatcatttctgcgacgagctaccgctactactaatctattagcgtttcttcttcaaaggaaacgcgtaaatctctttcttcgcgacgcgatatcgcgcgcagactctgtgcttctcctcttcctcctccgattcggctatgcgtaaatcttccctcaccgtcgtgccaacgaatggcccgttggttaatatttcgtggcatcgcttttggatgacgatcgctcgttgcgattggttcaactcgcacgcgtcgaacgctttggagaggttcgattcgattttcccgttggccgcgatggagaaggattgcgaagaggatgaggaggaggtggacgagaggatgcgagcggctaaattgtcggtggtttcgtttcgacacagatcgctttggatctcttcaccggcgagctttaagaactcggataaatcctccacggattcaaatagcaccgcggtgtcgttatcgttgtcgaaaggaacaaagccgaaatacgaaaagtagatgtcgttcgattgatatccgtacgaaatggtaatctcctctcctttctcgattggtttaaatcgatctggcgacacttgcaatttcattttcgtttccttttttgccaagtcgtcgttatctttaggaacctccgagacgaaccggacgatacagttcgctttatcccccgcgtggttacacaaatcgatgccgggagcagtcacacgaacgccgccctgtttgaaacatctcgattccatcaacccagccgcccaatctaaatctgcctcactacaccctatgttcgctaatcgctcgttcaagagccgcttactctcttcgtgtcgctctttatccttcaaagcgttcatcacgcacggagggtatcgaatcagtctctgaatctcctcctctgtcattgcaatcccgggtagaaacggtgcatccaccggtaaactctcgatccatttttcatacctctccgacttttctcctttcgctctctcctccaataacttcatccccatcctcgccgaccaacttaaagaggactcgttctcgtaatcgtcctggaaacaataccgaaatggaatctcgaagataacttccccgggggagagttgtttttgcgagacgagacctctcaccccaaacgcattcgtttcgatgtttactctgctctcgcacgggtcggacgtgaccgaagatatccattcgactatgttttggctcgtggaggagcaaacgcgcgaagatgaagacgagagtctgcgttgaatgatgtgcgcgtttggattaggtattggtgagtttttcgcgtgtaaaagcatgatgcgcttcaaagtgaagaaaggtctgattaaactcacgatctaacatgtgtgcaacaatgtttgttctctctctttctctctttctttctgatctgatatacaattttcagtatttcctaatacacggccaaatcgtccaagaagacgcaatcggcgtcttggagttgcgtgtccgcgctgaccatcactgaattcacgttgacgtatttggagtcgacgacgagtccttttttcgctttcttctcatcgtcgccggaggaggaggaggatgaggaggaagaggaggaggaggaggcttccaaagccatttggttacgaactgtaccggctgtggtaccgggttggaacgcgcgaagcgctggagtggaatcgtcccacgtgacgacgagcaaacctttggaggttaaatcgaccgtggcggattggagcgctccgcttttgccgttgcgtttggtggaaagcgcgagttcagcttcgagtttcgcggcttccgctcgcgtgaattgcacttcactaggagaagtaggttgttgtggatcaaaataaggtcccggagccggcggctgcgaccttgcgagcgcttgattccatccttgcgatccggataaataagcttctttgtcgatatcggtgttgctcattttctcatcaaactcatcgcgtaaaccttgggaccgtatgataccaagaggctgatttgttttctgccatttcataattatgcgtttcatacgatcgggcgcctgtttctgtttcttgactatctgtttgtctcggctctcaatctttttctctcctttttcatcgtccaattgagcgaaaatgtccaacagttccatggtaatcattccagccttcccgagttgatcttgctcgtgccatcgaccgtcttcgtataaacaaaattcaagaatgtagtattcttttgtttcttgacgtgcaccttttaacttcttcttattcacttcattaagtaagttttcgtgcccgttcaactcgagcgcccattcggacgcgtctggcgtatgagcgccccgtcgagacgaagtcggtttcgcaaccgtgcaccgaccagccgattcgacaccgacaacaacgccgccgccggcgcgactggtcggtgaaataagttgcacgacctgcccaagtcgtggcgtcgtatctttttctccctcgttgccctcgttcttttgacctttctttgatgatttttttgaggacttattctccgttctcgttttgtaaagccagtgcgcggcgacgccccactccgcggcatcgtgcatacctcgcgtccgaatttgaacctctagcggttttccatcgtcgcctaaaactgccgtgtgcaaacttttatacccagacttttttggctttgtgatgtaatcatcgtactcaccattgatgggacggttaatcttatgtaccgcgttcaatagngcgtagcacgcttcaatttcgctcggtaaaccagaatcgagtttatctttatcgaaaaattccgatgcactaccttcaccgtcagaagtcatcgttgacgccgatactggatcgccaattatgattctcgtcgcgcgtccgtcgtacacttcgctgaacggaacgttctttctcttcatcttctcg

SEQ ID NO: 571 - DNA, 4000 bp, Escherichia coli
  misc_feature (1987)..(1987): n is a, c, g, or t
  misc_feature (1989)..(1989): n is a, c, g, or t
atttttcatctttcaaaagttaacagtttttttatggttacatacactcaaatcaaaattaatggtatttcttttgttgttgattcaaagctatccattttgcaagcatgtgaatacgcaaatattgacattcctaggttttgttttcatgagcagctttctgtagcagggaattgcagaatgtgtttagtagaagttgaaaaagctccaaaattagtggcttcttgtgcgatgcctttagtgccggggatgcacattttgacgaatactgcggcggttagaaaagcacgggaaggtgtgcttgaatttttattaattaatcatcctttagattgtccgatttgtgatcaaggcgggaaatgtgatttacaagatcaggctatggtttatggaagtgatcgaggtcgttttcgtgagtacaaaagagcagttgaagataaaaattgtggccctttcataaagatgattatgacgcgttgcattcattgtacaagatgtgttcgttttgcaaatgagatagcgggagtcccaagttttggaacttctgggcgggggcaaacgattgaaattggtatgtatattgaaaaattgtttcgttcagaattttcaggcaatgtgattgatctttgtcctgtgggggctttaacttcaaaatcgtttatgctttctcgaagatcttgggaatctgttttaattgagtccattgatattacggacgccataggcagtaaaattcaaatccgaaaagataaggataatctttatgatgtgggctatattaaagaaattatacctggattaaaggaggaatggatttcggatagaacacgcttctcgtttgatggtatagatgaagaacgtagtgggtatgatctttgttctgcttggtattatttgtttcgagtcgataaccaacgtctccggtctcttccagttttaaggaaaggtaatttacgtagtgaatttccttgtttgtttgatttttctcaacttcggaaatttgtgggttttgttggtaaccagtgcgatttctatactgtttatgttctaaaattattattacatcgatctaacttttgtgaaggaaattttcaggtatcaaagtttacaaattttgaactaagtaagttagatttttcctgtttttttttatttaattctaaaatttttaatttggataaggtagatgcgtgccttttggttggtgtgaacccaaaagcagagggtcctttattaaactaccagttgcgaaaacgctgtatagcgggtaaaatcaaagttagtttaattggttcatcgttagatttgggttttcctgtttctcaagtaggtttgaattcttttgagtttttgcaaattgtagagggtaagcatgctttttgtgaatctttgcgaaaggctcgaaatcctattatagtctttggaagttcttttttttcaactattggagaattggaaagttaccaattgttaaatgtgtgtgttgaaaacacgaatattgtggaatcgaagtggtttggtttaaacttttttagtatagaagcctctgaagtaaatcgtaggcatttaggtttaagcgggttaagaaattcctctttagctggattacctacaagctattcttattctattggtgatgagttagagcttgattcttttgatgagtttgaatatacgttcgaagaaaagattgctacaacatggaaagcgctttgttttttagaagagaacgcaacaaatgataattatgctctcatcaagtcacggttacgtaagttctcttttgaacgtttgaagtcttttgaattacagaatttcttaattttttgcagcgatcatgatgaatttcttcagcaactttatcgtttatactttgttgaaaataaaaaatcctttatgtttgatcaaggacatcaatgtaaacctaatttaacaataattgatactaaacgagtttacctaaaagctattccttacgtagaaaccncnggtcaattcttgaattttgaaggaaagtcacaatgggcgatggaaggatctcatacagcgtcaaatcatgcttttttatcgactttaaacgatatttatctcataaaatacagatttttttcgtgttcaaagtttaaaaaggccgcaagtttctttggttttgatgaggagaatgaaattttccaagtttatgatacaaatatcaaagaattgaggtcttgttttgttaaagtagcccatgggattaagttcaaagttagacttagaaacaactttctaatttcaggattacatgataatggctacttgactgattccataagtaaagcatcgttgaacatgaaaaaagcttccattaaattttttaaaaaaagccctttttcatttttttaaagtcggtattttaatactgtgaaaatataatattttgataataccaaaatgttacatttgagagcatagcttatttggttaaagccttagcctgtcacgctaaagataacgggttcaattcccgttgttctcgttatattttttttcaagaaaatttttaaatttgtaatatattttgaatttgggtgtatagctcagtggtagagcattcggcttttaagtgcggttttacttaaaaaatttgctcgttttttaaaaattttaaattgtcgtgacaatatttacaagagaaatctaaaaataacatccgcatgtttttaatttgtttgatataggaacgtaacgaaattttataaataaatatttttagttaaaagaagtatttttatgtgattattaagtagtacgttctaagtatttcatagtaattttttaaataaatcatcataattagcaatattgttagaacattttagaaaatgtaactttttgaaagctgcgtgtttggttaacttacacacgaagtttgtgaagaattttattactttcatctgaatggtcgtaggttcgagtcctactacactcattttttttgtagtgtttgttcatcaaagaatcataggtttgagctttcggtcagaaagtgtctttcaacgtcacgtttgtatatactcaaatttaattattttttgaggttttatttttgcttacttggtggaatggtagacacgagagacttaaaatttcttttcatatttgaagtattggttcaagtccaatagtaagtaattatacatttatgacaaaacgcaaaaattcaaagtttagtgtttgtaaaaaagttcctttaaattttaaaaatatttggggcatttcgccaaaaaaaacttttcgttcgttcaaagttgacaaaaaaaataaaaaaaagttttcattatttaacaaattgataaagacaaagcaatgttttaaaaatttttatacaaatatttccgaacaaaagtttaaaaatgaattcattcgatgtaaaaaagcttctacaaaaattttagataaatttgtaagttattctgaacgtcgtcttgatattgttttatttcgttcgggtttcgtggtttcacttcatgaagcgcgtcaactcgtaagtcatggtcatgtgtttgtgaattttaaaaaagtttatttaagtgggcaaaaaatctactgtggtgattctattaaaatttcaaaaaataatttgatattgaaaaagaaaatttacaacaatgtaaaaaactttttaaagatacaaccagtaagttcgcatctagaagttaactacaaattactcactatcgtctttttatggtcgcctggttttaaaagtagtttttttcctgtttattcaaactataaagttatctctcgtttttacaaatgataaagttttattttttttgttccgatataaaaaaagtttttatgaatcaaacaatgttacaaagtgcgaaacaaattggagcaggtttagcaactattggtttagcgggagttggcgcaggtattggaatcgttttcgctgctcttgttaattcttttgcacgtaacccttctttaagacagcaattatttggcttta

SEQ ID NO: 572 - DNA, 4000 bp, Escherichia coli
  misc_feature (82)..(82): n is a, c, g, or t
  misc_feature (203)..(203): n is a, c, g, or t
  misc_feature (306)..(306): n is a, c, g, or t
  misc_feature (410)..(410): n is a, c, g, or t
  misc_feature (464)..(464): n is a, c, g, or t
  misc_feature (1744)..(1744): n is a, c, g, or t
  misc_feature (1759)..(1759): n is a, c, g, or t
  misc_feature (2002)..(2002): n is a, c, g, or t
  misc_feature (2247)..(2248): n is a, c, g, or t
  misc_feature (2572)..(2572): n is a, c, g, or t
  misc_feature (3269)..(3269): n is a, c, g, or t
  misc_feature (3337)..(3337): n is a, c, g, or t
  misc_feature (3436)..(3436): n is a, c, g, or t
  misc_feature (3788)..(3788): n is a, c, g, or t
  misc_feature (3821)..(3821): n is a, c, g, or t
agttgacctcgcctggcgttcagaacaagccggactcaaaatcgtcgaagtacccatcaccttcgtcgaacgcgaaatcggngcctcaaaaatgaccggcaacatcatcttcgactcaatgcgcaaagtcaccagctggggcctcacaaaccgagtaaacacactcaagaaaaaattcggcaaataaagccccacacctcaanagggtgcccgaaaccacacaggccgggcaccctatgcgtgtccccaacccacacacgccatccagcaggggagaagaaccaccacaccctcacgaaatcaccngccgagccaacccatacaacatcgcctccaaacccaccgcaaaagcatcctccgccggggcaacagccccaccccgcaacatccgatacgcctcctgcaaacgnggataatcgcccccagcaacagcaggatcaaaaacgtgatcaggcgcattcgcntccaaagcggcccccaaaagaaacgcctccaacgcctcaaccacactcagcgcccgctcctgcggacacccaaacgccgccagcgcctccaacaccagctcatacatccgcaaagtctgcggagcccaccccaccggagtcaacgccaaagccgccaccaactccgcgctctcactaaaagcatcccgataagaaacaccccaggcaccaaaagcagaaacccacaactcagtcttcgcctccaccgtaagctcccgctcagcaagaaccacaacagcctcccgcaaagaatccacccgaatttcactaaccaccgcatcactaacagcccccaaaacctcatcacgagactggaaatggttataaagagacgacggcgccactctcaactcccgcgccaacgcacccatcgtaaaattcccatcccgcgcaagaagccgacgagcttgacgagcgatctttgaagcactcaacaccgtagaagacggacgccccacacgccgcgaagaagaaaaactcacactacaccccacatatctttcgctataaattttaatctcaaaaaccctcccaataaccgaaacacacaggtaaaacccacagattttacgccccaagaaatcaccaacttcaatttatttgtgttctgggatacactaaaacgaacagaattcgtttttagaattcgccaagcgaaaggtgtaagaaccgtgatacccaaagatgcaaccacgaccgaactaacccgcgacgtcgcaatcatcggcgcgggcccctccggactaaccgccgcataccgcctgcaacaagcaggccacaccgtagccgtcatcgaagcacgcgaacgtgtaggcggccgcacctggagcaaccacatcaacggcgcattcctagaaatcggcggccaatgggtctcacccgaccagaccgccctaatctccctcattagcgaactaggcctcaaaaccttctcccgctaccgtgatggcgaaaacctctaccgcgaccccaacggcaccatgcaccgctacacgggagacatgttccccgccaatgaaaaaacccaacaggaaatggtgcgcctcattgaaaaactagatgcgctcgccgctgagattggggcgcagcagccgtgggcccaccccaaggcccgtgagcttgacaccatcagttttcaccattggctccgcacgcagtcggatgacgaagaagcctgcaataatattgggctttttattgccggaggcatgcttaccaaaccggctcacgcgttctcggcnctgcaggcggtgctnatggcagcttcggctgggtcgttctctaatcttgttgatgaagattttattctggataagcgtgtggtgggcggtatgcaatccgtctctttggctcttgcgcagaaggtaggggctgagaatattatcttgggtcatccggcacgtgttctgcggtggcaggagccgggggagtacccggtgcgtgttgaggctgaggcattctcggaagacggcgtggcttcccctgccgataacgttatngtgcgcgctaaatatgtggtggtggcggttccgccgaacctgtattcccgtgttcatttcgtacccgcgttggatcgccgtcagcatcagatgcatcagcaccagtcgctggggcttgttattaaggtgcacgccgtgtaccccactcctttctggcgtgataagggtctttcaggtacctgtttcgccgctaataacctggtgcaggagatttacgataacaccaactatgacccgcagaccgnncaggaagagtcacgcggcacgctggtaggtttcgtctcagatgaggcagccgacaaaatgttcactatcagtgctgaggagcgtaaggctcggattcttgattctatggctcagatgctgggggaggaaacgaaaaaccccatcgtgtactacgaatctgactggggcgccgaggagtggacccgcggggcatatgctgctagctacgatttgggtggtttgcaccggtatggtgctgatcagctcaccccggttgggccgatttactggtcatgctctgatattgcttctgatggctaccagcatgtagatggtgcggtacgnatgggggagaagaccgcagccacgctggatgcgaagctcaaatagtcacctcgtaagagcacacacgggtagctttactgggtgcatctgaatactagggtgcgcccagtagagctactgaatttacggatgggaaatatgaagtacgttgtagggtattctcctgatgcgcgtggtcgtgccgcgttgaatttaggcacggtcttagcccgctctttgggggccgagttaaacgttgtgtacgttattaagccgcagaaccctcgccttgcagctcccaaatcaaactttggtgacctacttcaggagcaggcggtgggttggctggaagaggcgcaatatttggtgcccaccgatgtgaaagcgcgttttcatttgcgtcgcgctgattctgcggttgcgggtcttatggagttagccggagctattgacgcagggctgattattgtgggcggcggcaatagcggcaattggttatggcactctttgggggcagtggggaacgcgcttttacaccgttcccgtgtgcctgttgccttagcgccgcgtgattacagcgcggatcacgtcattaatcagattgattgtgcaatttctcctgatattgattcgattaacctcgtggaagaggctatcgccacccagaatcgaacgggtttaccggtgcgtttagtttcgttgtatgagcaaaacgggncagcggatgacgagttgtaccgggccagtattgaagatttggtggaacagtcaaacgttgcaccgcanaacccgcagcagctaagtatcgcagtgggtgctgggaccacgatcgtggaggcagtggattctgtgcactgggatgagaacgctattttaatggcgggntcttccaaactggctcagcgcggcgagttgttcctgagttctacaaccgcgaagattatgactaagctgcctatcccgctggtggttgtcccacgcgattaccatccagggcgtaaagggtcgcagcagcagccgtggacgggttccataccggtcattgagtagccgcagggcattgttatatttcggtagcgcatttattgctaaaaggagagaatatatgagcgtaaatgttgaggcactggtggcgaaggtgcctacaggtttgctgattggcagctcgtggcggcccagctcatcggatgaagtattcgatgttattaacccggcaacggaagagaaacttgccgcngtatcttcggccacgagtgaggatgcggttgcngctctggatgccgcgtgtgcggtacagcagcagtgggctgctacatcgccacgtgaacgcgccgagattctgcgccgcgcatatgagctagtcattgcacgcgccgacgatttcgctaccttaatgacccttgagatgggtaagcctctggcggaatctcacggggaggttgtctacgg

SEQ ID NO: 573 - DNA, 4000 bp, Escherichia coli
  misc_feature (1999)..(1999): n is a, c, g, or t
  misc_feature (2017)..(2017): n is a, c, g, or t
  misc_feature (2322)..(2323): n is a, c, g, or t
  misc_feature (2331)..(2331): n is a, c, g, or t
  misc_feature (2338)..(2338): n is a, c, g, or t
  misc_feature (2341)..(2341): n is a, c, g, or t
  misc_feature (2356)..(2356): n is a, c, g, or t
  misc_feature (2360)..(2360): n is a, c, g, or t
  misc_feature (2397)..(2397): n is a, c, g, or t
  misc_feature (2652)..(4000): n is a, c, g, or t
atcgtataaattctcaagaccatgaatcatataataataataataatacccaattacaatcttttaatcaacaatttaatcgtaatatgtatttacaacatcaaaccttacaacaatatcaagaacaacaaaaacaaatgtatatatatggtaattgtttatatgcagctgtatatgcgttagccaatggtcatcgtgatatttataagcatcttatgaattatagtaacttcttttctaagaataatttgatttataaggtgccaatggttatagctctctcagagaataatattcatacagtaaaatatcttcataaaaaaggtatacctcttcatcaaactttcaattttaatatcagtcttactgattcgtttgtcaaaaatatttctaaatattgtgatattgtataccatgatgagccattaattagtcttgataatacgtcacttttacattatagtgtatggaaaagtgaatataatattgtgaattatcttcttgaaaataatgtagatattaattatcaatgtagtaaaggatataccgcacttatgattgctactaagaatagtgatatgagaatggtaaatattttagttgctaatggcgcaaatattaatttaaaggataaggaaggaatgacagctttattaattgcttgtttaaatggacgatttaatttagtacaatatttaactgatagtggtggtgatataaatgtaatcacaaaatataaagaaaatatgttacttatagcatatcaattagctattggcaatgatcattttatcattgaaagatatgataaaacttactttaatttaaagggagtaaaaccaacacgtttcgcatatgaaactattgtgaattatttaattgcccaagatattgatattacattgagagattgtaataatctatcagcaattgattatgcagtagttaataatcgttatttagatgctaaatatttcttaaatcgtggtgttagtccaaattgccaatttcttgaattagatttacttaaatattctattttgaaagaatggctaaatatggttagacttttaattaattctggtgttgacttagaaagaaaggataagcataacaatacccctcttatttgtgctattcgtactggaaatcttgatatcttaaaagaattagttagtgctggtgttaatttacatgttaagaatgataaaggactcacaccattaatgtatgccattaaaaagaaaaatataagcattatacgttatcttctcactcagaatattgatattaatgaaaaagatgaggatggtttcacagttttaatgcatgctatagcagctccaaactattctatggaagtcatagagtatcttgttgatcatggtgctaatgtaaatattaaaagtaataaacttgttacacctcttttattaacagcaaaaaataacgatattgaattggcaagatatctcgtaggaaaggaagctaatgtaaatgataaagatagtgaaggttataattctttaatgtatgccgtattaaatcataatattgcttttataacacttttagttaaaaatggtattaaaatcaatgaaaggaattgtaaggaatatactgctttaatgatagcatctgaaaatggttattttaacattgttaaatatttagttgaacatggtgctgatatatctttaaaggctaaaaaacatacttcagctataaaattagcctcgaaaagaagatattataatattgctgattatttagcttatagtaatactaatataacagcaacagcttaaaatataattacaacattattatatatatattagaatataatatatcgtaacatattttatccccatttacccatccccaaagaaaataattaattaagattaaaaattaaaaataatattaacaaaataatatcaaaatcaaaaaaaaaaaaaatatatatatatatatatatatacatacatacatatanatatacatatatcaaaanaaaaataataataaaaatttttaaattaaaataataataatatgtaaagaattttgcaacatatattattacaataatgaaatttattaatatttttataagtaattaaaaataattatcgaaaataccaattaaattaatctattgttatatattacaattataattttaatatgtaactataggcttaatatataaaaaaataataatataaaacataccaaaagatttatttaataataattaacattatatttacttattaatatatatatatatagtttttttttaaaaaaaaaaaaaannaaaaaagngataaanaanaaagaaacttattanaaanattaatgaaaaaggaggaaaaaatagttatccttatnatatattagtatataaatcatctatattatatgtaatgatatctatttttgttttaacaaataatatatatattaataatttttttttttaatttttttattttatattttttatttttttaacaaaaataataataatagtaatagtaataataataataataataataataataataataataataataataataataataataataataataataataataataataataataataataataataataatannnnnnnnnnnnnnnnnnnnnnnnnnnnnnnnnnnnnnnnnnnnnnnnnnnnnnnnnnnnnnnnnnnnnnnnnnnnnnnnnnnnnnnnnnnnnnnnnnnnnnnnnnnnnnnnnnnnnnnnnnnnnnnnnnnnnnnnnnnnnnnnnnnnnnnnnnnnnnnnnnnnnnnnnnnnnnnnnnnnnnnnnnnnnnnnnnnnnnnnnnnnnnnnnnnnnnnnnnnnnnnnnnnnnnnnnnnnnnnnnnnnnnnnnnnnnnnnnnnnnnnnnnnnnnnnnnnnnnnnnnnnnnnnnnnnnnnnnnnnnnnnnnnnnnnnnnnnnnnnnnnnnnnnnnnnnnnnnnnnnnnnnnnnnnnnnnnnnnnnnnnnnnnnnnnnnnnnnnnnnnnnnnnnnnnnnnnnnnnnnnnnnnnnnnnnnnnnnnnnnnnnnnnnnnnnnnnnnnnnnnnnnnnnnnnnnnnnnnnnnnnnnnnnnnnnnnnnnnnnnnnnnnnnnnnnnnnnnnnnnnnnnnnnnnnnnnnnnnnnnnnnnnnnnnnnnnnnnnnnnnnnnnnnnnnnnnnnnnnnnnnnnnnnnnnnnnnnnnnnnnnnnnnnnnnnnnnnnnnnnnnnnnnnnnnnnnnnnnnnnnnnnnnnnnnnnnnnnnnnnnnnnnnnnnnnnnnnnnnnnnnnnnnnnnnnnnnnnnnnnnnnnnnnnnnnnnnnnnnnnnnnnnnnnnnnnnnnnnnnnnnnnnnnnnnnnnnnnnnnnnnnnnnnnnnnnnnnnnnnnnnnnnnnnnnnnnnnnnnnnnnnnnnnnnnnnnnnnnnnnnnnnnnnnnnnnnnnnnnnnnnnnnnnnnnnnnnnnnnnnnnnnnnnnnnnnnnnnnnnnnnnnnnnnnnnnnnnnnnnnnnnnnnnnnnnnnnnnnnnnnnnnnnnnnnnnnnnnnnnnnnnnnnnnnnnnnnnnnnnnnnnnnnnnnnnnnnnnnnnnnnnnnnnnnnnnnnnnnnnnnnnnnnnnnnnnnnnnnnnnnnnnnnnnnnnnnnnnnnnnnnnnnnnnnnnnnnnnnnnnnnnnnnnnnnnnnnnnnnnnnnnnnnnnnnnnnnnnnnnnnnnnnnnnnnnnnnnnnnnnnnnnnnnnnnnnnnnnnnnnnnnnnnnnnnnnnnnnnnnnnnnnnnnnnnnnnnnnnnnnnnnnnnnnnnnnnnnnnnnnnnnnnnnnnnnnnnnnnnnnnnnnnnnnnnnnnnnnnnnnnnnnnnnnnnnnnnnnnnnnnnnnnnnnnnnnnnnnnnnnnnnnnnnnnnnnnnnnnnnnnnnnnnnnnnnnnnnnnnnnnnnnnnnnnnnnnnnnnnnnnnnnnnnnnnnnnnnnnnnnnnnnnnnn

SEQ ID NO: 574 - DNA, 4000 bp, Escherichia coli
  misc_feature (960)..(960): n is a, c, g, or t
  misc_feature (962)..(962): n is a, c, g, or t
  misc_feature (974)..(974): n is a, c, g, or t
  misc_feature (989)..(989): n is a, c, g, or t
  misc_feature (991)..(991): n is a, c, g, or t
  misc_feature (995)..(995): n is a, c, g, or t
  misc_feature (1022)..(1022): n is a, c, g, or t
  misc_feature (1118)..(1118): n is a, c, g, or t
  misc_feature (1169)..(1169): n is a, c, g, or t
  misc_feature (1184)..(1184): n is a, c, g, or t
  misc_feature (1372)..(1372): n is a, c, g, or t
  misc_feature (1958)..(1958): n is a, c, g, or t
  misc_feature (1985)..(1985): n is a, c, g, or t
  misc_feature (1991)..(1991): n is a, c, g, or t
  misc_feature (3456)..(3456): n is a, c, g, or t
aaaggtctatgacaatttgcttcgataatatataaaatcaaagcaatgaaagaattcttaactgttgccgttttgcatttttttgcagttgcgagtcctggaccagattttatcttggtcagccgtcagtgtttaaggtatggcagaagtgttgctctttggactagtttgggcattgcattaggcattctcttacatgttgctctttctatagctggtttaagcatcctaattaaacaacagcctgttattctggattggttaaaaataatcgcttccctctatattgcttatctaggtctgcattcaatattgtctaggcattcaagaaataccggtaaagaatccattgagagcagaactaaagaaatgaaatccataaccacaggcttcttaaccaacgttctcaatccaaaagcatttatattttttgccacggtattcgccttggttatagaaacctctacgactaatttaactaagattgctttaggtgtttatatgtccctggctacctttgcatggtttgcatttatcagtgtcttattaacaaacaaaacggcaaatacaagatttcgtatacttattccatggatagagaagcttactggattattattactactgattgcactacaaatacttttacaagaggtatgaaagaataaaagcatgattcatgattaaagaaaatagcgataatagtatttttcttatttaatactttgttgtctaataatacgatggctatagagattttaagaacacccgatgaacgttttgagaaccttcaagacttcccttttaaacccaattatatgcaaatcggtgattttcgtgtgcactacttggatgagggacctagcgatggtttaccaatattattgatccacggtgaacctacatggagttatttgtttagaaaaatgattcctatttttactgctgcaggacacagantnatagccccagancttattggattcggnanatcngataaattagcaaaccggaaagattanagttatcgattgcaggtagatgtgatgcttgagctagtgcagaaattaaatttaaacggagttactttttttggtcaggattggggcggtttaatnggtcttagggttattgcaaccgagcctgagcgctttgagagaattgttgtntccaatacgggattnccctctgcagctggtttgaaaggatggattggctaccctatctttaaatttatggtgtggagacaaggtgcgatcagttttaaagaatttcaatcaaaagtaacatttccacgttgggtcgcttacacttatcacgttgatgaattgcccattgatacattaatgaacaatgcaaccacagatgaatnaatcggagctgcctatgaagcacccttcccaagcaaaagttataaggtggggccacagataatgccttatcttgtgccgtctcaattaagagagaacgaacgagcatggaaagtttttgaatcttgggacaaaccatttttagttgcttttacggataaagatcccatcacgagaggtggtgaaaaaatattcctaaaaagagttcccgttgcccagaatatcactattaagggggcaggtcattttgttcaagaagatgcaggggaagaaattgccacaatcataaatgaatttattgccggaaaggagttcaaataaatcaggagattatgatgtttaaatgcggtttgattttgttctttggcactcatttaattcccagttttagcaaaataaaaaatttcattgtgatgaaagttgggttaaatggttacttgggaatatttgtactattcagcgtgactggaatggtgctgatgactattggttacaaatctggggaagagcttttgtaccccgtaaacaattggttttatatgaatgcaaagtatttcatgctttttgcttgtatttttttagctgcgnccttcctagacactcatacccgtctgnttctgnggcatcccatgcttacaggcattattatctggaccattgttcatttgagcgttaatccagacagatcttcagtcatgttgtttggttcatttctagtattctctgttgtatccataataacttctgaaatcagaggaaaaaaattaagcgatggtacggctcatttcaagtttgatgtgatcgcaataataattggagtgatttcttttgccttgttgtataggtttcatgaaagtttatttggagtcgccttagcataaaacaaccaatgattggtccttttgattcattaagagattatatagcagctctggatagcaaaggtttacttgtacgtatcccaaaaatggatcaggataaatacgaagcaacgggctttgcataccagctggttaaagaatttggttacgatctagcgcctgcttttttaattgaagagattaaagtaaataaccaatggatgaaaggacctgtccttggaaatatttttggaggctggagctccgaagcattgatgtatgggatcgaaaatttaggagagaatcaaaaaatagctcgacaaaagacatcagatcacctagaggctttatacagaaaattgaatcagtggccaaaaattccaccaattgagatcacttcagatggttgtccctgtaaagagaatattcttctgggcgatgacgttgatgtaaccaaatttccatggttgcataccaatccagccgatgctggtcagtatctgaatgcagcgatgatcttcattgaagatccagatttaggacgcaatgttgccccttatcgttgccagatcaaagaaaaagataagattggtgtgaacgctgaaattcaacaaaatgcttggaatttcttaatgaagatgaaaaagcaaggaaagaaagtagcgcctattgctgttgtcaatggagtcgaccccattacttttaccttaggagcttccaaattggcacaactgggagaggatgaattagattttgtgggaggctttagaaataaggcagtagaattggttaaatgcgaaaccaataacatattggtgccagcaaattgtgaaattgtgctcgaaggagaggtacccttggatgcaatggagaaggagggaccctatggagaaatgtatggttttatgggacttgaaaaagagcaaaattttttcatgaatataaaagcaattacccatcgagacaatccatggatcgtcaactcatttgcaggggtaactaaaatttctccaagcattctacagacggttgtaaatcttattgactacaaagaagccatacccagtctattagatatctatcgtccagctgagagtacgggtgtgctcatcgtgagcattgataaacaaaactcaggagaaggtatggctacaggtaaaatcttggcagaaaaagatttttttggcaaagtcattattattgttgacagggatattgatgtttangataaaggggaaatttttcaagcccttggaacaaggtggcagccacacccagctgcagaaattattgaagaaaccagaggcatgcctctggatgcaagtgctccaaagaggtttcagactagtaaaataattatcgatgctactaggcaatttagtgaggaaggtgggcctaatatttggcctgaaatttcaaaagtaatgcttgaaaaattgagccccgagactttcgatctcatagaacagaattgggagaattattttatccattggaaacggtaagatgactcactccgatgaatattttatggaacttgctattgaacaagcaagcattgctcaaaccaagggtgaagttcctgttggtgctgtctttgtagataacaatgaagtcatcgctgcatctggtaatgctcccatagccttgaacgaccccactgctcatgcagaaataatggtgataagaaaagccgctgagttgaaaaataattatcgattgggtggttcagtttttgtgactttggaaccgtgtgcaatgtgtgtgggt

SEQ ID NO: 575 - DNA, 4000 bp, Escherichia coli
  misc_feature (1498)..(1498): n is a, c, g, or t
  misc_feature (1792)..(1792): n is a, c, g, or t
  misc_feature (1990)..(1998): n is a, c, g, or t
  misc_feature (2000)..(2000): n is a, c, g, or t
  misc_feature (2002)..(2004): n is a, c, g, or t
  misc_feature (2006)..(2008): n is a, c, g, or t
  misc_feature (2010)..(2022): n is a, c, g, or t
  misc_feature (2024)..(2024): n is a, c, g, or t
  misc_feature (2026)..(2031): n is a, c, g, or t
  misc_feature (2033)..(2033): n is a, c, g, or t
  misc_feature (2035)..(2035): n is a, c, g, or t
  misc_feature (2038)..(2042): n is a, c, g, or t
  misc_feature (2046)..(2051): n is a, c, g, or t
  misc_feature (2053)..(2053): n is a, c, g, or t
  misc_feature (2055)..(2060): n is a, c, g, or t
  misc_feature (2062)..(2062): n is a, c, g, or t
  misc_feature (2066)..(2066): n is a, c, g, or t
  misc_feature (2068)..(2072): n is a, c, g, or t
  misc_feature (2074)..(2077): n is a, c, g, or t
  misc_feature (2116)..(2117): n is a, c, g, or t
  misc_feature (2119)..(2120): n is a, c, g, or t
  misc_feature (2122)..(2122): n is a, c, g, or t
  misc_feature (2124)..(2125): n is a, c, g, or t
  misc_feature (2127)..(2127): n is a, c, g, or t
  misc_feature (2129)..(2135): n is a, c, g, or t
  misc_feature (2137)..(2137): n is a, c, g, or t
  misc_feature (2139)..(2147): n is a, c, g, or t
  misc_feature (2149)..(2149): n is a, c, g, or t
  misc_feature (2151)..(2151): n is a, c, g, or t
  misc_feature (2253)..(2255): n is a, c, g, or t
  misc_feature (2257)..(2263): n is a, c, g, or t
  misc_feature (2265)..(2265): n is a, c, g, or t
  misc_feature (2267)..(2270): n is a, c, g, or t
  misc_feature (2272)..(2272): n is a, c, g, or t
  misc_feature (2274)..(2277): n is a, c, g, or t
  misc_feature (2279)..(2288): n is a, c, g, or t
  misc_feature (2290)..(2290): n is a, c, g, or t
  misc_feature (2293)..(2294): n is a, c, g, or t
  misc_feature (2296)..(2296): n is a, c, g, or t
  misc_feature (2298)..(2298): n is a, c, g, or t
  misc_feature (2300)..(2304): n is a, c, g, or t
  misc_feature (2306)..(2308): n is a, c, g, or t
  misc_feature (2431)..(4000): n is a, c, g, or t
atcaacgacttcattttttgcccccactcgatttatctgcatggagtgtatgagtcttttcatgagaacatctatcaggatacgcctcagcgccaaggtaaaatagttcatgaaactattgaaaatagcacatattcatcagccaaacgctatctccagggagtatcggtatattcacaaaaatatcgtcttgtggggaaaatagatatttatgatacgaaggataaagcccttattgagcgcaaatataaaattgagtacatatatgatggacagaaatatcaactctatgctcaatgtatcgccatgtgcgaagcaggatatgaggttgaaaggttgttcatccattccctctccaataacaagcgatatgctattgacctgccagacgaagaggagctcatccattttgggttagtaataaatagtatacgagaatattctgttctgtcatctactcactcggtaaatcccgttaagtgcacaaaatgcatctatcgtcagttatgtcataaagcactatgttgacgctccccgattttaaagaaaaaaagattgtttttattgaggctgaaaaagatatcgatcatcagattcgtttttggaatagtaatattcgtattttcaaagatggagaacccgtcaaccagatatcttgctatctggtgctttgtatttttattgttggcaataccagtttaacaacaatactcatccagaaagctcagaaatatggcatctcaatttttttacttaattattcattgaagccatatgcggaaatcatgtcacaagcggaaggaaataccgcactcagaatcaaacaatataccatggcgaagcagacacaacttatatttgcaaagcatatcgtagagaataaggttaacaatcagtttgcgttgcttcaagagacgggtaatatatcttcacaaaataccttacagcaaatacacaaatctgagaccatgcaggagctccttggcgctgaagggaactgtgcgagtcggtattttcaacagttgtttaccgctcatgaatgggggaggagagcaccgcaaacgaaagaagatatcacaaattttcttatggatatagggtatacataccttttcaattatgtagatgccatattgcgactgtttggttttgatacgtacaaaggtttttatcatcagctttttttccagcgcaaatctctcacctgtgatttgatggagccaatgagaccactcatagatagggctattatcaagggatacaacctaggtataatcaacaagaatgattttgtgtttcaaagaggctcctataagttaaagctcgatgtaaaggtgcgcagtaaatatagtttgttattttttaaagtgatcaccgtacataaagaagggatatatacgtatttgcggttgttctaccttcatcttatgaatccagagaaatatcagtttcccacatactcaactatatgattattacttcgtatgatttccatagngataaaacaaggagaagatttgccaagctgatggagcagtatggagagcgaatacaatattctgtttttttagtcaaaaatagtccccgaattttacgtatgatgctcattgaaattgaactaaagttcaaaaataaaattaaaaaaaccgacagtgtctatgtttttaggctttgtaatggttgtacagagaaaatcgttcgttatgggagcgcaacatatgctgaggaagctgtggtatacttgaactgagtgtgtactttgataaatagttttgaaaagtggaagttatantatcaataaatccttggtctttattttttgcaataattgtagagtagtacgctaaatagactatcagaaagcctaataatactatttattgctccggcttcatcgtcctggaactgattgtttcagttgtatcgatagattgttggggcaatatagaggctctctacaattgatagccaatttctacttttgtagatnnnnnnnnntntnnntnnntnnnnnnnnnnnnnantnnnnnncnanttnnnnntttnnnnnntntnnnnnntnttanannnnnannnnactctacaattgatagccaatttctacttttgtagattnntnntntnngntnnnnnnnantnnnnnnnnnantngatagccaatttctacttttgtagatctattctttggattttgttaagctctcctctacaattgatagccaatttctacttttgtagatctggcgtgttctnnntnnnnnnnancnnnncnannnntnnnnnnnnnntnctnntntngnnnnntnnnatcaaatattatcagttgactctacaattgatagccaatttctacttttgtagatcttgaaggtggattttttcttaaggactctacaattgatagccaatttctacttttgtagatacgaannnnnnnnnnnnnnnnnnnnnnnnnnnnnnnnnnnnnnnnnnnnnnnnnnnnnnnnnnnnnnnnnnnnnnnnnnnnnnnnnnnnnnnnnnnnnnnnnnnnnnnnnnnnnnnnnnnnnnnnnnnnnnnnnnnnnnnnnnnnnnnnnnnnnnnnnnnnnnnnnnnnnnnnnnnnnnnnnnnnnnnnnnnnnnnnnnnnnnnnnnnnnnnnnnnnnnnnnnnnnnnnnnnnnnnnnnnnnnnnnnnnnnnnnnnnnnnnnnnnnnnnnnnnnnnnnnnnnnnnnnnnnnnnnnnnnnnnnnnnnnnnnnnnnnnnnnnnnnnnnnnnnnnnnnnnnnnnnnnnnnnnnnnnnnnnnnnnnnnnnnnnnnnnnnnnnnnnnnnnnnnnnnnnnnnnnnnnnnnnnnnnnnnnnnnnnnnnnnnnnnnnnnnnnnnnnnnnnnnnnnnnnnnnnnnnnnnnnnnnnnnnnnnnnnnnnnnnnnnnnnnnnnnnnnnnnnnnnnnnnnnnnnnnnnnnnnnnnnnnnnnnnnnnnnnnnnnnnnnnnnnnnnnnnnnnnnnnnnnnnnnnnnnnnnnnnnnnnnnnnnnnnnnnnnnnnnnnnnnnnnnnnnnnnnnnnnnnnnnnnnnnnnnnnnnnnnnnnnnnnnnnnnnnnnnnnnnnnnnnnnnnnnnnnnnnnnnnnnnnnnnnnnnnnnnnnnnnnnnnnnnnnnnnnnnnnnnnnnnnnnnnnnnnnnnnnnnnnnnnnnnnnnnnnnnnnnnnnnnnnnnnnnnnnnnnnnnnnnnnnnnnnnnnnnnnnnnnnnnnnnnnnnnnnnnnnnnnnnnnnnnnnnnnnnnnnnnnnnnnnnnnnnnnnnnnnnnnnnnnnnnnnnnnnnnnnnnnnnnnnnnnnnnnnnnnnnnnnnnnnnnnnnnnnnnnnnnnnnnnnnnnnnnnnnnnnnnnnnnnnnnnnnnnnnnnnnnnnnnnnnnnnnnnnnnnnnnnnnnnnnnnnnnnnnnnnnnnnnnnnnnnnnnnnnnnnnnnnnnnnnnnnnnnnnnnnnnnnnnnnnnnnnnnnnnnnnnnnnnnnnnnnnnnnnnnnnnnnnnnnnnnnnnnnnnnnnnnnnnnnnnnnnnnnnnnnnnnnnnnnnnnnnnnnnnnnnnnnnnnnnnnnnnnnnnnnnnnnnnnnnnnnnnnnnnnnnnnnnnnnnnnnnnnnnnnnnnnnnnnnnnnnnnnnnnnnnnnnnnnnnnnnnnnnnnnnnnnnnnnnnnnnnnnnnnnnnnnnnnnnnnnnnnnnnnnnnnnnnnnnnnnnnnnnnnnnnnnnnnnnnnnnnnnnnnnnnnnnnnnnnnnnnnnnnnnnnnnnnnnnnnnnnnnnnnnnnnnnnnnnnnnnnnnnnnnnnnnnnnnnnnnnnnnnnnnnnnnnnnnnnnnnnnnnnnnnnnnnnnnnnnnnnnnnnnnnnnnnnnnnnnnnnnnnnnnnnnnnnnnnnnnnnnnnnnnnnnnnnnnnnnnnnnnnnnnnnnnnnnnnnnnnnnnnnnnnnnnnnnnnnnnnnnnnnnnnnnnnnnnnnnnnnnnnnnnnnnnnnnnnnnnnnnnnn

SEQ ID NO: 576 - DNA, 4000 bp, Escherichia coli
  misc_feature (144)..(144): n is a, c, g, or t
  misc_feature (163)..(163): n is a, c, g, or t
  misc_feature (166)..(166): n is a, c, g, or t
  misc_feature (187)..(187): n is a, c, g, or t
  misc_feature (241)..(241): n is a, c, g, or t
  misc_feature (271)..(271): n is a, c, g, or t
  misc_feature (418)..(418): n is a, c, g, or t
  misc_feature (475)..(475): n is a, c, g, or t
  misc_feature (532)..(532): n is a, c, g, or t
  misc_feature (629)..(629): n is a, c, g, or t
  misc_feature (637)..(637): n is a, c, g, or t
  misc_feature (649)..(649): n is a, c, g, or t
  misc_feature (685)..(685): n is a, c, g, or t
  misc_feature (704)..(704): n is a, c, g, or t
  misc_feature (767)..(767): n is a, c, g, or t
  misc_feature (793)..(793): n is a, c, g, or t
  misc_feature (836)..(836): n is a, c, g, or t
  misc_feature (1023)..(1023): n is a, c, g, or t
  misc_feature (1032)..(1032): n is a, c, g, or t
  misc_feature (1137)..(1137): n is a, c, g, or t
  misc_feature (1191)..(1191): n is a, c, g, or t
  misc_feature (1215)..(1215): n is a, c, g, or t
  misc_feature (1342)..(1343): n is a, c, g, or t
  misc_feature (1350)..(1350): n is a, c, g, or t
  misc_feature (1509)..(1509): n is a, c, g, or t
  misc_feature (1536)..(1536): n is a, c, g, or t
  misc_feature (1572)..(1572): n is a, c, g, or t
  misc_feature (1600)..(1600): n is a, c, g, or t
  misc_feature (1605)..(1605): n is a, c, g, or t
  misc_feature (1659)..(1659): n is a, c, g, or t
  misc_feature (1698)..(1698): n is a, c, g, or t
  misc_feature (1848)..(1848): n is a, c, g, or t
  misc_feature (1982)..(1982): n is a, c, g, or t
  misc_feature (1986)..(1986): n is a, c, g, or t
  misc_feature (2011)..(2011): n is a, c, g, or t
  misc_feature (2328)..(2328): n is a, c, g, or t
  misc_feature (2789)..(2789): n is a, c, g, or t
  misc_feature (3214)..(3214): n is a, c, g, or t
  misc_feature (3221)..(3221): n is a, c, g, or t
  misc_feature (3316)..(3316): n is a, c, g, or t
  misc_feature (3547)..(3547): n is a, c, g, or t
ccagaggctccagagaaaatatgctttgggacactcggatgagctttgtgaacttttgaattcgtctgaaaaggaacatacggatttaatcaatttggaagaaaacagtcagttactggaggaacaattcgaaactgctttganggaattgaagcaaagctcngangaactttctgcacgaaggcanaaaatttcaacagatcttgaccgtcagattgtccaacagcttcaacagttgggnatggaaaaagcgagattccagacaaaattnaaaaatcaggatgctgaagatgaaaaggaatggagtgaaaagggaatcgatcaggtcgaattcatgctttcagtcaatccagggcaaaacctaaaaagtttgatccacatcgcctccgggggagaactgtcacggacgatgttggcnttgaagaccatcttacaaacccacgacccttccacggtgatgatcttcgatgaagtngacaccggtatcagtggacgagttgcggaaatggtcggtcaaaagttaagaaatctngggcagcagcagcaaactctgtgtgtgacccatcttccacagattgcagcattttccgacagccattatgtggtagaaaaacaaattgaaaaggacncaacttanacggtggtcagnaagacgtctacttcggaagaaaaagcacaggaaatngcacagttgataggcggcngagaaattactgaaaaaaccttcagtgtggcttatgaaatgctcgagcaggcacggagtgctnctggctgaggattttgattcttcctntaaaggttgtctaattggaaaggcaggcttcgatgctttccancctttcccgatattcctcttcggttgaaggtaccatttgattcttgacacattcaggtttttccagcaactggcgctggcggcggtagaaattcagctgcatttctatctctgctggaaaagctttcagcggtcccgaaagaagtaaatcgtgggacgcatcttcgcgaagggttttcatctcgganatgatctgngtttcaagcaaatctgtgtcttcgatggactggaggtccagttttcccatcagttttttcatcgccgagtgcagatcctcaaatctggcaagtattttttgatgntactcggattggctttccagttgaaaaacaaacttttctgaaacggatcggttngggccgttcaaaagatcacggtcngaggcctcgatccaaacggtaacattgtctcctgcaagaagaggagtcatggaaagatcccactcatacaattcactgaagattttgaagtcctcttcgtaagactgaagaatttctttatagggtnnatcattngattggacctgatagtgaagcacgacttgatgcaaggcatggtcatcttcagcgaaaacctgaatcttcattctgcttgaatcgaaaatgtatttcagttgaggccaattgactttcaggatcggtttttggtccggaatcactttccatggaatttcncttgattcccatcccaacttgagcaancccgaattttcaggtgtcagcctggccaggatctgnggtcctctttcagaccactgaagcgganttcgncctcttgaattaacaaaataggattcgtctttttggaaaggaggatccatccangacatttccaactggctgcctaaaggggtagagagttcntcaggcagggtctcatactgttgcggagattttttaagataggcagggaaaaggatccggtatgcacccgaaggaagaacttccattttggaaatagcattgtttccaggaatagaatccgttcccaaaaaaaagaaaccaatcagcatngcctgaattgataatgtgaatactgaagcagaaaaccagccaaccttgggagaaactcctcggattgactccaggagttcctgctgatgcttttttttgaaatactcttgaaacactttttccggatcttgggnctcnccgctgttgccatccagaaatgaantttgatcattccgatccagttcgaattgggttctaagtttttcagcaattccggaatgtgagattccaagttttttcagagcatcttcttcattgatcctgaaccaagtccaggcgcagcaaagcacgaggaaaaagaaacttaaaaataggaggaggcccgatgaaaggctttcgggctgaaaccagatcagcagcgaggaaaaaagactgcagccgctccaggcaagtgctgcatgcctgatccgctgctgcaggaggtatttttgaaaccagttcctatgggaaccgggaagttcgtctaaagtggatgcctgntcagaattttccggagaaatttttggatcatgaagaggatcaattgaggtgactgggatgctccagcaggtccataaggtcatctagaacttttgcaaagacatgcgttgcataatccaccttggtttcattatccagaaatcggtgctccagcatttctgcaagttccatcaccgcatcagtgatttgtttttcaaagcgatagctgatgtctgcaccaactatgttatggaacttctcaattttttgttcagtcggggtcatagaatctccaatattttcatcgctcaatcaagttcagatgattaatttggaactcggcaacaaaacagccgggttctgatcaatcgggaggctttaaaattgcttttccggaatgactattcgttccttctgatgatttaatcggcagatgatgctgaaacttgaacctcgattttcatgaaaataatcaaaacccngcaggcactcttgaaactcctgaaccgattcaaatttccagatgctctggtcctcacggtttgttttgtgggattgctaaccatttcaccctccatggctctgacacaggaatacgaaaccgacaggattttcatcagacagcaaagtaaaaatcactgtctggtcaatgttcgggatcagatccgtgagcacagaaaaacccgggatatgagtgatgaacacaatcaactgatcaatcgtcacgtttggaaccgcaaccggactggactggagatgagtcagaatcagcagcagaggttgaatcaattgctcaagggcaatcctggtcccaaatacttaagtgcccgtcaactgatgcagaaaagagaaagaatgtatgcgaagatgaagcagaattgtaaggatctcgcatcacaatgatcanaaaacgnggatcattccaagtttgatccgacttgcctttcaactcctaccctctgaacattaatcctttaatttcaacattggtttgcatcctttgcggagncttgaggagcaaacatggagttccagggattccccaggtgagttcaccaggaatccgcatttttactatcgttaaatcatggctttacgtattcctttaagctggcttcaggactatgtcgacctggaacaggatccggtaaaacttgcagaagctttaaccatatccggaatggaggttgaaagtatcgagcatcttggggacaactggggtgaattctgcagagtgggngaagtaaaaaaggtggttgcccatcccaacgcggatagtctcagcattgcaacagtcgattatggaacggatcaatctctggaagtggttaccggggccccaaacatccgggaactggagaaacagtttccccaaactcctcctaaaatagccttagcactttctggagcaaaactgatcaatccttatcatgaagaccatccgctggttcgcctgaaaccatcaaagatccgtggcatcgtttcggaaggtatgatttgctccgaattggaattaggactgggagaagcccatgaaggggttttgtttctcccggatgatgcaccggttggaggaatgctgaaggattatttgggagacgcggttcttgaatttgacatcaaaggcggttttgcgcatttgctttcaatttacggacttgcgagggaaaccgcagccattacccggatgcgg

SEQ ID NO: 577 - DNA, 4000 bp, Escherichia coli
gtcgataaacccgatagaagttctgctggctttccccattttatttcccccgtttctgacccagcagggtcaatggatccataaagggtggttctttcggggtagccgttaacctgcgaggtttgcctttctgcgagcgtgtgcggtgattgctggcttcagtcgcactttgtatagccgcaggacgtcgaagctgcaggatgatatcgtcatagagttcaacagctgcatcggtctctgcgcccgcgtagtgggcataggtggtagttagagatttatgccccaataatttgcgcacaacttcgtaatggccaggccttgcatccagcagcagcttggctgccgcatggcggaactgatgtggcgtcatctgcaaaccggtgtgatcaaagattgccttcttcatctgattgcgcagagcagattgatcttttggttttccattgcgacccggaaacaaatacggatttgttacgggtataaacagtgaccgccaatccttgatgtatcgtttaatccgctctgaggcctcagctggtaaaaggaagtctaacgcctgatcgttttttacttcatgcgcggggaaagacagtcgaagccgatctgcctgccagcccatatgttcatcaagccggattgtagacaggttatgtatgcgaataggagcaaacatcatgatctcaatcgcaatcgctgcctgcaccataatctgtgcggctttccgctttttagcaccctcagtcgtaaggctgatctcaacagctctggtccacaaagtagagggaagtgctacatatctggtgaccgcctttggatcattgaactgagccatcgcagtgcggtttttattactcaatccaggcgtcttgatccgtagccgttcgatagccctttggtagaaggccagcacatcatcatcacaggctcgatacttaattgcataacaacgaaccgcccaggctacctcaccaatatgctttgatgttttcttaccattacgctcgtagaaccaacgcatcccacgctcaaacattgcaggcacaacgagctcatccagggagatcacctcagtaagatcaacaccgctgtgatgaagagcagacaaatatcgccacaaatggccgcggaagatttcaacacttttaggcctaaagggctttgacatggacccaaaaagatccgttccggccaagtgagatagataatctgcaaggtcatctttaatggcgtccgacaccaagctgccatcaacaccgtaaagacggtcgtcatacttggggatgttcaattcaatctgcggccatcctgaggcagcgtgatcgccagcaagccggttccatactcggcaaacagattgatggcgcaccttgggttttttaatcaggctctctgcttccaaggcggtgagaaaatcagagctgatagcatcactcatctcagatggtacaatgccgtttgctgagcaatatctgaacaagcggcttagttctgtgcgtgcatagcggtcaccttccattaaatcccaaagttgctgccagcttgaagacattttagccatgtaaggcgcaagttttgtagaaattcccgcaatacgaaaggcagagagcaggagtgaccggacgttttgaatgcggcgctcgctaacgccgagctgtattgggtgcagccggctcaggcgtggccgcaaatagctcatagcagcgggtatcatttcaggcggcatattaagccatttggcaactgttgtgattgccgaacagatctcgcggcgcctaagtaattccactgaccgatcttcttcgacgcgctctttaagcgtagcaagggagatcatagtcagatctgcaaaagggtttgggtcaactgttggatccgtcatggtgttgcctccttggatgtttgtgaaggatgatgaatgccatgcgatgacaagtgaagccaaaagagtaaaaaatcaacatatagtgcatatatgacacatttaatggtcaaaataacaacatatagatattcactatcgagcaacacacccttgccaagcaggctcagcgtgtaacaaacggggacaaactgacctctcatgaccagtcgttccgatctacaaaatgcagcaaatcatccattcgaaaccgcatacttttgctgatacgaacggcgtgcaaatcaccagcagaaaccagacgctggacggtgcggacagagacgctcaaaaacgcagccgtctcttgcggtgtgagcaagcggaccggcttggaactctggctgtgatcagacatcgtttaaagttccagtgtcggtgggaaggttttttgcgcatgccaattgcgctgcaccagcgcgttcaattgcgtcagcagcagcatgtcgcgccagcaggcgtacaatcgcgagaagaggctctttgggattttcagcagtttgctgtgcagtgaatgggatgtggttctgtgtcatgctccaggtttaaaggtcgcatgatctaaaaaggttggtaacttatccgtccaaaaccatgagtgttattttggcgcctttaggcgttgtccagttgcggcgcgatcaagttctcttgctccattcagtgtcatatgtggtttaataaccttgatgctttccaaaagcagttcttcataggagttcatctgtctaggcaggcgttcggcagatgtgtcgcttgtcagtgttggccttttgccacttgcttgtgtgtaaacccggcggacagcatttgcgacgtcatgcagactgtggtgatgaccaccaccaggcttttcgcggtgtactgctcttgtatggtaaattgcttttttaagttcatccaagtctcttaaagatcctaagtctagttcgttcaatcctattttatggtcaccgctaatcttgaggcgagcatttaaaaagtgtttggttacctcatgaagctcaaaaatgcgttcccgcagacgctctggagtagggggcttagctcgcaagcgttttaggaaattattaagcttgcgtagttcgctggcccataaatcgcgtagggcgtcttccccgtcacatagctggtcatacaacgcgcgttcaagttccttacgaatgatctcggaataaaggccaacgtaacaattgggatctattcgttccaatgcggcatccacagcaaccaacttaattggttcaatatgcggatattctgtaaggccgtttgtcatggtaatagcgtaaaggagacgctatttaaaaaatagcaaaacccaaattaattatttctcagaagcaatacctttgattttgtaataggcttccaaaaatcctctaggattacgcgatcatcgcgactgacacctacttgcgccaccatacccagaacgatcgtggctggtgtttaatctgcaaagggcactgcaaaaacaatcaggaactccacttctacgcacgcaccaatttcaagctgaaccgtgccgctgctctcgctgagtggctcatacggccgcagattaatagtttcggccttcaccagtgcggaaaccgattttcgaaaaaactcgacagcttgtaggaaagagcccctttgatccatgacttcagtacgatcagaggcgatacccttgccgggcttccatcttgtggatgatatcctattacatgcttggtttcagcgatgtcccaccgcatgccggggttatctgacatcaaattcaatgcagcaaactgcacgtctttggcgcagatagccgcgcgcattccatttaagaagtctctgtcgctcagccacatttcctgaccccaacggcccatcgccatgtgagggccaggctgattgtcgtgtgtccactgagtccagccgatgcgcaggcaaatgaccgaaagcccatgatatttagcaaaatacgccccagttcgttcgccaaaaagctttgacataccgtaagcgttcaacggacccgggggtgtggcactgttcagcggatcatctgtgaaccgtttgtcgccatggatccagtttgagctggca

SEQ ID NO: 578 - DNA, 4000 bp, Escherichia coli
  misc_feature (513)..(513): n is a, c, g, or t
  misc_feature (665)..(665): n is a, c, g, or t
  misc_feature (773)..(773): n is a, c, g, or t
  misc_feature (777)..(777): n is a, c, g, or t
  misc_feature (793)..(793): n is a, c, g, or t
  misc_feature (800)..(800): n is a, c, g, or t
  misc_feature (809)..(809): n is a, c, g, or t
  misc_feature (1007)..(1007): n is a, c, g, or t
  misc_feature (1992)..(1992): n is a, c, g, or t
  misc_feature (2231)..(2231): n is a, c, g, or t
  misc_feature (2584)..(2584): n is a, c, g, or t
  misc_feature (2591)..(2591): n is a, c, g, or t
  misc_feature (2594)..(2594): n is a, c, g, or t
  misc_feature (2887)..(2887): n is a, c, g, or t
  misc_feature (3830)..(3830): n is a, c, g, or t
ggataacttcttcgaattctggttcaggttcgtctacagtaacataagcgacctcgagatagatagggtggacgaggtcatggagagggtggacttgaaccaatatttctctttcaagttcgagaagttgataagggaactgatcagagagggactcttgaatctacccttccactatcactacgtgggtaagtacttgcaccggggtgaggaggtagacgtggtagtggagggtaaagatgccatattcttaggggaggtaaagtggtctgatgacgtggacgcgagacagctggtgatgaagatgaaaagggtcatgcagaggataaatgaaggaaagaaggagtattacggagttttcgccaggaccctcaggaattgtgaggaggttatctgttatgacctcaaggaactggagaggactttaataaaaggacaataaaccttgcccatcccagggcagagtgtcttggacaaaagcttacgttaagattgtatatagccctcatgaangaggagttaaccccttgggacttctctgactacggggagagaataggcgacctgatcgagacgtacaaggaggagagggccgagcgggaggatgtcagctatagaaagagatttgggcttcataggatttcatatttgtaccaatcttcagnccttggtgttcacggagtgagggctgacccgttcacatcctcagcgggctgactccactcaacggagtgttctaccagctaggaaaaacccgcacaccttcagtcacncccngtcgggacaccttcantctccgntgtgactanatttaagttttctaacaaatgatggggctttacggtttatctcaaacgttgacaacagcggagaatcttggtaaaaagttttaaaccttatccttaaatcggagtcgttgaggaaggaggacatactcacaatagccttcgctctggatacgggggcaccgcttactctggagaccctgcacctgagtacggagtcgnccctgttgggcataatcttcacttccccaatggtcatatcgttatacctcgttctgaggacctcgtggcccgacagaggcctctatacctacattagaggaggtttcgtggggaggtttcagttgtactcgtgggtggggagttacttcctatatctctcctataccttggactatgccttcctttacggtggattgaaggagtacctccccttcttgatctctgcagtagctacgtccctagtcctggccgtagattggggatcttacctgatacttccggtcactctccttcagttgtcgttatcggttcctctaggctggagattctctcccctcctcactggaacctctgggttgagctttaccgaattgctcaactcatctctcctgctagtctgcctgaccttgataccttattggcggggtaggagtgacgtcgcgtgggttgttccagtctctttgctattctcgggttccttggctgtcgtgggttcctttttcgtcacttccacagccgagaccctacaggctctgtcaatggttggcctagtcttggccgagggaatagctctgaggaacgtactggggacctggagattaagggctcctctcctgcccctggccttcctggggtcaatcctcctcagcttcattaaccccagtgagtattacgatttaaccatacctccctcagtggcgttactctacatatccctagccttggcattcctctacctacctgtcaaggggtggggtagactagctcagctgtggagtgtggtgcttatgatctacggcctttaccagtcgttggtgatagcccaagggcttcaattgactaccatcgtcgtggctgttctctcctgtctattgggctcatggttaaatgtgctcttgagaagaaaaggcggaactggtagagggaaagcgagtgaccctcaagggagagacctaggtaaatccgtttgtccctacactatcanttcattcattttatcttcattcatgatcgagtgtggggacttagccctcaaccacccacttgctgtaggtgggtcatgggactccttagagcccaacggcacggggctcacatcccggatcactcccacccttttgggcatagcccacatcggtgtgggaggtcatcatttatcagcaaaaattcgttataaacagatataaaaagatttctattaacacgaaaaaggatacagcccanaacgttgacgagaatatttcgtggacaacatatgacgtttttacgttttaaaaattctttattgcttttaattctcgctatgatgtaagtcacgtttttatatataatgttatcaaaattttccttcgagacctcacaaccaatgacggggatcgcccacgagggtagtagcaagcgaaaggtgaatgggtgggtattggtgcccctctcgactatccccgatggtctaaggatggccgtgttatccctagagggaacccacggcgggattagaattaattaaaaagcaggggttatgggactttaacgtaacttaaagattttcatcaacctggtggtccacctgaacggcnctcgagnacntgaggaacgcctccacgctcctcaggttcagctcccccaccagctccctgacgactctggccctcccgttgattaggaccacgaggatcaggccgattaaccttcctgctcctcccgttccccctcaccactcccagcctgtttaccgtcttgaccagcctctccctagcgaactcgatctgtccctttccgcaccttttcagcgggacgacgttgaaaaacttctcgctaataccggctttttcgtattacctccctaagattccaataattgctgtaaagaggataagttntgccacggataaacacgaacctcaaccggtctccagcctcttgatcggcgttggaagaaatcctcccatccttacgaactggctcacttcaacttccttcacgtcagcaaccacaaccttacctaagagccctcccaggtcaacctcctctccaggcccggcctctagggggatcagtctcacaccaaggatcttattcaggacaattcccatggtcagtacgtccaggatcagcgcagttattctctcatgtcctaccctcttgctaaccccgaccatgtctattccgctgttacacaccgcagacatggccaggaggtctgagagctccagatatccctccctcactcggttggccatgattgggtcctcgctgacgggaatgaaggcactgctgagacctcccacgaggtttgtggccatggaaccacccttcttgacggcatccatcagtagggctaaggcggccacggatcctggacctcctaccctagatatgcccatggtctcaaggatctctgcaacactgtctcccacagttggcgagggagccaaggataagtccacagctcccatgttcactcccagctcctcagagacggctctccccactagctcccctaacctggtcaccttgaacgcggccctcttcacgacttcgtaaagttcctggaaggtgaaaggtttactccttcgtatcgcctccgctatgactcctggtccactcaccgctatattgacgcttgcgttcggcatcccagggccgtgatgtgcggatgggatgaagggtgagtcctgtggcgagttcactatcactgcggtcctagaggaggccttaggactcatttggaagagttgtgacacgaactgcttcacggcatccacgttgagtccagattgggtagaacctgcgttgagagcacctgatatcctttcagtgganttcagtacctcagccaaggagttcagcaagacttgagctcctctgctagtacccctctccgcgtatgccgaaaaccctcctacgtaatctacaccagtacccttggccattccgtccaatagtttacctacctccaccactaactcctctcgcgggttaggctctagaag

SEQ ID NO: 579 - DNA, 4000 bp, Escherichia coli
  misc_feature (1)..(1): n is a, c, g, or t
  misc_feature (3)..(13): n is a, c, g, or t
  misc_feature (15)..(15): n is a, c, g, or t
  misc_feature (17)..(19): n is a, c, g, or t
  misc_feature (22)..(26): n is a, c, g, or t
  misc_feature (28)..(30): n is a, c, g, or t
  misc_feature (32)..(38): n is a, c, g, or t
  misc_feature (40)..(40): n is a, c, g, or t
  misc_feature (42)..(49): n is a, c, g, or t
  misc_feature (52)..(53): n is a, c, g, or t
  misc_feature (55)..(56): n is a, c, g, or t
  misc_feature (58)..(59): n is a, c, g, or t
  misc_feature (61)..(61): n is a, c, g, or t
  misc_feature (65)..(65): n is a, c, g, or t
  misc_feature (67)..(68): n is a, c, g, or t
  misc_feature (74)..(76): n is a, c, g, or t
  misc_feature (78)..(84): n is a, c, g, or t
  misc_feature (86)..(87): n is a, c, g, or t
  misc_feature (90)..(101): n is a, c, g, or t
  misc_feature (103)..(106): n is a, c, g, or t
  misc_feature (109)..(120): n is a, c, g, or t
  misc_feature (122)..(126): n is a, c, g, or t
  misc_feature (128)..(129): n is a, c, g, or t
  misc_feature (131)..(131): n is a, c, g, or t
  misc_feature (133)..(135): n is a, c, g, or t
  misc_feature (137)..(140): n is a, c, g, or t
  misc_feature (142)..(147): n is a, c, g, or t
  misc_feature (150)..(151): n is a, c, g, or t
  misc_feature (153)..(164): n is a, c, g, or t
  misc_feature (166)..(169): n is a, c, g, or t
  misc_feature (171)..(175): n is a, c, g, or t
  misc_feature (177)..(178): n is a, c, g, or t
  misc_feature (180)..(180): n is a, c, g, or t
  misc_feature (182)..(184): n is a, c, g, or t
  misc_feature (186)..(188): n is a, c, g, or t
  misc_feature (190)..(192): n is a, c, g, or t
  misc_feature (194)..(194): n is a, c, g, or t
  misc_feature (196)..(197): n is a, c, g, or t
  misc_feature (199)..(199): n is a, c, g, or t
  misc_feature (201)..(206): n is a, c, g, or t
  misc_feature (208)..(213): n is a, c, g, or t
  misc_feature (215)..(215): n is a, c, g, or t
  misc_feature (217)..(221): n is a, c, g, or t
  misc_feature (223)..(223): n is a, c, g, or t
  misc_feature (225)..(226): n is a, c, g, or t
  misc_feature (246)..(246): n is a, c, g, or t
  misc_feature (470)..(470): n is a, c, g, or t
  misc_feature (1064)..(1064): n is a, c, g, or t
  misc_feature (1290)..(1290): n is a, c, g, or t
  misc_feature (1353)..(1353): n is a, c, g, or t
  misc_feature (1775)..(1775): n is a, c, g, or t
  misc_feature (1991)..(1991): n is a, c, g, or t
  misc_feature (2007)..(2008): n is a, c, g, or t
  misc_feature (2114)..(2114): n is a, c, g, or t
  misc_feature (2168)..(2168): n is a, c, g, or t
  misc_feature (2386)..(2386): n is a, c, g, or t
  misc_feature (2437)..(2437): n is a, c, g, or t
  misc_feature (2615)..(2615): n is a, c, g, or t
  misc_feature (2620)..(2620): n is a, c, g, or t
  misc_feature (2624)..(2624): n is a, c, g, or t
  misc_feature (2633)..(2633): n is a, c, g, or t
  misc_feature (2663)..(2663): n is a, c, g, or t
  misc_feature (2688)..(2688): n is a, c, g, or t
  misc_feature (2691)..(2691): n is a, c, g, or t
  misc_feature (2693)..(2693): n is a, c, g, or t
  misc_feature (2696)..(2697): n is a, c, g, or t
  misc_feature (2700)..(2700): n is a, c, g, or t
  misc_feature (2705)..(2706): n is a, c, g, or t
  misc_feature (2714)..(2715): n is a, c, g, or t
  misc_feature (2717)..(2718): n is a, c, g, or t
  misc_feature (2721)..(2721): n is a, c, g, or t
  misc_feature (2723)..(2724): n is a, c, g, or t
  misc_feature (2726)..(2727): n is a, c, g, or t
  misc_feature (2729)..(2729): n is a, c, g, or t
  misc_feature (2732)..(2733): n is a, c, g, or t
  misc_feature (2735)..(2737): n is a, c, g, or t
  misc_feature (2739)..(2741): n is a, c, g, or t
  misc_feature (2745)..(2745): n is a, c, g, or t
  misc_feature (2748)..(2750): n is a, c, g, or t
  misc_feature (2752)..(2752): n is a, c, g, or t
  misc_feature (2755)..(2756): n is a, c, g, or t
  misc_feature (2759)..(2767): n is a, c, g, or t
  misc_feature (2772)..(2775): n is a, c, g, or t
  misc_feature (2778)..(2780): n is a, c, g, or t
  misc_feature (2783)..(2783): n is a, c, g, or t
  misc_feature (2787)..(2788): n is a, c, g, or t
  misc_feature (2790)..(2791): n is a, c, g, or t
  misc_feature (2795)..(2796): n is a, c, g, or t
  misc_feature (2798)..(2798): n is a, c, g, or t
  misc_feature (2801)..(2802): n is a, c, g, or t
  misc_feature (2804)..(2804): n is a, c, g, or t
  misc_feature (2807)..(2807): n is a, c, g, or t
  misc_feature (2809)..(2812): n is a, c, g, or t
  misc_feature (2814)..(2815): n is a, c, g, or t
  misc_feature (2820)..(2824): n is a, c, g, or t
  misc_feature (2826)..(2826): n is a, c, g, or t
  misc_feature (2828)..(2832): n is a, c, g, or t
  misc_feature (2834)..(2834): n is a, c, g, or t
  misc_feature (2836)..(2839): n is a, c, g, or t
  misc_feature (2843)..(2843): n is a, c, g, or t
  misc_feature (2845)..(2846): n is a, c, g, or t
  misc_feature (2848)..(2850): n is a, c, g, or t
  misc_feature (2853)..(2854): n is a, c, g, or t
  misc_feature (2856)..(2856): n is a, c, g, or t
  misc_feature (2859)..(2859): n is a, c, g, or t
  misc_feature (2861)..(2861): n is a, c, g, or t
  misc_feature (2864)..(2865): n is a, c, g, or t
  misc_feature (2867)..(2867): n is a, c, g, or t
  misc_feature (2869)..(2872): n is a, c, g, or t
  misc_feature (2874)..(2874): n is a, c, g, or t
  misc_feature (2876)..(2876): n is a, c, g, or t
  misc_feature (2881)..(2882): n is a, c, g, or t
  misc_feature (2884)..(2885): n is a, c, g, or t
  misc_feature (2887)..(2887): n is a, c, g, or t
  misc_feature (2889)..(2890): n is a, c, g, or t
  misc_feature (2899)..(2903): n is a, c, g, or t
  misc_feature (2905)..(2905): n is a, c, g, or t
  misc_feature (2911)..(2913): n is a, c, g, or t
  misc_feature (2915)..(2916): n is a, c, g, or t
  misc_feature (2918)..(2918): n is a, c, g, or t
  misc_feature (2921)..(2921): n is a, c, g, or t
  misc_feature (2924)..(2925): n is a, c, g, or t
  misc_feature (2934)..(2934): n is a, c, g, or t
  misc_feature (2937)..(2938): n is a, c, g, or t
  misc_feature (2941)..(2941): n is a, c, g, or t
  misc_feature (2943)..(2943): n is a, c, g, or t
  misc_feature (2945)..(2945): n is a, c, g, or t
  misc_feature (2950)..(2950): n is a, c, g, or t
  misc_feature (2952)..(2952): n is a, c, g, or t
  misc_feature (2954)..(2954): n is a, c, g, or t
  misc_feature (2956)..(2958): n is a, c, g, or t
  misc_feature (2960)..(2968): n is a, c, g, or t
  misc_feature (2972)..(2973): n is a, c, g, or t
  misc_feature (2977)..(2977): n is a, c, g, or t
  misc_feature (2980)..(2980): n is a, c, g, or t
  misc_feature (2983)..(2984): n is a, c, g, or t
  misc_feature (2986)..(2987): n is a, c, g, or t
  misc_feature (2989)..(2990): n is a, c, g, or t
  misc_feature (2993)..(2994): n is a, c, g, or t
  misc_feature (2996)..(2996): n is a, c, g, or t
  misc_feature (2998)..(3000): n is a, c, g, or t
  misc_feature (3002)..(3006): n is a, c, g, or t
  misc_feature (3008)..(3008): n is a, c, g, or t
  misc_feature (3012)..(3012): n is a, c, g, or t
  misc_feature (3014)..(3016): n is a, c, g, or t
  misc_feature (3018)..(3019): n is a, c, g, or t
  misc_feature (3022)..(3022): n is a, c, g, or t
  misc_feature (3026)..(3030): n is a, c, g, or t
  misc_feature (3032)..(3032): n is a, c, g, or t
  misc_feature (3034)..(3034): n is a, c, g, or t
  misc_feature (3042)..(3042): n is a, c, g, or t
  misc_feature (3046)..(3047): n is a, c, g, or t
  misc_feature (3053)..(3053): n is a, c, g, or t
  misc_feature (3056)..(3056): n is a, c, g, or t
  misc_feature (3058)..(3058): n is a, c, g, or t
  misc_feature (3066)..(3066): n is a, c, g, or t
  misc_feature (3074)..(3074): n is a, c, g, or t
  misc_feature (3078)..(3078): n is a, c, g, or t
  misc_feature (3080)..(3082): n is a, c, g, or t
  misc_feature (3085)..(3085): n is a, c, g, or t
  misc_feature (3089)..(3090): n is a, c, g, or t
  misc_feature (3092)..(3094): n is a, c, g, or t
  misc_feature (3096)..(3097): n is a, c, g, or t
  misc_feature (3100)..(3104): n is a, c, g, or t
  misc_feature (3107)..(3114): n is a, c, g, or t
  misc_feature (3119)..(3119): n is a, c, g, or t
  misc_feature (3122)..(3127): n is a, c, g, or t
  misc_feature (3129)..(3135): n is a, c, g, or t
  misc_feature (3137)..(3145): n is a, c, g, or t
  misc_feature (3148)..(3162): n is a, c, g, or t
  misc_feature (3164)..(3165): n is a, c, g, or t
  misc_feature (3168)..(3168): n is a, c, g, or t
  misc_feature (3170)..(3173): n is a, c, g, or t
  misc_feature (3175)..(3183): n is a, c, g, or t
  misc_feature (3186)..(3186): n is a, c, g, or t
  misc_feature (3189)..(3207): n is a, c, g, or t
  misc_feature (3209)..(3236): n is a, c, g, or t
  misc_feature (3238)..(3261): n is a, c, g, or t
  misc_feature (3263)..(3282): n is a, c, g, or t
  misc_feature (3284)..(3292): n is a, c, g, or t
  misc_feature (3294)..(3300): n is a, c, g, or t
  misc_feature (3302)..(3319): n is a, c, g, or t
  misc_feature (3321)..(3370): n is a, c, g, or t
  misc_feature (3372)..(3372): n is a, c, g, or t
  misc_feature (3374)..(3377): n is a, c, g, or t
  misc_feature (3380)..(3381): n is a, c, g, or t
  misc_feature (3383)..(3390): n is a, c, g, or t
  misc_feature (3392)..(3395): n is a, c, g, or t
  misc_feature (3398)..(3398): n is a, c, g, or t
  misc_feature (3400)..(3406): n is a, c, g, or t
  misc_feature (3408)..(3424): n is a, c, g, or t
  misc_feature (3426)..(3435): n is a, c, g, or t
  misc_feature (3437)..(3443): n is a, c, g, or t
  misc_feature (3445)..(3465): n is a, c, g, or t
  misc_feature (3468)..(3470): n is a, c, g, or t
  misc_feature (3472)..(3481): n is a, c, g, or t
  misc_feature (3483)..(3483): n is a, c, g, or t
  misc_feature (3485)..(3491): n is a, c, g, or t
  misc_feature (3493)..(3499): n is a, c, g, or t
  misc_feature (3501)..(3505): n is a, c, g, or t
  misc_feature (3507)..(3526): n is a, c, g, or t
  misc_feature (3528)..(3536): n is a, c, g, or t
  misc_feature (3538)..(3547): n is a, c, g, or t
  misc_feature (3549)..(3549): n is a, c, g, or t
  misc_feature (3551)..(3555): n is a, c, g, or t
  misc_feature (3557)..(3568): n is a, c, g, or t
  misc_feature (3570)..(3573): n is a, c, g, or t
  misc_feature (3575)..(3577): n is a, c, g, or t
  misc_feature (3580)..(3604): n is a, c, g, or t
  misc_feature (3606)..(3609): n is a, c, g, or t
  misc_feature (3611)..(3625): n is a, c, g, or t
  misc_feature (3627)..(3628): n is a, c, g, or t
  misc_feature (3631)..(3635): n is a, c, g, or t
  misc_feature (3637)..(3640): n is a, c, g, or t
  misc_feature (3642)..(3651): n is a, c, g, or t
  misc_feature (3653)..(3654): n is a, c, g, or t
  misc_feature (3656)..(3656): n is a, c, g, or t
  misc_feature (3658)..(3663): n is a, c, g, or t
  misc_feature (3665)..(3667): n is a, c, g, or t
  misc_feature (3669)..(3670): n is a, c, g, or t
  misc_feature (3672)..(3673): n is a, c, g, or t
  misc_feature (3675)..(3680): n is a, c, g, or t
  misc_feature (3682)..(3685): n is a, c, g, or t
  misc_feature (3687)..(3687): n is a, c, g, or t
  misc_feature (3689)..(3689): n is a, c, g, or t
  misc_feature (3691)..(3692): n is a, c, g, or t
  misc_feature (3694)..(3704): n is a, c, g, or t
  misc_feature (3706)..(3712): n is a, c, g, or t
  misc_feature (3714)..(3714): n is a, c, g, or t
  misc_feature (3716)..(3723): n is a, c, g, or t
  misc_feature (3725)..(3733): n is a, c, g, or t
  misc_feature (3735)..(3748): n is a, c, g, or t
  misc_feature (3750)..(3750): n is a, c, g, or t
  misc_feature (3752)..(3752): n is a, c, g, or t
  misc_feature (3754)..(3773): n is a, c, g, or t
  misc_feature (3775)..(3780): n is a, c, g, or t
  misc_feature (3782)..(3785): n is a, c, g, or t
  misc_feature (3787)..(3793): n is a, c, g, or t
  misc_feature (3795)..(3799): n is a, c, g, or t
  misc_feature (3801)..(3807): n is a, c, g, or t
  misc_feature (3809)..(3812): n is a, c, g, or t
  misc_feature (3814)..(3826): n is a, c, g, or t
  misc_feature (3829)..(3835): n is a, c, g, or t
  misc_feature (3837)..(3857): n is a, c, g, or t
  misc_feature (3859)..(3860): n is a, c, g, or t
  misc_feature (3863)..(3864): n is a, c, g, or t
  misc_feature (3866)..(3881): n is a, c, g, or t
  misc_feature (3883)..(3886): n is a, c, g, or t
  misc_feature (3888)..(3889): n is a, c, g, or t
  misc_feature (3891)..(3894): n is a, c, g, or t
  misc_feature (3896)..(3898): n is a, c, g, or t
  misc_feature (3900)..(3901): n is a, c, g, or t
  misc_feature (3903)..(3905): n is a, c, g, or t
  misc_feature (3907)..(3932): n is a, c, g, or t
  misc_feature (3935)..(3952): n is a, c, g, or t
  misc_feature (3954)..(3956): n is a, c, g, or t
  misc_feature (3959)..(3960): n is a, c, g, or t
  misc_feature (3962)..(3967): n is a, c, g, or t
  misc_feature (3969)..(3972): n is a, c, g, or t
  misc_feature (3974)..(3979): n is a, c, g, or t
  misc_feature (3982)..(3989): n is a, c, g, or t
  misc_feature (3991)..(3991): n is a, c, g, or t
  misc_feature (3993)..(3997): n is a, c, g, or t
  misc_feature (3999)..(4000): n is a, c, g, or t
ncnnnnnnnnnnncngnnnggnnnnnannnannnnnnnancnnnnnnnncannanngnnancaananngccatnnnannnnnnntnngcnnnnnnnnnnnngnnnnggnnnnnnnnnnnnannnnngnnantnnntnnnngnnnnnnttnntnnnnnnnnnnnntnnnnannnnntnncntnnngnnnannnangnnancnnnnnncnnnnnnanannnnntncnntataaaaggtcgtctgaaanccgcgatacaggctttcagacgacctttcttattgcttaagaacgttgaaacagattatttggctgcttcaggttggctggctgcttggctggcggctgccgctttatcgccttctttggcgaagtatttggcgtggattttgtcgtattcgccgctgtcgcgtacttttttcagcgcttcgttcagcattttgacggtcgcttcgtcgcctttgcgtgcggcnatgccgtagttttcaatcgtgaaatcaggcagggtgatgaagtccatgcttttggtcgggttgtttttcacatagttggcgatgaccgcgctgtcgctgactacggcatccacgccgccgttttccagctctttgatgaccaaaggaacgctctcgaagcgggcgattttaggattgtcgttgcccaagagtttggaaacggagaagtcgccggtttgtccggtaacgacgccgactttcgccatgtttttgaggtcgtctgaagaggcgacttttttacctttgggaacgaggacgacttgggtgatttcaaaataagggtcggtgaaatccatggactgcttgcgctcgtcggtaatggttacgccggagatgacgatatccgtatcgccgtttttgagcgcggggaagaggctgtcccaaggctggtgtttgaattcgactttgaatccgccggcttttgccatcgcgttcatcaaatcgacgtcgaaaccttcaacgttgccggcggaatccaatgattcgaaaggggcgaattcggcgttggcggcgacgcggtacactttgtcggctttaggggctgacgaggaagcntctttgctttggccgccgcaggcggagagtgccagcgcggagcaggcgagggcggctgcaatccattttttcatgttcatggggaggttccttctttacggatattaataaataaacggatagtttaacacggtttggggaagtcgctacgcgtcagtggtctttttcgcggaaaaaagcgtaggttacgtcatggaagaggtcggtatgcgggctgtcttcgtanttcaattcggcgagtgcgtcttcaaaggcaagctggatggactcgacggcttcgtttgccatntcggacggcagcgaacggatcaggcctttgagggcggtggcgaggacgtggttctgcatacgcaaaacgtcgttggcttcttccaaatattcgaggcgttgttcgatgctgctcatgatgtgttcctgggaatctgttaaaataccgcattatagcaaatcacggcattcgctatgcgcgtgaaatgaaatgacacaacggaagaacgaaagctaaaaatggatacgaatcgtcccgatacgccacaacaaacggatgaaagcctggattgggaaagccgcttggaaaagctgcggcaaacccgccaattgaacgcaccttacacacacgcgcctttggtgcgcgaatctcaagagcctgccttcgagcagaagcccaaagccaagtcggtcaagctcgacgatgccaaccgcgatgccgtnttgacggaatatctgcgcaaatggcaggaggaacacaacgccatgctggaggaagaagccgctgaaacggcggagaccgatgcgatggtgattttgcaggaaaactggctgaacgcgcagtcttcgctgcaaatgagcgcgtccgacaggcaaatcgagtccacgcgcacggtttggctgaacccgaaacgtaaaacagtcgaatttgacgcgccngcaaaagcagaggcanngtcgtctgaaaacgaaaatccgcaggcgcaagagcaggtttcagacgaccccaaagaagaaacgccgccgattaccgtccatatcaacgtgttgaacccgcaggtnatcaaccgcagggaagtgttctgcatttccgagcaagacctgagcgagcgtttnatcaaacgcctgcgcccgcacgtcgccgacgccgtcaacggcatgatacgcaccgccgtgcagaaacaaatggcgctgtttacctaccagctccaacaaaccctcagcgaacaggcgcccgatttggtagaacagcttttggattacaacgtgaaaaaaatcctgaacgacatcaaatacgaaatgaaatacagtcagggaaacaaaaaagcgtgatnacgcagccgccgcttcaggtatcggactgaaaatgctgatttttccgccgnttttgtatataatggcggctcacgttatcgtgatttaactcctttcaaataatttatgcccgatgaaccgtcgggcatttttttgggcgtggattttatgaacaaaaacaaatggatttggatactgattgttgccgccgtggtagtcggttatcaaaaaatgcagcaggggcggcanggtcnggcngcggatgcngtaccaacccaaacgcagccccaaacccangcggaaaaacgcccatccgagcagnctnantcnnagnagtcnnaatccaannanncgnanncnnancanncnnngnnngacngcnnngnagnncannnnnnnnnggaannnntannncancaanncnntgannancannanagngnnnntnnggtgnnnnncncnnnnncngnnnncaananncnnnccnncnacnancanngnannnncnancagcnntnnancnngaaactgtnnnnngngcaaannntnntngtngcnnacaacatcnacnncgncnanaaaancnangnnntnnnnnnnnncgannaagncgnctnntnngnngannangnnngnnnnnancagngnnncnnccnccannnnncncnccacgacnccgnnggccgncangncgacggcnggctggancacnannngcnggtnnannnannaannnnnggnnnnnnnnaaaangtnnnnnnannnnnnntnnnnnnnnnccnnnnnnnnnnnnnnncnnaantnnnnannnnnnnnnaanaannnnnnnnnnnnnnnnnnntnnnnnnnnnnnnnnnnnnnnnnnnnnnnannnnnnnnnnnnnnnnnnnnnnnnannnnnnnnnnnnnnnnnnnnannnnnnnnnannnnnnnannnnnnnnnnnnnnnnnnannnnnnnnnnnnnnnnnnnnnnnnnnnnnnnnnnnnnnnnnnnnnnnnnnanannnngcnncnnnnnnnnannnnaanannnnnnncnnnnnnnnnnnnnnnnncnnnnnnnnnncnnnnnnngnnnnnnnnnnnnnnnnnnnnncgnnntnnnnnnnnnnanannnnnnngnnnnnnntnnnnncnnnnnnnnnnnnnnnnnnnngnnnnnnnnnannnnnnnnnngncnnnnnannnnnnnnnnnncnnnngnnngcnnnnnnnnnnnnnnnnnnnnnnnnncnnnnannnnnnnnnnnnnnncnncannnnngnnnncnnnnnnnnnncnncngnnnnnngnnngnnannannnnnngnnnnancnannannnnnnnnnnnannnnnnnancnnnnnnnncnnnnnnnnncnnnnnnnnnnnnnngnangnnnnnnnnnnnnnnnnnnnnannnnnngnnnntnnnnnnngnnnnncnnnnnnncnnnntnnnnnnnnnnnnngannnnnnngnnnnnnnnnnnnnnnnnnnnngnntcnncnnnnnnnnnnnnnnnnannnnanncnnnngnnncnngnnngnnnnnnnnnnnnnnnnnnnnnnnnnnatnnnnnnnnnnnnnnnnnnannnaanncnnnnnngnnnncnnnnnngtnnnnnnnngngnnnnngnn

SEQ ID NO: 580 - DNA, 4000 bp, Escherichia coli
  misc_feature (992)..(992): n is a, c, g, or t
  misc_feature (1084)..(1084): n is a, c, g, or t
  misc_feature (1936)..(1936): n is a, c, g, or t
  misc_feature (2015)..(2015): n is a, c, g, or t
  misc_feature (3275)..(3275): n is a, c, g, or t
  misc_feature (3557)..(3557): n is a, c, g, or t
  misc_feature (3560)..(3560): n is a, c, g, or t
  misc_feature (3581)..(3581): n is a, c, g, or t
  misc_feature (3620)..(3620): n is a, c, g, or t
gccaagcagctcttgctcggttttgcccgtcataagctccgctatacggttacaaccagcaaacctgccttcttcatttcggtaatatattaagtctggtgaggcatcgatgattgaacgtaacaaggttgataagcggcgtgcttgtgcttcttgttctgatttatcctgaatttctttttctaagtctttaaacagcgcctcacgctcttcttgtgcttgcttgcgctgctctatctcgtgattaagctgtctgatgttgctttgaagttcgcggttaagaaagacatcttcttcacgcaaactttccaactggcttaccacttcctttaagttggtacgtgagttttctaattgcttgattaactcactaaagaaataaagtacccaaggcgcagataacatggtcagtactacagcactgatgaagtcatcgggctgaacctggcttcccatgctcacgcgaattacgtatgagccccctagcgtaaacacaagcgaaagaacaacaaacaatatgctgagctttagagtgccaaaacgctgaacaaattgggcaaagcgaattgcccaagaatcgtttggtgaatctgaatgcatgtacgtctaatttaagcttattttgcggttatcctatcaggctttcctcttttcgggaatgcggtttgtcaaagcataactctgtggccctgctcagaattaggatttgaaaggcgacttttcagtaatttcattaatgtatttggtattcacccatcccaccttcgtgtaagacactttcgcccactcccctcgcttttccagtatttttagcacttcgcccttattcaaaccgttctcgacagttgggtacgaaacatctggcccttttctcacattcagcgaattggcacttacattggccacccgctttacagggctagcgagatcccgctgaatttgatcatgcgcctctcgctgtgaattcgaatcacttgactcagttgcccacntttcactatcactttgcaaaacagcggctttgagtctttgaaggggaaaagcggggccaggatcgacctttcgtgacggcgctatttcttcntgcccgacgatagtagagatgttgtagtggctacacaacgctttacacagcgatagcgtcctaacaatttgtacgtcggtgtacttgtgccaatagcccatagactgttggttaatgtgctgggcagctaatacttcattctcgccaaaaatttcgccaaaccaactttcaaaggtgccgtctcctctagccttaagctggccggcattgtctaattcaatgccgatagagtactgattcaagccactacgcccctcgtaataactttctcctgcgtgccacgctattttattagtcggaagcatttgaacaatgtcaccattgcgtccaacggcaaagtgagctgacacaccgctatcggcattggtcaagacattcaccgaagatgaaaggctactaccggcggtaaaatgaataacaatagtatcgggagatccagattgaaaacgcccagatgtgttaggagaaagcctgaaggtgatattgtcgccagttagaatatgatcatctatactaaataaaggcagtggtgaagcatgtagtgtattcatacaataatccttattgtcttaacagcacgccaccacagtgaatttttattcttcgccttccacataagcgtacactcaattcacacacagggctctctatcaacatccttcagcgcaccacgagccttacctgtggttaattttcaaccaatatagcaaactacttatattagtggaaccatagctttacaaattaataaaaatacaccgcaaaccgctattgacaacataaaacatcaatttcaaagcatatttattcattaataaaacgcaaatgagaagtaatatcatttataagggntgagttattcactttgcaatactgataacatttttgttacaaacataaatgacgacacgtaagcaactgattaatatanatttaattatatttatactaattcactataaagcttatacttttagcgtttgattttagtttttaatgtgggtattttgtacggcccgcatcgcaataatgcataaaaatgcggaaacgactggaatcctctaataataaaataacgacaagaaaggcgcacgccgcgagcaataccgctcgcaggcataaaagacgtctaataatgttgtgatacgcaaacctaggcgcatctacacgcaacgcataccttgcccagtcaaaaggttgaaggagttaagagatgagtttatataatcccaatgattcccgggacaactgtgggtttggcttaatcgctcacactcatggggaagccagtcatgaattggtaactactgcaatacacggtcttgaccgtatgcagcatcgtggcggtatcgccgccgacgggaaaaccggtgacggctgtggtttattactacagaaaccggatgcgttcttccatgcaatcgccgaagaaaatggctggaaactcagcaaaaaatacggcgtgggcatgattttcttaagtcaggacccggtacttgcgcaagccgcgcgtgaagtacttaatgaagaactagaaaaagaaacactttcagtagtgggttggcgcgaagtgcctgtcgaccactcagtactgggtgaattagcgctaacgggtgttccacaaattgaacaggtatttgtgaacgcgccagcaggttggagaaaacgcgaccttgagcgtcgtttgtatatgatccgccgccgcgctgaaaaacgtcttgagaaagatcccgatttttacgtagcttgtttgtcgggcttggtaacgatctacaaaggcttggtaatgccaaaagatttacccgccttttatcacgatcttgccgatgagcgtatgcaaagcgcaatttgcgttttccaccaacgcttttcaacaaatacactaccacgctggccgcttgctcagcctttccgcttccttgcgcacaacggtgagattaacaccattaaaggaaaccgcgactgggccatggcacgtgctgctaaattcgcaacgccacttattccagatcttaaagatgcagcacctttcgttaatactgaaggttcagactcatcatcgctggataacatgctggagctattcttagccggcggtatggatttattccgtgctatgcggttacttgttccacccgcctatcaaaacaacaagaccatggacgatgatcttcgtgcattttacgagttnaactctatgcacatggaaccatgggacggcccagcgggtatcgttttaactaacggtcgccacgttgcctgtaaccttgatagaaatggtctacgtcctgctcgttacgttattactaagaacggtttcattaccctagcctcagaagtaggtatctgggattacgagcaagctgacgtaattgaaaaaggccgtgtaggcccaggtgaaatgcttgctgtagacacatacacaggcaaaatctggcgctctactgaaattgatgaagacttaaaagcacgncanccttataaagagtggctaganaagcatattcgtcgacttacaccaattgaaaagcttgangcgtcattaattggtaaacgcgtgtttgacgacgatgccatggcggtgtaccacaagctacacgcctacagctatgaagaaattcaacaagttgtaaaagtactcgcgaaagacggtcaagaagccgttggttcaatgggtgatgacacgccaatggcggttatgtcctcgcgtcaacgtacggtttacgactatttccgtcagcaattcgcacaggttactaacccgcctatcgacccgctacgtgaaaaccacgttatgtcgttggcaacctgtattggccgcgagcaaaacgtatttagcgaaacctcaggttacgctgaccgcgtattgtttgactcgccagtgctaatgtataccgaccttaagcaactgcgcga

SEQ ID NO: 581 - DNA, 4000 bp, Escherichia coli
  misc_feature (8)..(8): n is a, c, g, or t
  misc_feature (50)..(50): n is a, c, g, or t
  misc_feature (1468)..(1468): n is a, c, g, or t
  misc_feature (1511)..(1511): n is a, c, g, or t
  misc_feature (3417)..(3417): n is a, c, g, or t
aaatatgnaatataaccaaaccaaaaattaaaaatgggaacaagtaatgnaaactatagaatctatttaacgtcggattacctaccgaatagccaccccacaaccattctgtaatattttctccaattaaaggaattgcactaaatagatttgttataactgttgctgcccaaaaactcatttgaccccagggcaaaacatatcccgtaaaagctgtcaccatcataaataaataaattattaatccggttatccaaatcacttctcttggagatttgtatgacccgtaatataaagttctaaagatatgaatataaacagccaaaaaaaacatcgaggagccattagcgtgaacatatctaatcaaccatccataatttatatctcgcattatgtgttcaatgctttcaaaagcgagatctgagtgcgctacataatacatggcaagaataacgcctgttacaatttgagtaattaaaaaaaaggtcaatatgccaccaaaggtccaccaataatttaaatttcttggtgttggatactctcttaaatgagcactaagtgttaaaagtggcaaacggctatcaaaccactgacctatcttagaattaggaatatacttttcttcactcataattaatttagcctattttaattatattgttatttatgaattcatatttaggtatctctaagttgtttggggcaggacctttcctaactctaccagaagtatcgtagtgcgaaccatgacaaggacaaaaccatccattatattctcccttttcccctaaaggaacgcagccaagatgagtgcaaaccccaaccattactagccattctggatccttagctctatcttcatctttctcaggatcttttaaatctttcagatctactgctgaagcttcttcaatttcttctttagttctccttctgataaatatgggttttcctctccacaatacaattatggtttttcctacctcaacactactaacatctacctcagttgttgccagagctttaactgaagagccaggattcatctgatctatcaaaggccaaatagctgcacctactcccacagcaccaatcgtataggttaccgtaaagagaaaatctcttctttccgactgaattttcttactcatagattcgaagctattgtgtaatatatattattaattaattagaatttacataaatttgctagggtcagaatgacacataaactaactttatattaaaaaaaatgtttaatattgccctatatcaacctgatatacctcaaaacactgctgctataattcgtttatgttcctgttttgatacaacccttgaaataatagaaccttgcggttttcaccttgatgataagagattaaaaaaagttgctatggattatttagataaaagtaaaataattacttataaatcatatgaaaaatttttgataaataaaaaaaantcaagaataatacttatgacaacaaaagctaaaaaaaattatnataactttatatttaaaccaaaagatacaatactatttggtcgagaaagtgaaggagttccaagaatagtacacaataaatcttatcaaagactaaaaatacctttaaaaaataatgcgagatcgctaaatattgctatgaccgtagcaataacgttatcggaagccttaaaacaaaattcttttttaaaatgattaaagatatctactcaaaaaaaaggttagcaagtagttggttcaacctactccaacaaactatttgctatgaattcgaaaaaattgaacatgatttaggtaaaaaaactggacaaaaacccaaatattttgaaaaaaatacttggaaaaaatctaagatgaaaaacgaaggcggtggatcatatgccataattaaaaatgggcttgtatttgatagtgcgggcgtaaacttttcggaagtatcgggaaaatttcataaaaaatttagatctcaaatcttgggggcaaagaaaaatccgaattactgggcttctggaatttcaattgttgcacatatgaaaaatccaaaaatccctgctatgcattttaatacaagattcattgttacttcacaaaactggtttggtggtggaatggatgcaacgccctccgttaaagatcaagaagagacaaaactctttcacaagaaaataagagtaatgtgtaataaacataactcaaattattatttaaagtacaaaaaatggtgtgatgattatttttacttaccacatagaaaagaaagacgcggcataggaggaatattttttgattataaaagagacaattggaaaaaggattttaattttattagagatgtgggtttatgttttcttgactgtgccaaaaccatcataagaaaaaaaatgtacagaaaatggacagaaaaacaaaaaaatgaccaactaattaaaagaggtcgttatgttgaatttaatttattatatgatagaggtaccaaatttggtctaaacacaggtggtaacgctgaagctattttaatgtctttgcctccaacagctagatggaaataacatatggaaaaggaaccaattacttctcaaggccttgagaaactaaaaaaagaattaaatgaattgaaaaatataaaacgaccaaaaatcgttgaggcaattgctgaagctagagcacatggtgatctaaaagaaaatgcggaataccatgcagcaaaagaagaacaggccaaaattgaaagtaggataattgaaataaatgatttaattgcaagagcaaacgttattgacgtaacaaaattagaaaaaaaaaataatgtaatttttggttctacggtctacctgattgatttagataataatgaaaaaaaaacctacaaaatagtgggcaaagatgaagctgacatgacaaaaaattatatttattttagatcgccaatcggtaaagccttgatagggaaaaataaaaaggatttagtagcagttaaaactccatcaggcgaaaaaaattttgaaatagcagaaatcaaatatatttaattctggttaatttttttcaaagacttttttaaaacctcttcatccagaacgaagttatttgcaatccatttttcctctagtgacttaagttttttaccaagttcatttccagtttcatatccgcatttttttaaataatctccagagataggaaattttggtatttcgcaactttttatataatttaataatttctcaacatttaaagtttctattttgtcgtttacgcatgttgaaaaaagcaacagattccttacatcatctttgcttgataaataaattaattttttaatattttcttctgagaaaaatttcttacttttaagattttcaaaatttctcgaaatatttttaaatctgttttcaatactattggangttttatatttatgacaaaaatattcgtaatcatcagactgatctataacaagcaatgctaaaatcaaatgattgtcatatttgtcttttaattttttatccaaactattaattttatttaatctttcgtaatatttgagttctggaaatatatttaaaataattttttttgattgattattatcaaataaactataaacgttttttaaagataagattttttttaattcatcaaatattctttcattagaaattttatttaatccattgatatttttattaatggattgaatggtatcttggtcataatctgttttgctatactgtataaaaaatctaaagtaccgtaaaatacgtaaataatcttcttgtattcttttttctggcgaaccaataaattttatctttccattttgtaaatccgataccccatttagaggatcaaaaattcgtccctctatatctgcatatattgcatttattgtaaaatctcttcgtgaagcatctagttcccaatttgaagtaaactgcactttagcatgtctgccatctgttgaaacatcttttctcaaagttgtaattt

SEQ ID NO: 582 - DNA, 4000 bp, Escherichia coli
  misc_feature (2)..(8): n is a, c, g, or t
  misc_feature (10)..(15): n is a, c, g, or t
  misc_feature (17)..(17): n is a, c, g, or t
  misc_feature (19)..(23): n is a, c, g, or t
  misc_feature (26)..(31): n is a, c, g, or t
  misc_feature (33)..(33): n is a, c, g, or t
  misc_feature (35)..(36): n is a, c, g, or t
  misc_feature (39)..(42): n is a, c, g, or t
  misc_feature (44)..(65): n is a, c, g, or t
  misc_feature (67)..(76): n is a, c, g, or t
  misc_feature (78)..(79): n is a, c, g, or t
  misc_feature (81)..(84): n is a, c, g, or t
  misc_feature (86)..(105): n is a, c, g, or t
  misc_feature (107)..(108): n is a, c, g, or t
  misc_feature (110)..(116): n is a, c, g, or t
  misc_feature (119)..(123): n is a, c, g, or t
  misc_feature (125)..(125): n is a, c, g, or t
  misc_feature (127)..(129): n is a, c, g, or t
  misc_feature (131)..(132): n is a, c, g, or t
  misc_feature (134)..(138): n is a, c, g, or t
  misc_feature (140)..(141): n is a, c, g, or t
  misc_feature (143)..(143): n is a, c, g, or t
  misc_feature (145)..(147): n is a, c, g, or t
  misc_feature (149)..(153): n is a, c, g, or t
  misc_feature (155)..(165): n is a, c, g, or t
  misc_feature (167)..(176): n is a, c, g, or t
  misc_feature (178)..(183): n is a, c, g, or t
  misc_feature (185)..(191): n is a, c, g, or t
  misc_feature (193)..(203): n is a, c, g, or t
  misc_feature (205)..(205): n is a, c, g, or t
  misc_feature (207)..(207): n is a, c, g, or t
  misc_feature (209)..(213): n is a, c, g, or t
  misc_feature (215)..(216): n is a, c, g, or t
  misc_feature (218)..(220): n is a, c, g, or t
  misc_feature (222)..(225): n is a, c, g, or t
  misc_feature (227)..(227): n is a, c, g, or t
  misc_feature (229)..(229): n is a, c, g, or t
  misc_feature (231)..(232): n is a, c, g, or t
  misc_feature (234)..(234): n is a, c, g, or t
  misc_feature (239)..(241): n is a, c, g, or t
  misc_feature (243)..(245): n is a, c, g, or t
  misc_feature (247)..(255): n is a, c, g, or t
  misc_feature (257)..(261): n is a, c, g, or t
  misc_feature (263)..(264): n is a, c, g, or t
  misc_feature (266)..(269): n is a, c, g, or t
  misc_feature (271)..(279): n is a, c, g, or t
  misc_feature (282)..(282): n is a, c, g, or t
  misc_feature (284)..(284): n is a, c, g, or t
  misc_feature (288)..(291): n is a, c, g, or t
  misc_feature (294)..(296): n is a, c, g, or t
  misc_feature (298)..(309): n is a, c, g, or t
  misc_feature (311)..(312): n is a, c, g, or t
  misc_feature (314)..(317): n is a, c, g, or t
  misc_feature (319)..(325): n is a, c, g, or t
  misc_feature (327)..(334): n is a, c, g, or t
  misc_feature (336)..(337): n is a, c, g, or t
  misc_feature (339)..(346): n is a, c, g, or t
  misc_feature (348)..(349): n is a, c, g, or t
  misc_feature (351)..(352): n is a, c, g, or t
  misc_feature (355)..(360): n is a, c, g, or t
  misc_feature (363)..(380): n is a, c, g, or t
  misc_feature (382)..(389): n is a, c, g, or t
  misc_feature (393)..(394): n is a, c, g, or t
  misc_feature (398)..(398): n is a, c, g, or t
  misc_feature (400)..(400): n is a, c, g, or t
  misc_feature (402)..(402): n is a, c, g, or t
  misc_feature (404)..(404): n is a, c, g, or t
  misc_feature (406)..(409): n is a, c, g, or t
  misc_feature (411)..(411): n is a, c, g, or t
  misc_feature (413)..(414): n is a, c, g, or t
  misc_feature (416)..(417): n is a, c, g, or t
  misc_feature (419)..(425): n is a, c, g, or t
  misc_feature (427)..(429): n is a, c, g, or t
  misc_feature (431)..(431): n is a, c, g, or t
  misc_feature (434)..(435): n is a, c, g, or t
  misc_feature (437)..(442): n is a, c, g, or t
  misc_feature (444)..(448): n is a, c, g, or t
  misc_feature (450)..(452): n is a, c, g, or t
  misc_feature (454)..(454): n is a, c, g, or t
  misc_feature (458)..(458): n is a, c, g, or t
  misc_feature (460)..(469): n is a, c, g, or t
  misc_feature (472)..(486): n is a, c, g, or t
  misc_feature (488)..(509): n is a, c, g, or t
  misc_feature (511)..(515): n is a, c, g, or t
  misc_feature (517)..(519): n is a, c, g, or t
  misc_feature (521)..(532): n is a, c, g, or t
  misc_feature (534)..(538): n is a, c, g, or t
  misc_feature (541)..(548): n is a, c, g, or t
  misc_feature (550)..(571): n is a, c, g, or t
  misc_feature (574)..(581): n is a, c, g, or t
  misc_feature (583)..(590): n is a, c, g, or t
  misc_feature (592)..(598): n is a, c, g, or t
  misc_feature (600)..(699): n is a, c, g, or t
  misc_feature (701)..(711): n is a, c, g, or t
  misc_feature (714)..(752): n is a, c, g, or t
  misc_feature (754)..(805): n is a, c, g, or t
  misc_feature (807)..(857): n is a, c, g, or t
  misc_feature (859)..(868): n is a, c, g, or t
  misc_feature (870)..(890): n is a, c, g, or t
  misc_feature (892)..(955): n is a, c, g, or t
  misc_feature (957)..(959): n is a, c, g, or t
  misc_feature (961)..(979): n is a, c, g, or t
  misc_feature (981)..(992): n is a, c, g, or t
  misc_feature (994)..(1034): n is a, c, g, or t
  misc_feature (1036)..(1068): n is a, c, g, or t
  misc_feature (1070)..(1154): n is a, c, g, or t
  misc_feature (1156)..(1157): n is a, c, g, or t
  misc_feature (1159)..(1162): n is a, c, g, or t
  misc_feature (1164)..(1164): n is a, c, g, or t
  misc_feature (1167)..(1185): n is a, c, g, or t
  misc_feature (1187)..(1191): n is a, c, g, or t
  misc_feature (1193)..(1202): n is a, c, g, or t
  misc_feature (1204)..(1204): n is a, c, g, or t
  misc_feature (1215)..(1215): n is a, c, g, or t
  misc_feature (1306)..(1306): n is a, c, g, or t
  misc_feature (1336)..(1336): n is a, c, g, or t
  misc_feature (1973)..(1973): n is a, c, g, or t
  misc_feature (1988)..(1988): n is a, c, g, or t
  misc_feature (2380)..(2382): n is a, c, g, or t
  misc_feature (2391)..(2393): n is a, c, g, or t
  misc_feature (2561)..(2561): n is a, c, g, or t
  misc_feature (2570)..(2570): n is a, c, g, or t
  misc_feature (2573)..(2573): n is a, c, g, or t
  misc_feature (2580)..(2580): n is a, c, g, or t
  misc_feature (2583)..(2583): n is a, c, g, or t
  misc_feature (2591)..(2592): n is a, c, g, or t
  misc_feature (2638)..(2638): n is a, c, g, or t
  misc_feature (2879)..(2879): n is a, c, g, or t
  misc_feature (2899)..(2899): n is a, c, g, or t
  misc_feature (2930)..(2933): n is a, c, g, or t
  misc_feature (2936)..(2939): n is a, c, g, or t
  misc_feature (2941)..(2943): n is a, c, g, or t
  misc_feature (2945)..(2945): n is a, c, g, or t
  misc_feature (2947)..(2950): n is a, c, g, or t
  misc_feature (2952)..(2953): n is a, c, g, or t
  misc_feature (2955)..(2956): n is a, c, g, or t
  misc_feature (2961)..(2963): n is a, c, g, or t
  misc_feature (2965)..(2968): n is a, c, g, or t
  misc_feature (2971)..(2975): n is a, c, g, or t
  misc_feature (2977)..(2978): n is a, c, g, or t
  misc_feature (2981)..(2981): n is a, c, g, or t
  misc_feature (2983)..(2983): n is a, c, g, or t
  misc_feature (2987)..(2988): n is a, c, g, or t
  misc_feature (2990)..(2995): n is a, c, g, or t
  misc_feature (2997)..(3003): n is a, c, g, or t
  misc_feature (3005)..(3005): n is a, c, g, or t
  misc_feature (3007)..(3009): n is a, c, g, or t
  misc_feature (3012)..(3014): n is a, c, g, or t
  misc_feature (3016)..(3017): n is a, c, g, or t
  misc_feature (3019)..(3019): n is a, c, g, or t
  misc_feature (3023)..(3024): n is a, c, g, or t
  misc_feature (3026)..(3029): n is a, c, g, or t
  misc_feature (3031)..(3038): n is a, c, g, or t
  misc_feature (3040)..(3043): n is a, c, g, or t
  misc_feature (3045)..(3045): n is a, c, g, or t
  misc_feature (3047)..(3049): n is a, c, g, or t
  misc_feature (3051)..(3057): n is a, c, g, or t
  misc_feature (3062)..(3066): n is a, c, g, or t
  misc_feature (3068)..(3069): n is a, c, g, or t
  misc_feature (3071)..(3071): n is a, c, g, or t
  misc_feature (3073)..(3073): n is a, c, g, or t
  misc_feature (3075)..(3078): n is a, c, g, or t
  misc_feature (3080)..(3081): n is a, c, g, or t
  misc_feature (3083)..(3083): n is a, c, g, or t
  misc_feature (3085)..(3085): n is a, c, g, or t
  misc_feature (3087)..(3092): n is a, c, g, or t
  misc_feature (3095)..(3095): n is a, c, g, or t
  misc_feature (3097)..(3098): n is a, c, g, or t
  misc_feature (3101)..(3112): n is a, c, g, or t
  misc_feature (3115)..(3116): n is a, c, g, or t
  misc_feature (3118)..(3118): n is a, c, g, or t
  misc_feature (3121)..(3123): n is a, c, g, or t
  misc_feature (3127)..(3128): n is a, c, g, or t
  misc_feature (3130)..(3130): n is a, c, g, or t
  misc_feature (3134)..(3136): n is a, c, g, or t
  misc_feature (3140)..(3150): n is a, c, g, or t
  misc_feature (3154)..(3157): n is a, c, g, or t
  misc_feature (3159)..(3159): n is a, c, g, or t
  misc_feature (3161)..(3161): n is a, c, g, or t
  misc_feature (3163)..(3163): n is a, c, g, or t
  misc_feature (3166)..(3166): n is a, c, g, or t
  misc_feature (3168)..(3169): n is a, c, g, or t
  misc_feature (3171)..(3176): n is a, c, g, or t
  misc_feature (3178)..(3178): n is a, c, g, or t
  misc_feature (3182)..(3186): n is a, c, g, or t
  misc_feature (3189)..(3190): n is a, c, g, or t
  misc_feature (3192)..(3192): n is a, c, g, or t
  misc_feature (3194)..(3194): n is a, c, g, or t
  misc_feature (3197)..(3200): n is a, c, g, or t
  misc_feature (3202)..(3204): n is a, c, g, or t
  misc_feature (3206)..(3215): n is a, c, g, or t
  misc_feature (3217)..(3217): n is a, c, g, or t
  misc_feature (3219)..(3223): n is a, c, g, or t
  misc_feature (3227)..(3227): n is a, c, g, or t
  misc_feature (3231)..(3231): n is a, c, g, or t
  misc_feature (3233)..(3237): n is a, c, g, or t
  misc_feature (3239)..(3240): n is a, c, g, or t
  misc_feature (3242)..(3243): n is a, c, g, or t
  misc_feature (3246)..(3248): n is a, c, g, or t
  misc_feature (3252)..(3253): n is a, c, g, or t
  misc_feature (3255)..(3257): n is a, c, g, or t
  misc_feature (3259)..(3260): n is a, c, g, or t
  misc_feature (3262)..(3262): n is a, c, g, or t
  misc_feature (3265)..(3266): n is a, c, g, or t
  misc_feature (3269)..(3270): n is a, c, g, or t
  misc_feature (3272)..(3277): n is a, c, g, or t
  misc_feature (3280)..(3280): n is a, c, g, or t
  misc_feature (3282)..(3283): n is a, c, g, or t
  misc_feature (3287)..(3290): n is a, c, g, or t
  misc_feature (3296)..(3302): n is a, c, g, or t
  misc_feature (3306)..(3311): n is a, c, g, or t
  misc_feature (3314)..(3314): n is a, c, g, or t
  misc_feature (3318)..(3322): n is a, c, g, or t
  misc_feature (3325)..(3326): n is a, c, g, or t
  misc_feature (3331)..(3332): n is a, c, g, or t
  misc_feature (3334)..(3334): n is a, c, g, or t
  misc_feature (3336)..(3336): n is a, c, g, or t
  misc_feature (3339)..(3341): n is a, c, g, or t
  misc_feature (3343)..(3346): n is a, c, g, or t
  misc_feature (3349)..(3350): n is a, c, g, or t
  misc_feature (3352)..(3353): n is a, c, g, or t
  misc_feature (3357)..(3366): n is a, c, g, or t
  misc_feature (3370)..(3370): n is a, c, g, or t
  misc_feature (3372)..(3378): n is a, c, g, or t
  misc_feature (3381)..(3387): n is a, c, g, or t
  misc_feature (3391)..(3394): n is a, c, g, or t
  misc_feature (3396)..(3396): n is a, c, g, or t
  misc_feature (3399)..(3416): n is a, c, g, or t
  misc_feature (3418)..(3418): n is a, c, g, or t
  misc_feature (3420)..(3422): n is a, c, g, or t
  misc_feature (3424)..(3429): n is a, c, g, or t
  misc_feature (3431)..(3433): n is a, c, g, or t
  misc_feature (3435)..(3436): n is a, c, g, or t
  misc_feature (3438)..(3439): n is a, c, g, or t
  misc_feature (3444)..(3446): n is a, c, g, or t
  misc_feature (3448)..(3456): n is a, c, g, or t
  misc_feature (3460)..(3461): n is a, c, g, or t
  misc_feature (3464)..(3465): n is a, c, g, or t
  misc_feature (3467)..(3473): n is a, c, g, or t
  misc_feature (3476)..(3482): n is a, c, g, or t
  misc_feature (3485)..(3486): n is a, c, g, or t
  misc_feature (3491)..(3491): n is a, c, g, or t
  misc_feature (3493)..(3497): n is a, c, g, or t
  misc_feature (3499)..(3499): n is a, c, g, or t
  misc_feature (3501)..(3503): n is a, c, g, or t
  misc_feature (3505)..(3512): n is a, c, g, or t
  misc_feature (3514)..(3517): n is a, c, g, or t
  misc_feature (3519)..(3527): n is a, c, g, or t
  misc_feature (3530)..(3530): n is a, c, g, or t
  misc_feature (3533)..(3536): n is a, c, g, or t
  misc_feature (3541)..(3541): n is a, c, g, or t
  misc_feature (3543)..(3546): n is a, c, g, or t
  misc_feature (3549)..(3552): n is a, c, g, or t
  misc_feature (3557)..(3557): n is a, c, g, or t
  misc_feature (3559)..(3568): n is a, c, g, or t
  misc_feature (3570)..(3572): n is a, c, g, or t
  misc_feature (3574)..(3574): n is a, c, g, or t
  misc_feature (3578)..(3589): n is a, c, g, or t
  misc_feature (3592)..(3595): n is a, c, g, or t
  misc_feature (3597)..(3601): n is a, c, g, or t
  misc_feature (3605)..(3606): n is a, c, g, or t
  misc_feature (3608)..(3608): n is a, c, g, or t
  misc_feature (3616)..(3616): n is a, c, g, or t
  misc_feature (3620)..(3621): n is a, c, g, or t
  misc_feature (3623)..(3623): n is a, c, g, or t
  misc_feature (3630)..(3631): n is a, c, g, or t
  misc_feature (3634)..(3634): n is a, c, g, or t
  misc_feature (3638)..(3642): n is a, c, g, or t
  misc_feature (3644)..(3673): n is a, c, g, or t
  misc_feature (3676)..(3679): n is a, c, g, or t
  misc_feature (3681)..(3683): n is a, c, g, or t
  misc_feature (3686)..(3692): n is a, c, g, or t
  misc_feature (3698)..(3702): n is a, c, g, or t
  misc_feature (3704)..(3712): n is a, c, g, or t
  misc_feature (3715)..(3722): n is a, c, g, or t
  misc_feature (3726)..(3726): n is a, c, g, or t
  misc_feature (3729)..(3733): n is a, c, g, or t
  misc_feature (3735)..(3740): n is a, c, g, or t
  misc_feature (3743)..(3743): n is a, c, g, or t
  misc_feature (3745)..(3748): n is a, c, g, or t
  misc_feature (3750)..(3750): n is a, c, g, or t
  misc_feature (3752)..(3754): n is a, c, g, or t
  misc_feature (3756)..(3761): n is a, c, g, or t
  misc_feature (3764)..(3772): n is a, c, g, or t
  misc_feature (3775)..(3782): n is a, c, g, or t
  misc_feature (3784)..(3790): n is a, c, g, or t
  misc_feature (3792)..(3792): n is a, c, g, or t
  misc_feature (3794)..(3797): n is a, c, g, or t
  misc_feature (3800)..(3802): n is a, c, g, or t
  misc_feature (3804)..(3816): n is a, c, g, or t
  misc_feature (3818)..(3822): n is a, c, g, or t
  misc_feature (3824)..(3827): n is a, c, g, or t
  misc_feature (3831)..(3834): n is a, c, g, or t
  misc_feature (3836)..(3844): n is a, c, g, or t
  misc_feature (3848)..(3848): n is a, c, g, or t
  misc_feature (3851)..(3856): n is a, c, g, or t
  misc_feature (3858)..(3858): n is a, c, g, or t
  misc_feature (3860)..(3864): n is a, c, g, or t
  misc_feature (3867)..(3867): n is a, c, g, or t
  misc_feature (3870)..(3879): n is a, c, g, or t
  misc_feature (3881)..(3882): n is a, c, g, or t
  misc_feature (3886)..(3887): n is a, c, g, or t
  misc_feature (3891)..(3894): n is a, c, g, or t
  misc_feature (3896)..(3898): n is a, c, g, or t
  misc_feature (3900)..(3902): n is a, c, g, or t
  misc_feature (3904)..(3907): n is a, c, g, or t
  misc_feature (3909)..(3909): n is a, c, g, or t
  misc_feature (3911)..(3917): n is a, c, g, or t
  misc_feature (3919)..(3919): n is a, c, g, or t
  misc_feature (3921)..(3924): n is a, c, g, or t
  misc_feature (3926)..(3929): n is a, c, g, or t
  misc_feature (3931)..(3944): n is a, c, g, or t
  misc_feature (3946)..(3960): n is a, c, g, or t
  misc_feature (3962)..(3968): n is a, c, g, or t
  misc_feature (3970)..(3970): n is a, c, g, or t
  misc_feature (3972)..(3972): n is a, c, g, or t
  misc_feature (3983)..(3984): n is a, c, g, or t
  misc_feature (3986)..(3997): n is a, c, g, or t
  misc_feature (3999)..(4000): n is a, c, g, or t
cnnnnnnncnnnnnngncnnnnncgnnnnnngngnncgnnnncnnnnnnnnnnnnnnnnnnnnnntnnnnnnnnnncnnannnncnnnnnnnnnnnnnnnnnnnngnncnnnnnnncgnnnnngncnnncnncnnnnncnncncnnncnnnnngnnnnnnnnnnncnnnnnnnnnncnnnnnngnnnnnnncnnnnnnnnnnntnancnnnnncnngnnngnnnngntngnngnacccnnncnnncnnnnnnnnngnnnnngnncnnnncnnnnnnnnnccngntcannnngcnnngnnnnnnnnnnnntnngnnnncnnnnnnnannnnnnnngnnannnnnnnngnngnngcnnnnnngannnnnnnnnnnnnnnnnnannnnnnnnacgnngcgntngngncnnnnangnngnncnnnnnnntnnngngcnngnnnnnngnnnnncnnngncgcnannnnnnnnnnggnnnnnnnnnnnnnnncnnnnnnnnnnnnnnnnnnnnnncnnnnncnnncnnnnnnnnnnnngnnnnntannnnnnnnannnnnnnnnnnnnnnnnnnnnngcnnnnnnnngnnnnnnnntnnnnnnncnnnnnnnnnnnnnnnnnnnnnnnnnnnnnnnnnnnnnnnnnnnnnnnnnnnnnnnnnnnnnnnnnnnnnnnnnnnnnnnnnnnnnnnnnnnnnnnnnnnncnnnnnnnnnnnttnnnnnnnnnnnnnnnnnnnnnnnnnnnnnnnnnnnnnnngnnnnnnnnnnnnnnnnnnnnnnnnnnnnnnnnnnnnnnnnnnnnnnnnnnnncnnnnnnnnnnnnnnnnnnnnnnnnnnnnnnnnnnnnnnnnnnnnnnnnnnngnnnnnnnnnngnnnnnnnnnnnnnnnnnnnnntnnnnnnnnnnnnnnnnnnnnnnnnnnnnnnnnnnnnnnnnnnnnnnnnnnnnnnnnnnnnnnnngnnngnnnnnnnnnnnnnnnnnnntnnnnnnnnnnnngnnnnnnnnnnnnnnnnnnnnnnnnnnnnnnnnnnnnnnnnngnnnnnnnnnnnnnnnnnnnnnnnnnnnnnnnnngnnnnnnnnnnnnnnnnnnnnnnnnnnnnnnnnnnnnnnnnnnnnnnnnnnnnnnnnnnnnnnnnnnnnnnnnnnnnnnnnnnnnncnncnnnngnggnnnnnnnnnnnnnnnnnnngnnnnncnnnnnnnnnncncaaaacacacnggttataggatcaagccttacgggcaattagtatcagttagcttaacgcattactgcgcttccacacctgacctatcaacgtcctggtctngaacgacccttcaaggggctcgaagccccngggatatctcatcttaaggcgagtttcccgcttagatgctttcagcggttatctcttccgaacatagctacccggcgatgccactggcgtgacaaccggtacaccagaggttcgtccactccggtcctctcgtactaggagcagcccccttcaaatatccaacgcccacggcagatagggaccaaactgtctcacgacgttttaaacccagctcacgtacctctttaaatggcgaacagccatacccttgggaccggctacagccccaggatgagatgagccgacatcgaggtgccaaacaccgccgtcgatatgaactcttgggcggtatcagcctgttatccccagagtaccttttatccgttgagcgatggcccttccatacagaaccaccggatcactatgacctgctttcgcacctgctcgacttgtcggtctcgcagttaagcacgcttatgccattgcactatcagcacgatttccgaccgtacctagcgtaccttcgtactcctccgttacactttgggaggagaccgccccagtcaaactgcctaccatgcactgtccccgacccggatcacgggccaaggttagaacctcaaacaaaccagggtggtatttcaaggacggctccacngaaactagcgttccngtttcatagcctcccacctatcctacacagatcggttcaaagtccaatgcaaagctacagtaaaggttcatggggtctttccgtctagccgcggggagattgcatcatcacaaacacttcaacttcgctgagtctcgggaggagacagtgtggccatcgttacgccattcgtgcaggtcggaacttacccgacaaggaatttcgctaccttaggaccgttatagttacggccgccgtttaccgggacttcaatcaagagcttgcaccccatcatttaatcttccggcaccgggcaggcgtcacaccctatacgtccactttcgtgtttgcagagtgctgtgtttttattaaacagtcgcagccaccagtttattgcaaccccttcacccttnnngcgcaggcnnntcaagctacaggggcgtaccttatcccgaagttacggtaccaatttgccgagttccttctcccgagttctctcaagcgccttagaatactcatctcgcccacctgtgtcggtttgcggtacggtcttgttaaactgaagcttagaggcttttcttggaaccacttccnattgcttcntcncctaagngantggcctcnnacccttgaattccgcgcccggatttgcctaagcgccttctccaatncaaggaccgggacttccaacacccggacaaccttccgcgatccgtccccccatcgcatttaacaatggtgcaggaatattaacctgcttcccatcagctacgcatttctgcctcgccttaggggccgactcaccctacgccgatgaacgttgcgtaggaaaccttgggcttacggcgagggggcctttcaccccctttatcgctactcatgtcagcattcgcacttccgatacctccagcncacttttcaatgcaccttcncaggcttacggaacgctctcctaccatgcannnnaannnncnnncncnnnntnngnntattnnntnnnnccnnnnnannttncncgcnngnnnnnncnnnnnnngngnnnttnnncnntntttnnannnngnnnnnnnntnnnncnannncnnnnnnnttttnnnnntnncncntnnnntnncncntnnnnnnatntnnggnnnnnnnnnnnnggnntnggnnntttnncncttnnnaccnnnnnnnnnnncccnnnntntntntcncnngnnnnnncncttnnnnnttnngngnttnnnntnnngnnnnnnnnnncnannnnncccncaancnnnnnanngnnctnnncccnnannngnnanacnnggnncnnnnnnaananntttnnnngagaannnnnnntttnnnnnnttntttnnnnnttnnccccnntncncannncnnnnccnnanntttnnnnnnnnnngggntnnnnnnnccnnnnnnngttnnnncnccnnnnnnnnnnnnnnnnnnanannncnnnnnntnnngnntnnacccnnngnnnnnnnnncccnnttnngnnnnnnnttnnnnnnnccnnccctnannnnntnannntnnnnnnnnannnnannnnnnnnnccnttnnnnaaaangnnnnccnnnnccccntnnnnnnnnnncnnntntttnnnnnnnnnnnnttnnnngnnnnntttnncncccccccngggnntnttttccnnttncccnnnnngnnnnnnnnnnnnnnnnnnnnnnnnnnnnnnttnnnncnnnggnnnnnnncccccnnnnntnnnnnnnnnttnnnnnnnncccnccnnnnntnnnnnnccncnnnntncnnncnnnnnnttnnnnnnnnnggnnnnnnnncnnnnnnngncnnnnttnnnannnnnnnnnnnnnannnnngnnnnaaannnnannnnnnnnncccnttnnnnnncncnnnnnttnggnnnnnnnnnntnntttnntttnnnngnnntnnntnnnntntnnnnnnncncnnnntnnnntnnnnnnnnnnnnnntnnnnnnnnnnnnnnncnnnnnnngngngggtttccccnntnnnnnnnnnnnngnn

SEQ ID NO: 583 - DNA, 4000 bp, Escherichia coli
  misc_feature (1)..(509): n is a, c, g, or t
  misc_feature (582)..(584): n is a, c, g, or t
  misc_feature (586)..(586): n is a, c, g, or t
  misc_feature (589)..(589): n is a, c, g, or t
  misc_feature (592)..(594): n is a, c, g, or t
  misc_feature (597)..(598): n is a, c, g, or t
  misc_feature (601)..(610): n is a, c, g, or t
  misc_feature (612)..(615): n is a, c, g, or t
  misc_feature (617)..(617): n is a, c, g, or t
  misc_feature (619)..(619): n is a, c, g, or t
  misc_feature (621)..(627): n is a, c, g, or t
  misc_feature (629)..(630): n is a, c, g, or t
  misc_feature (633)..(633): n is a, c, g, or t
  misc_feature (636)..(638): n is a, c, g, or t
  misc_feature (640)..(640): n is a, c, g, or t
  misc_feature (642)..(647): n is a, c, g, or t
  misc_feature (650)..(655): n is a, c, g, or t
  misc_feature (659)..(659): n is a, c, g, or t
  misc_feature (664)..(664): n is a, c, g, or t
  misc_feature (667)..(670): n is a, c, g, or t
  misc_feature (677)..(680): n is a, c, g, or t
  misc_feature (683)..(683): n is a, c, g, or t
  misc_feature (685)..(685): n is a, c, g, or t
  misc_feature (692)..(693): n is a, c, g, or t
  misc_feature (699)..(699): n is a, c, g, or t
  misc_feature (701)..(701): n is a, c, g, or t
  misc_feature (704)..(704): n is a, c, g, or t
  misc_feature (707)..(708): n is a, c, g, or t
  misc_feature (714)..(714): n is a, c, g, or t
  misc_feature (718)..(718): n is a, c, g, or t
  misc_feature (721)..(721): n is a, c, g, or t
  misc_feature (725)..(728): n is a, c, g, or t
  misc_feature (739)..(739): n is a, c, g, or t
  misc_feature (744)..(744): n is a, c, g, or t
  misc_feature (747)..(747): n is a, c, g, or t
  misc_feature (749)..(750): n is a, c, g, or t
  misc_feature (752)..(760): n is a, c, g, or t
  misc_feature (762)..(762): n is a, c, g, or t
  misc_feature (764)..(770): n is a, c, g, or t
  misc_feature (772)..(777): n is a, c, g, or t
  misc_feature (779)..(779): n is a, c, g, or t
  misc_feature (781)..(783): n is a, c, g, or t
  misc_feature (785)..(785): n is a, c, g, or t
  misc_feature (787)..(788): n is a, c, g, or t
  misc_feature (790)..(803): n is a, c, g, or t
  misc_feature (806)..(806): n is a, c, g, or t
  misc_feature (808)..(808): n is a, c, g, or t
  misc_feature (811)..(811): n is a, c, g, or t
  misc_feature (813)..(818): n is a, c, g, or t
  misc_feature (820)..(826): n is a, c, g, or t
  misc_feature (828)..(830): n is a, c, g, or t
  misc_feature (832)..(839): n is a, c, g, or t
  misc_feature (842)..(847): n is a, c, g, or t
  misc_feature (850)..(850): n is a, c, g, or t
  misc_feature (852)..(856): n is a, c, g, or t
  misc_feature (858)..(860): n is a, c, g, or t
  misc_feature (862)..(863): n is a, c, g, or t
  misc_feature (865)..(868): n is a, c, g, or t
  misc_feature (870)..(870): n is a, c, g, or t
  misc_feature (873)..(893): n is a, c, g, or t
  misc_feature (895)..(898): n is a, c, g, or t
  misc_feature (900)..(922): n is a, c, g, or t
  misc_feature (924)..(929): n is a, c, g, or t
  misc_feature (931)..(937): n is a, c, g, or t
  misc_feature (939)..(949): n is a, c, g, or t
  misc_feature (952)..(957): n is a, c, g, or t
  misc_feature (959)..(964): n is a, c, g, or t
  misc_feature (968)..(972): n is a, c, g, or t
  misc_feature (974)..(975): n is a, c, g, or t
  misc_feature (979)..(980): n is a, c, g, or t
  misc_feature (986)..(987): n is a, c, g, or t
  misc_feature (991)..(1000): n is a, c, g, or t
  misc_feature (1002)..(1002): n is a, c, g, or t
  misc_feature (1004)..(1004): n is a, c, g, or t
  misc_feature (1006)..(1008): n is a, c, g, or t
  misc_feature (1012)..(1014): n is a, c, g, or t
  misc_feature (1016)..(1018): n is a, c, g, or t
  misc_feature (1020)..(1021): n is a, c, g, or t
  misc_feature (1023)..(1045): n is a, c, g, or t
  misc_feature (1047)..(1047): n is a, c, g, or t
  misc_feature (1049)..(1061): n is a, c, g, or t
  misc_feature (1063)..(1068): n is a, c, g, or t
  misc_feature (1070)..(1070): n is a, c, g, or t
  misc_feature (1073)..(1074): n is a, c, g, or t
  misc_feature (1076)..(1077): n is a, c, g, or t
  misc_feature (1079)..(1079): n is a, c, g, or t
  misc_feature (1081)..(1081): n is a, c, g, or t
  misc_feature (1083)..(1084): n is a, c, g, or t
  misc_feature (1087)..(1088): n is a, c, g, or t
  misc_feature (1091)..(1092): n is a, c, g, or t
  misc_feature (1095)..(1105): n is a, c, g, or t
  misc_feature (1107)..(1107): n is a, c, g, or t
  misc_feature (1109)..(1116): n is a, c, g, or t
  misc_feature (1118)..(1119): n is a, c, g, or t
  misc_feature (1122)..(1128): n is a, c, g, or t
  misc_feature (1130)..(1135): n is a, c, g, or t
  misc_feature (1138)..(1142): n is a, c, g, or t
  misc_feature (1144)..(1144): n is a, c, g, or t
  misc_feature (1146)..(1152): n is a, c, g, or t
  misc_feature (1170)..(1170): n is a, c, g, or t
  misc_feature (1173)..(1173): n is a, c, g, or t
  misc_feature (1198)..(1199): n is a, c, g, or t
  misc_feature (1477)..(1477): n is a, c, g, or t
  misc_feature (1498)..(1498): n is a, c, g, or t
  misc_feature (1620)..(1620): n is a, c, g, or t
  misc_feature (1656)..(1656): n is a, c, g, or t
  misc_feature (1776)..(1776): n is a, c, g, or t
  misc_feature (1779)..(1779): n is a, c, g, or t
  misc_feature (1955)..(1955): n is a, c, g, or t
  misc_feature (1985)..(1985): n is a, c, g, or t
  misc_feature (1988)..(1988): n is a, c, g, or t
nnnnnnnnnnnnnnnnnnnnnnnnnnnnnnnnnnnnnnnnnnnnnnnnnnnnnnnnnnnnnnnnnnnnnnnnnnnnnnnnnnnnnnnnnnnnnnnnnnnnnnnnnnnnnnnnnnnnnnnnnnnnnnnnnnnnnnnnnnnnnnnnnnnnnnnnnnnnnnnnnnnnnnnnnnnnnnnnnnnnnnnnnnnnnnnnnnnnnnnnnnnnnnnnnnnnnnnnnnnnnnnnnnnnnnnnnnnnnnnnnnnnnnnnnnnnnnnnnnnnnnnnnnnnnnnnnnnnnnnnnnnnnnnnnnnnnnnnnnnnnnnnnnnnnnnnnnnnnnnnnnnnnnnnnnnnnnnnnnnnnnnnnnnnnnnnnnnnnnnnnnnnnnnnnnnnnnnnnnnnnnnnnnnnnnnnnnnnnnnnnnnnnnnnnnnnnnnnnnnnnnnnnnnnnnnnnnnnnnnnnnnnnnnnnnnnnnnnnnnnnnnnnnnnnnnnnnnnnnnnnnnnnnnnnnnnnnnnnnnnnnnnnnnnntcgcgcgcgcggtcgccgtcgtcgtcgcgcgcgcggtcgtcgcgcgcgcggcgcgatggcgattcgattcggnnncncgncgnnnacnncgnnnnnnnnnngnnnncncngnnnnnnnanngangcnnngntnnnnnncgnnnnnncgcngcgancgnnnncgcgcgnnnnatntntcgatcnncggttncntcnatnncgacgnccgnggncgtnnnnttcggcgcgcncgcgntcntnncnnnnnnnnncngnnnnnnngnnnnnncngnnncngnngnnnnnnnnnnnnnnggngncgncnnnnnngnnnnnnngnnngnnnnnnnngcnnnnnnggngnnnnntnnngnngnnnngnggnnnnnnnnnnnnnnnnnnnnnannnngnnnnnnnnnnnnnnnnnnnnnnnannnnnncnnnnnnncnnnnnnnnnnnccnnnnnnannnnnngggnnnnngnntttnntttttnntttnnnnnnnnnntncntnnncgannngnnngnncnnnnnnnnnnnnnnnnnnnnnnncncnnnnnnnnnnnnnannnnnncngcnnanncncncnnaanncgnncgnnnnnnnnnnngngnnnnnnnngnncgnnnnnnncnnnnnnggnnnnnanannnnnnncggtgttacaacgatgangcncccgtcacgacgccggcgcggcgcnngacggacgcgcgacgtcgacgacgaacgcgacggcgggcgacggcgcgggcgcgaacgcgaagcccggacgcgcggggcgtcgacgcgcgtcgcgcgacgccgacgacggcgacgcgcgaagctcgccgcgcacgcgagcggtgatgccgaaggattttaagccgccgcgaacgacgccggcgtgaagggcgaggtaggcgcgctcgacggcgtcgagcgcggcgtcggcgcgcgcgtcggcggcggacgacgcggcggcgctcgagcccgcgctcgngcccgcgctcgagctcgagcntcgcacgcctcgcatcgctcgaaactgatcgtcgtgaaacacgaacgtgcccttgttgttcgtcttgagcgcgtcgacgcgcttgccgtgcgcgaaggtccaaaactctttgcacgcgcacntgatcgcgctctgctcgtccgcgaacggatcctcgngcgcgctcacgcgctcgccgacgcgctcgccgatgcgaaatcccacgagttcgagcctgtcgcacgccgcgcgcgcggtctcgccgtcgacgcgtcgcatccagtccgcggcgtcgtccntgnatgcctccccggcgtcgccgcttgtcgcgcccgcgcgcgtcgccctgaacgcctcgcgcaccatctccgcgcacaggtgatcgaacgcgcttcgcgacacctcccccgggcgatcgcgcgtcgacgcgcgcatgccgcgcgccgcgcgatggcgattcgttcggcggacgccgcgngtcggtcgcactcgtcgacgcgtcgcggtngangtcgcgcgagcgcgcgacgcgcggatgaacacgctggaagaaacgctcgcgttcctcgcgccgagcgagacggcgcgcgcgtacctcgaccgcgcgctgcgagagccgctgcggagcgggattccgttcgtcgacgcgcgcgaccccgaaccggcgcttcgcgcgggagagatcgtcgagatcgtcggcgcgccggggtcggggaagacggagttcgtcaccgagatcgccgcgcacgccgtgctgccgcgagcgcgggacggggtgcggtacgacgggagcgaggcgcgggtgatcgtcatcgattgcgatggaaagtttgaccaactgcggctgctgcgagcgctgaatcgaaagattgaggaaaagctggcgaacgtgcgagagaatcagcgagtgacgatgcgagatgaggtgtacgaggaatcgatgtcgagattcacgctggtgagggcgcacgggatggtggacgcgttgaagacgctgacggcgctggacgcggcgtggagcggagcgatcgagagcgcgaaaagagacggactgttcgtggacgcggagacggcggagacgagggagacgggggaggacgcagagggtggaggtgcgaacggtgccaaaagcggtgagatggcgaaattcgcgtcgcagcggttggtgatttgtgacaacgtggcggcgttttactggctcgatcgagcatcgaggaaggaccacggggcgccgtttaacattcagcgcgtgttttccgccgcggcgagattgttcaagcgcctagcgagcgcgcatagggcggcggttgtggtgacaaagacgacgttgtcgtcgaacgatggtcgacggggtgggcagtacaaggatttcttacccgtggagtggacgaacgcggtgacgcagcgcgtcttgttggcgccgtcgaacaaacgcgttggatacggtgagtacgcgggcgtagcgacgtgggacgtaccggtgcgccgccacggaggcgcgtacacggtcaccgagcaaggcatgcgatgttaaacgtagcgcgcgcgcgcgacgattgaacgaacaaaagatagcgcgccacgcatttagattcttgtaaagtacgtgtgatttgttgtatcgaaatatctttctcttttgattaaaatagaatacatttggcacaaatcaaacaaataatacaccgcgcagtcggcgttgtctcgtgatgacgataccgccgtcgcgctcgcttggttattcgacatgatggaatactccttgatcgccttggggtacgatgggcgtaccgcggtaggattgtcgataatcccgtccatacttactaaccgattcggtctctcgattcggtctctcgattctcacagaatctcacctcttttcctttctctctccatttctcgactctgaaacgcgtcggctcattcgtcccactgcatatctaacggacacgtcggcgatgcgttttcagtgatgcgctgctcgaacccgggtttatcggcatacaccacaccttcttgttgcggaatggcgatggcgagcgagttgaaatccgcgtgggccttgacgtcggcttccatcatcgtcgtctcgtcgtcttcgtacgcttcttcccacattctgtgcatgtgcgtcacgagaggatagatttgctgcggtgtcacgttcgccgcaactcggagcgtcggtggacacaagggcttgatgcccaagttcaacctcgacgctgcgatgacggcggcggcgacgcgcgacggcagctcgttggccaagctcacgtcttgcacgcacaacgagtacatttgacacaccaaatgtctcaactcctcttgatactgcggcgtccacacaccgacgtccacttcgtcctcgctcgtcgtcccaccgttcatcatggtcaagaaagattccaaaaagtgcgccggcgtcagaatgccgagctcccatttgagctcgatcaacaccgccaactccatcttttgaatgatatccggcgagtacatgttcgacgtccacgcgcg

SEQ ID NO: 584 - DNA, 4000 bp, Escherichia coli
  misc_feature (1129)..(1129): n is a, c, g, or t
  misc_feature (1986)..(1986): n is a, c, g, or t
  misc_feature (3747)..(3747): n is a, c, g, or t
attaaattaaaaaatttaataaaaaatgataaggggttaggagatactgtgtctcgagctataaaaactgttacagtaggtaaaattaaagaatgtaatggatgtgagcttagaaaagattatttaaacaaagtagtaccatataaaaaggtaagtaaatgaaaacatttcacatagacgaaccgagagaaatcggaaagaaaaaagttagagtatcaccaaaagagttgaagatggttaaacaagatttaacagaaagaatagttaagaaaaaattacgagaatttattaaaaaacagttgaagaagaataatgccaaatagaaaagcaaaagaccgaaaacgtaaaaaaagacttcttaataaaaagttggctgctgagggtagaactgcagttcaacataaaaagtggttaactaaacaagaagaaaaaggaattcaaacaccaatgtggggtagaagatagtggttcggtatgaagtaagaagtggtacacagactattacagaaatatgtgatgactgtacttgccatatccgagatttatcattagatgatattttagtgaaaagagattcggatatgattataaaaaattcacagggtagagttataaccaatacatcagcgagacctaaatgctattgtgaggaatgtactcatgattaaactaaaaaacttattatttgaacgcagtaagaaagattctaaagatagtggtggagttttatattattacggagaaaatcaagtattattatgtttaggttcaaattcaggtacatggaacatacccaaaggtcatatacaaattggagaagaaccattagatggttcagtcagagaatttacggaagaaacacaaatagtattaaatggtattccagaattagtaaatgtctacaagaaggaaaaaggtggaaaattttatttatacgtattacaaggtgaaaagagatttataccacatttaaatcatgaacatattgattggggatattttgaaataagtaatttacccgaaccaatagatgattgggttaataaaaccattgagaaattacgtgattaaactaaaaaacttattagtagaaagaatagatattgtagatacagctcaacagattgtnaagttacataagttaaagtctaaagttaaaattactactggtaaggataaaggtgattataactggataactgacactataaatttaagaccaagttatagtacagttaaagaacttttaattactattttacacgaaataaaacacgctttagatagaaaaaagatgggtgtaaaaaaatatgaaaaagtgtataccatagcaggtgagttagcccaacaaaaaggtggtgattttcacgatgacaataaatttgaagaagaagccgaaaaatgggctaaaaaagagtatcctaaatggaaaaataaattttaatttgaagttttactttaatagttatatgatataataagttatgaaaccacgcagtgctaagaataagggcaaacgcctccaaaataaagttcgagatataattcttgaaaaattcgattctttagaaccagatgatgtccgttctataacaatgggcgattccggcgaagatattctattatcccctgcagctcgtagattatttccatttagtgttgaatgtaaagcacaagaatctcttagtatttggtctgcattagaacaagcagaaagtaatgctggaaaacatataccattattagtatttaaaagaaatagaagtaaaacctatgcagtattagaatttgacaaattattagaattattagatgaatcagaataaaattgtaaatttacttaatagagttctaaaaactaatggaactaaattaaaaaaattagatgagtatatgtattggtcaccttttatatctcatcataaacctaaattacaaataaatgtaaaaacacaaaagtggcattgttgggtaagtggaactggnggtagaacattatttcagttattaaaaaaagtaaatgctagtaatcaacattttgatgaattaagagaattagttggtgatttaccacattataaaaaagagactgatacaaggttaaaaaaggtagtacaactaccctatgagtttataaccttcggtaatagtacggatagtatcgttaaaagacacgctctaagttatttgtataaaagaggtattaccgatgatgatatactaaaatataatattggttattgtgatgacggattatattcaaatcgcattattattccatcttatgattctgatggacaattaaatttttttgtaggtagagatttttataatagtaagatgaaatatcgtaattcacctacatctaaagatattattggatttgatttatttattaattgggatgaaccaataatattatgtgaaggcgtatttgatgctatggcatttaaaagaaatgcaatacctctttttggtaaaaatattatgagtactctacagaaaaaaataattgaatctagagtaaaagttatatatttagcattagataatgacgctattgaagatacaataaagatttcagataactttattaataatggtattgatgttagaatgataaagtttaaagaaaaagacccaagtgagattggttttgagaatttgttatatttaattaataagacgacaaaaactaaattttcagacttaatgaggttaaaattaaatggtaaaacaaaaaaatatatggaagtattatgatgagtggaaagttcatgttacgaaaattgaactttttgaaagtatatgccaaacatttaatcttatgaatcaaatggatagttgtactaaatattacgaaggtaatatgcacaccccaattgcatgggatataatagtaccagatgaatttataaaagatgttagaaaacatattaaggattttgattgatagaaccaaatgttgtaaaagttccatttcgtaaattaaaacacatacaccacatatcagatatacagattcgtaatcttaaaagacataaagaatacgaagaagtttttgaaagaacttacgaagaagtacggaaaaataaagataatgcagtagcttatatcggtggtgatatagcacattcaaaaactgatatgtctccagaactgatagaccaactatcaaggttatttaaaaatttagcagatatatgtcctacaattattattgcaggtaatcatgattgtaatctaaacaatcgttcacggctagattgtttaaccccgatagtagagaatcttaatcatccaaatttacattatttaaaagatactggtgtatataagtgtgcagatgccacttttgtagtatgggacgtttgggatgataagaaaaaatatataaaagctaaggatgttgaaggtgctacaaaaattgtattattccatggaacggtagataaatgtcaaactgatttaggatttagattaccatctgatgtgaaaattactcaattcaaagggtatgatatggggctgttaggtgatattcataaacgacaacatcttaataaagaagaaaccatttcttattgtggttctttagttcaacagaatcatggtgaaggattggatcacggttatttactatgggatgttccaaaacgtaaatctacttatattcctattattaatgattatggttattacactttagatattaataatggtgttgtacctgatgcagatgatatnccaaagaaagctcgtttaagagttagagtagctaatacttctgctactgaattgaaaaaggcattagcaattattcatgataaatatggtgttgtagaaatgtcagttacaagaattgatgctttatatagtactgaaagagttagaaataaaactataaatgtgggtgatataagtaatacagatgtacagtatcaattgattgtagattatttaaacgctaatcatattgtagatgatgaaacattaatta

SEQ ID NO: 585 - DNA, 4000 bp, Escherichia coli
  misc_feature (1989)..(1989): n is a, c, g, or t
  misc_feature (2411)..(2411): n is a, c, g, or t
  misc_feature (2648)..(2648): n is a, c, g, or t
  misc_feature (2666)..(2666): n is a, c, g, or t
  misc_feature (2942)..(2942): n is a, c, g, or t
  misc_feature (3095)..(3095): n is a, c, g, or t
  misc_feature (3913)..(3913): n is a, c, g, or t
atggctttgctatttgggaaagcatccaagcggatcttgacagacggtttaaggaaacgggtcacatgaacgcgtatttcccgctattcataccgaaatcatatttttccaaagaagcttcacacgtggacggttttgccaaggaatgtgcggtagtgactcattatagattaatggatgaccccaatggtggtggcgtagtcgtagatccttcggcgaaattggaggaggaattgattgtccgccccacgtctgaaaccattatttgggacacttacaaagattggatacagagttaccgcgaccttcctattctagtgaatcaatgggcgaacgtggtacgttgggaaatgcgtacacgcttattcctaagaacgtcagagtttttatggcaagaaggtcataccgctcacgctacgaaggaagaggccatcactgaggcagagacgatgttaaatgtctacacggactttgttcaggacgtcatggctattcctgtgcttcgcgggttgaaaacggaaggtgagcgttttgcgggtgctttagagacgtattgtattgaagcaatgatgcaggacggtaaagcgctgcaggctgggacttcgcattttctagggcaaaattttgccaaagcattcgatgtgaaatttcaaaacaaagaaggcaaacaggaatacgtttgggcgacttcatggggcgttagtacccgattgatgggtgcgcttattatgacgcacagtgatgataatggcttggtattgccgccgaagttggcaccttaccaagtggttattgtacctatttataagggacaagagcaattggacgcgataaatgtcgttgcagaagaccttatggcccaattgcgtgctaatggcgtcacagtgaaatacgacaaccgcgatacgcacaagccaggctggaagtttaatcaatacgagcttcaaggtgttccgttgcgcatcgctattggtcctaaggatttggagaaaggcagtgtggaattagcgcgcagagataccttaaccaagcagtttgtggatcagaaagacgtggcgactgccgttccagcattattggaagagatccaaaagacgctttttcaaaaagcgctagactttagagaagcacattctcaagaggtgaattcttgggaagaattcgaaacattaatgaagggaaatcctggctttgtgtatgcccattgggatggaacttcagaaacagaggataagattaaagaattgactaaagcaaccatccgttgtattcctttggattccaaggaagaagagggggtctgcgtgctcacaggtaagccaagcaagcagcgtgtagtcttcgctaaggcgtattaacaggtaatcttggggctcgaatttattttcgattttttgtgtgaatgtgttgtgaatctgaaaaacgtgattacatttgcactccccaaagaaaaccggggaatgttctggaacatttaaggcccgttcgtctagcggtccaggacgctgccctttcacggcagaaacacgggttcgattcccgtacgggtcacaactattaagaataaaaagacatggcaaaccataagtctgctttaaaaagaattcgtcagacagccaagaaggctgcacacaatcgttactaccacaagacgacacgtaacgctgtgcgcaaacttcgtggagcaactgacgccacggaagctgcagaaatgctcccacgcgttacttctatgcttgatcgcttagctaagcgtaatatcattcataagaagaaagcatcaaatttgaagtcaagcttggctaagcacgtcgcggcgctataggcttttcttaaccgtgtaaagattcagtgagcccgcttccgcaaggaagcgggttttttgttttggggctacgccatggggttggatcagctacttgtatgtccgctcgccattggcttaggatcctctagtatatagggtaggggtaaaaaaaatccccgccngtggcggggatttttagcactatcgtaggaagtgttaatctgcgtagagcgcttcgatttgctcctcatattttgcaaggatgggtttgcgtttaaccttaaaagttggggttaaacaaccattgtctacggtgaactcgtctgtatcaataatgatttttttcacctgttcccattttccaaagctagaattagcgcgttcaacgtctttccacactctgtcgcgaacttgttgattcaaggccatctctttaatggatgtatattcaatatcatggcgtgaacaccactccttaacacctggttcatttaagatgcagatggcggccgggaatttacgtccagagccaataaccatactctgctcaatgaggtgagaagccttcaattcattttcgatcagttgaggagcgacatacttnccgcccgaggtcttgaacatttcctttttacggtcggtaatgcgaataaacccgtcttcaatcacaccaatatctcctgtatggaaccattcgcctgtcattacttcagcggtgagttcaggttgcttgtaatagcccatcatgatgtttggtcctttggcaaggatttcaccgtcttcggcgattttagcctcaacaccgtcgatcaccttacccacagctcctatacggatcatnccaggttctgcagtggtntttacagaaattacaggcgcagtttccgtaagaccgtagccttctaagataggtaccccaattccgttgaagaatcgagccaaacgtggttgcagtgctgctgaaccggaggcgacagctttaatttgagtgaggccaagcgctgcacgtactttactaaaaacaagcttgtccgcaatgcctaacttccagtgatagaatccgccgtttgcctgttcgggttcccattgtaatgcgaggctaacggcccattcgaaaattttagtcttgagcccncctgcactggtaccgttcgcaacaattccatcaaagaatttctctaggagtctcgggactgcggtgaagatggtaggctggcagtaatttaaatcggctttaatagtttcaatagattcggcaaagtaaatgctcgccccattatacatgtanaggtactgaataaagcgctcgaaactgtggcagacgggtaggaagctcaaagtctttgcctcgcctttaaccaaaccaggaatgcgcggggtggctgcaatcacattgctcaccacatttttatggctcagcataacgccttttggcaatcccgttgtaccggatgtatagattatcgtggcaagatcttctggtttcacagcatcacgtgccttttccacatctgcttgacgcgtttggtcggcgcctaaagccaatacttccgaccaatggttcattcctttgtattgctcaaatgtgaacacttttttcatgtgctcgcatttgctcaagatatttgtaaccttctggtagagttcatcgtttgagacaaagcagtaaatactttcgctatgattgaaaatatattcataatctgcttctgtcatggttggatagatgggtacatctacagcgccaatttgcaatagcgcatgatccattatgttccattcgcaacggttgttgtgcgaaataagtgcgactttatcaccggctttaactccaagctcaagcaaagctctactggcttggtctacagcttctgtaaattcttttgtgctgtacgatttccattcaccacctacttttgaagtcatcatcaacttcataggtatatgttctagctggtaatgggggatatcgaataatctcgtgggttgtctcatggttgaattctctaggaatagtgtgtgttattgcgaaggttcaatatagtaaaaatgtactatcgacctttattagaattgctatcataaagtacttggccgccaactatngttttgacaacttgagttctttcgcgcaacgcagcatcttcgctccaaagattggtgttcagcagggtgaagtttgctttttgtccg

SEQ ID NO: 586 - DNA, 4000 bp, Escherichia coli
  misc_feature (37)..(37): n is a, c, g, or t
  misc_feature (76)..(76): n is a, c, g, or t
  misc_feature (428)..(428): n is a, c, g, or t
  misc_feature (585)..(585): n is a, c, g, or t
  misc_feature (1045)..(1045): n is a, c, g, or t
  misc_feature (1078)..(1078): n is a, c, g, or t
  misc_feature (1498)..(1498): n is a, c, g, or t
  misc_feature (1966)..(1966): n is a, c, g, or t
  misc_feature (1986)..(1987): n is a, c, g, or t
  misc_feature (1997)..(1997): n is a, c, g, or t
  misc_feature (2012)..(2012): n is a, c, g, or t
  misc_feature (2033)..(2035): n is a, c, g, or t
  misc_feature (2037)..(2037): n is a, c, g, or t
  misc_feature (2040)..(2040): n is a, c, g, or t
  misc_feature (2042)..(2042): n is a, c, g, or t
  misc_feature (2044)..(2046): n is a, c, g, or t
  misc_feature (2253)..(2253): n is a, c, g, or t
  misc_feature (2348)..(2348): n is a, c, g, or t
agagtcaaaagactccgcaagaaaggttggagttttnatactgtgagaaggagttaactagatgcctaaagtatcngttgggaacaggaactttgacttcgcacttcggaaatttaagcgaaaagttaataagtctggaatactccaagagtttagggaacgaatgcattatgagaaacctgctcagaagagacgaaaaactaaaatggcaggagagttgagatggcgaagaaaagaaagagagctagacccagttcgatttgggaaaaagagaatgtattaaggaattttgtagcaaaatatatgcacaagtttaatatacactctgttcaaccagataaaacaaaatacactcgtaaaactaaacataggaaaggttactatgaataaatttacacagaagataaaaaatgcgtggaacgattcantttcttatatacgcgcaatgggagaggacgagtggcagatgtttgcttggtttttagccacaacttgtggattactcgtcatactatgtttcattagagatcgcttgatcacataatggttcatttctctaaaaattggatagccttagatggagtnttatctcatagattgaaatctcagataaacgaaactctaaggtctataccaaaacacgatagatgggttgcaagagatagaattactaaaaagaatttatctaaagctgaggttagatatatagactatgataatactgattatattaggtctgtattaaatggatttaatgaggtagaagatccaactaaaacttggctaataaatttaatagatacttataaatggtttttcgcaccttttgatagtagcggaaatactattaaaataggagagttaataccagagcccgtacaggtcattacctacaaacaacgaaattatcacgattggcacaacgacgggagtgtaggaactcacagactattaacactacttgttaatctttccgactcggaagattatgaaggtggtgatttgcaatttgaaggtgagaatgaaatggggcagtggactaganaaaaatatactggaattatctacccttcacganacccgaaaagacttacaactataactaaaggaattaaatcatgtatgattgtttactttcgtgaaaagcagaattaataaactagaggctcacctttttgttaataataagttagagactagagggtttatttccaactacataccactctcaaaaattttttgtttagttggcaaacgtcctcagattaaaggacacagggagttgaaatattctatactaagtgatggtatggacactcctatcattcttttagataataatgagtggaattatactatgtctatacgacaagtaaagaaagaatggatttccaactatcaatcacattacgactacatagcctattcaggcaatcaaagattagaaatcgcaaaagaactagagtttagtaaaatttcgtgcgtagtagcggaagangttcattgggctcatgccatacatttaatactaaataaaggtagtatagaacacactttgagttaggatcaaactcacgtaataagaaataaaatattttctaattagctgaaggtgctcctactggttttttcattctggtatggtaaatagttctttacatttgtcaaaaagtatggtataattatattataaatttttaattgacttcgtcatcttagatttgaatcaactgttgttccgaagacacgagagtagtgctcccctaggagcaatgctcgaagtagtcgagggaacgattttatttataattaagacaattataaacctcgttttaacacgtgacaagtcaattacttatgccaaacacaagtcaatgtcaaactgatggggatttctttttttgtgaactgtaacaatttaccaaagccgaaaatgtttaaaagctattttacctactaagtttanacaaacttaacggatataanncatactttcnaaaattgtcctaganatatagtgctactgtaaattnnnantgnantnnnatgagttacagcggtttggcgtcaagggtggcggctcgtaggagaatcgaactcctgactctagcgtgacaagctaggattatataccacttaactaacgagcccataaaagcactctgagcgagagaagggaatcgaaccctcatcatcagcttggaaggctgtcataataccattatactactctcgctaaaagtgctttctganaaaatggagtaataaagaagtttcggcttcttcttttgttttaaatccgccaaattctttagttcctattctataataccaaacatactctgacnccttcccaccattagactggggaataggagtataatatctttgataaacttcggtatgtttcctagccactttatttttcaggatacctataaaggtttaaacctaaataagcccaagcatctccgtttgcaggcgaacctacattaattttttgattcccaccgctgctggctagcattatcgttttgccactagcgctaggtcctaaatcatctgtggtatctatttgtatagtaaggataccattatcatcacattcatactgaatggagtctttttttcctactgttatccaatctttcatcagccacattcctcctcaaatttaattattttttgtaattcgtcaaaagctaactgttttgcattttttaaatttacccataaatgagtgtaactagacaagtttctaacatcttgtgcttcaaatgattgctcaatttcattataagtaatcattttatctagtgcttccatcgccagttctgcatcatttagtttttctactagttggtgtaatatttctctattcattttattccctaaattttatttcattttttattatattataagccttatctataccagactccaccccattccagcaaataaaatcccatttggtatctttatttgccgattctaatcttacttcttctcctactttttgcacttcttcctttaaatcctctaggagaaacttaagattaactaattttattagttccattagtgtttaggggtaaaattagaccatatccatatcattatggctaccataactacaccgacaaaaatattcacattattactcctattaaatggtggagagggttggattcgaaccaacgaaccttgaaggaacagatttacagtctgtcgggtttaaccacttccctacctctcctttggtggaggcgactggactcgaaccagcaaccccttccgtgcaagggaagtgctctcccattgagctacgccccctctaattactctactaaagacaacaaatactttaactctttcttaggagactttgacaatccctctaaattttcttcttcaccatcaagagcctcagctatctttactactatctcttttttagtaactggaagttctcctgttttagacaaataaattgccttctggtatactccttctctagataatttaccaataacagactttgtgcttttgcctaattcggtagctagagtttcaactgtgtctcttgaaggattttcgttgtatttatcaatcatataggctacttgttcattcgtatagttcgtcgccatcatcttcctccctaataaaactaattagattcttttcttcaatttctttaagcaaggcttgtctttccctatgtaaattattcaattctttctcaactctctccaaatcttgagatatttcaaagaaagtgttatccaatataaataatttagccaacacagaacgaaattttatgatagttgggtctaatttagttggaaatggtataacattgttttcttttgacatttaaaatccttacttattttttgattatatgaatataataacaaagtttcagctttttgtcaagaactattttcggataataaaaaagggctatccgaagataacccttaaaaaatat

SEQ ID NO: 587 - DNA, 4000 bp, Escherichia coli
  misc_feature (2)..(2): n is a, c, g, or t
  misc_feature (5)..(5): n is a, c, g, or t
  misc_feature (29)..(29): n is a, c, g, or t
  misc_feature (488)..(488): n is a, c, g, or t
tnccnggtatatttctctcgcgtgccagnttcagcgcagctagtgacgcctcgggccagcgggtatcagcaagtacagcgtcgatttcaggggtttccgccacccagtccacggcttcgcaaagacccgagccgcggaaattcatcaactggcgttctccttgactgtcgacatagatcgaactgaacgaggaaacgccaccctcggcacgttgcacaagcgagatatctacgccctcttggataagatcacccaagaccagatctcccagttggtcctgtcccaatcgtgcgcccaatgtggctttgcccccaagcctcgctatggcgaccgccgcatttgctgcgcatccaccgccgacaacatcggctttagaagcgcggtatttccgcgcctctgtgggcagttgatccgtggcaaaaacaaaatcaacgacagcactaccgacaacgagaattctggtcatcaattaacctctaatccactgnacaccaatgcaggacggcccaaccgccctttgatcggctgcgttccggtcaaggcttgaaagaatgccacaatttcgctcacttctcgatccgtgaagatggtcggctcaatgtcatatccagacgccagtcttgtccgttcgaattgcactgaaacagaagaaagtccgcccccctcaaggggcgtaacggcgtcaacattggattcctcccttgtgcatccatactgtctgaaattgcgtttatagtttcgttattttcttaatagtgtttttgcgaaccaataagtcaatagactcctgcataattaggcttttaaaagtctgacgcctgctgttttacaaagcttttccaatgcttctgggcaggccgaatctgtcactaagacgtcaacctgatcaatgttccccacacaaaccggagcagccctgccgaacttcatgctatccaccgccagaatcaccgtccgcgcattctcgatgattgccctcacgatcgacacttcacgaaggtcaaaatcaagaaacgaaccatcagaagcaatcgcagcagcgccgattattgcagtgtccacacgaaactgacggatgaaatcaacggccgcttctccaagtattgcaccatcagactttctcacgacccctccgggaaccatgacctcggcaccaataaatccttttatttcattggataatgagactgaatctgtaacgatcttcaggccgacatgatgctcaagataccgggcagcggccaacgttgttgtgcctgagttgataatcagcgacgaattgttggggataagtgaagaaacctttcgtccaatggcctctttctcttcacgagcgatctcttgccgagccgagaagccggtatactccgaacctcccaaaagggaagctccgccgtggaacctggacagttggttacttttctcaagagatgttagatcttttctgattgtttggggtgtcgcgtgaagcaactcgaccaactcatctacagttgcacgaccatgctcctgaagatgtttgagtatagatgtttgccgcgaagcagtgttgccagtcagtctcatttcatcacccttattttcgttcttaccaaaaaacgaaagcattcagcaactgcaatgatgcgtggcggcagttctgagagccggtatgcaaagttgatccccttttttccgtgaaatcacacttatagagcgtaggggagtgtcttcttaaactgagcgagttgatgcgtagcaaaataagtacttcttcaggcttatttgtcgattgctaccgcgtttcgaggcttttagatgtcttggcccaaactttgaggcaatcactgcatcgtcgatgaaaagagcagtatcgtattggcactaccgaccgttccgaagattgaccgcggcagggcatcaaaacacttcaaacgccctagcgctggcttttgaaagcgcgaaatcacctcatttatttgtagttaccccaaacttttgaatgggacttatatctatatgagcaatcaatcagaccaatagacagctaatccgaattcaaaaatctctgtattccgacatggttattgaagtgggaaccccataaacccggttcaatacctgaattttttccggcgtgaccgtaaacttaaccggacgaatccaatgcagcgttgaaccgttggctggaggccacatgaacgcgatccttctgagggagcgtaaactagtgatgggaagcatgggatacgtgcgtatagacaagcgttgtcgtctgcagtttgagagttcttttgtgaagtaatccaaaatataagtgccgcaacgtcggttggggcagatggttcatctggacggttcgcgcttgcttttggcatcggatgacagtgaacctgtgaccgcaaccgaaatagtggtcgaccaaggccaccttgtatcatcactgtaggagggtctcatggactttaccatttcccccgaaatcgaagactaccgcgcgcgcattgctcggtttgttgaagacgaaatcattcctttggaagcggatcgtgcgaactatgacccccatgaaaacattcgcacggatgttctggggcatttgcgcgataaagcccgcgcagaaggtctctggtgtcttcagcttcaaaaggaaactggcgggcaggggcttggcaaagtgggcatggcggtttgctatgaagagatgaatcgctcgatatttggaccggtggcattcaattcggccgcccctgatgacggcaacatgatggttctcgaaaaggttgcgaccgcagctcagaaagagaaatggttgcagccaattgtgcgaggtgatgtgagatcagcctttgtgatgacggaaccggcccccggatcgggttcggatccagggggaatgatgctgacgaaggcgaccaggaaaggagacaaatatgtcattcgcggtcgcaagtggttcatcacaggtgctgaagacagcgaccactttattttgattgcgcgtacctcggatgatccacgcaaaggtctgtccgctttcctacataccaaggatgaacctggctttcgtatcgatcgccgcatccccatcatgggccccgaagagcatggcggccattgtgaagtggtctatgaggatatggaaattccggccgagaaccttttgatggaagaaggcgatgggctgaagcttactcaaatccgcttggggcctgcacgtctgacccactgcatgcggtggctaggcctgtccaagcgctgtgtcgaaatcgccaccgaatacgctcagaaccgctttgcttttggcgagcgcctgtcgaaacgggaaagcgtccagatgatgatcggtgatctggcaatgcagatcgagatcggtcgcttgctggtgatgaaggccgcgtgggagctggatcgcggcagttatgcccgcaaagaagtgtcgatggcgaaagttcatgtcgccaatctgctgcacaaggcagcagataccgccattcagatcaacggggcgcggggttattccaaggacacgccacttgagtggatctaccgctatgcccgccaggcgcgtctggtggacggtgcggacgaagttcataagatggtgctgcaccgtaacgtcgagaaagaaggccgtgatttttggaaatggcaatctgaagaatgatggacacaggtactgaattggactttgatcctcaaaaactgcgggggtttttgaacacaaagtttggaccttcggacttatttaagctggatcgcatctcgggtggtcagtcaaatccgacctacttcctaacctacggcgatcaggaaatggtcctgcgcaaacaaccgaatggcccgatcttgcgaggagctcatgcagtagatcgcgaatttcgcgtgcaaagcgcactttatccgacggcagcccccatcgcacgtccgatcctgtaccacgacgatgcaaatgtaattggtacgcctttctatttgatggagcggatcgagggtcgcgtttttgaaaactgtgcccttc

SEQ ID NO: 588 - DNA, 4000 bp, Escherichia coli
  misc_feature (2)..(6): n is a, c, g, or t
  misc_feature (8)..(14): n is a, c, g, or t
  misc_feature (16)..(20): n is a, c, g, or t
  misc_feature (22)..(22): n is a, c, g, or t
  misc_feature (24)..(26): n is a, c, g, or t
  misc_feature (28)..(28): n is a, c, g, or t
  misc_feature (30)..(32): n is a, c, g, or t
  misc_feature (34)..(45): n is a, c, g, or t
  misc_feature (47)..(51): n is a, c, g, or t
  misc_feature (53)..(54): n is a, c, g, or t
  misc_feature (57)..(57): n is a, c, g, or t
  misc_feature (59)..(63): n is a, c, g, or t
  misc_feature (65)..(69): n is a, c, g, or t
  misc_feature (71)..(75): n is a, c, g, or t
  misc_feature (77)..(78): n is a, c, g, or t
  misc_feature (80)..(80): n is a, c, g, or t
  misc_feature (82)..(82): n is a, c, g, or t
  misc_feature (84)..(84): n is a, c, g, or t
  misc_feature (86)..(86): n is a, c, g, or t
  misc_feature (89)..(90): n is a, c, g, or t
  misc_feature (92)..(92): n is a, c, g, or t
  misc_feature (95)..(96): n is a, c, g, or t
  misc_feature (98)..(98): n is a, c, g, or t
  misc_feature (101)..(102): n is a, c, g, or t
  misc_feature (104)..(104): n is a, c, g, or t
  misc_feature (107)..(107): n is a, c, g, or t
  misc_feature (110)..(110): n is a, c, g, or t
  misc_feature (113)..(113): n is a, c, g, or t
  misc_feature (116)..(116): n is a, c, g, or t
  misc_feature (119)..(119): n is a, c, g, or t
  misc_feature (122)..(122): n is a, c, g, or t
  misc_feature (125)..(125): n is a, c, g, or t
  misc_feature (128)..(128): n is a, c, g, or t
  misc_feature (132)..(132): n is a, c, g, or t
  misc_feature (134)..(134): n is a, c, g, or t
  misc_feature (137)..(137): n is a, c, g, or t
  misc_feature (140)..(140): n is a, c, g, or t
  misc_feature (386)..(386): n is a, c, g, or t
  misc_feature (847)..(847): n is a, c, g, or t
  misc_feature (928)..(928): n is a, c, g, or t
  misc_feature (931)..(931): n is a, c, g, or t
  misc_feature (1391)..(1391): n is a, c, g, or t
  misc_feature (1394)..(1394): n is a, c, g, or t
  misc_feature (1451)..(1451): n is a, c, g, or t
  misc_feature (1988)..(1989): n is a, c, g, or t
  misc_feature (2378)..(2378): n is a, c, g, or t
  misc_feature (2380)..(2381): n is a, c, g, or t
  misc_feature (2386)..(2386): n is a, c, g, or t
  misc_feature (2388)..(2388): n is a, c, g, or t
  misc_feature (2802)..(2802): n is a, c, g, or t
  misc_feature (2838)..(2838): n is a, c, g, or t
  misc_feature (2880)..(2880): n is a, c, g, or t
  misc_feature (3036)..(3036): n is a, c, g, or t
  misc_feature (3039)..(3039): n is a, c, g, or t
  misc_feature (3096)..(3096): n is a, c, g, or t
  misc_feature (3189)..(3189): n is a, c, g, or t
  misc_feature (3216)..(3216): n is a, c, g, or t
  misc_feature (3297)..(3297): n is a, c, g, or t
  misc_feature (3307)..(3312): n is a, c, g, or t
  misc_feature (3314)..(3315): n is a, c, g, or t
  misc_feature (3318)..(3318): n is a, c, g, or t
  misc_feature (3320)..(3323): n is a, c, g, or t
  misc_feature (3328)..(3329): n is a, c, g, or t
  misc_feature (3331)..(3333): n is a, c, g, or t
  misc_feature (3335)..(3335): n is a, c, g, or t
  misc_feature (3337)..(3338): n is a, c, g, or t
  misc_feature (3341)..(3342): n is a, c, g, or t
  misc_feature (3344)..(3344): n is a, c, g, or t
  misc_feature (3346)..(3347): n is a, c, g, or t
  misc_feature (3349)..(3350): n is a, c, g, or t
  misc_feature (3352)..(3353): n is a, c, g, or t
  misc_feature (3357)..(3357): n is a, c, g, or t
  misc_feature (3359)..(3359): n is a, c, g, or t
  misc_feature (3362)..(3362): n is a, c, g, or t
  misc_feature (3365)..(3366): n is a, c, g, or t
  misc_feature (3368)..(3369): n is a, c, g, or t
  misc_feature (3372)..(3373): n is a, c, g, or t
  misc_feature (3375)..(3377): n is a, c, g, or t
  misc_feature (3382)..(3383): n is a, c, g, or t
  misc_feature (3386)..(3387): n is a, c, g, or t
  misc_feature (3389)..(3393): n is a, c, g, or t
  misc_feature (3396)..(3402): n is a, c, g, or t
  misc_feature (3404)..(3404): n is a, c, g, or t
  misc_feature (3406)..(3409): n is a, c, g, or t
  misc_feature (3414)..(3414): n is a, c, g, or t
  misc_feature (3416)..(3418): n is a, c, g, or t
  misc_feature (3420)..(3422): n is a, c, g, or t
  misc_feature (3426)..(3428): n is a, c, g, or t
  misc_feature (3430)..(3431): n is a, c, g, or t
  misc_feature (3434)..(3434): n is a, c, g, or t
  misc_feature (3436)..(3436): n is a, c, g, or t
  misc_feature (3439)..(3439): n is a, c, g, or t
  misc_feature (3446)..(3448): n is a, c, g, or t
  misc_feature (3450)..(3450): n is a, c, g, or t
  misc_feature (3454)..(3463): n is a, c, g, or t
  misc_feature (3467)..(3469): n is a, c, g, or t
  misc_feature (3473)..(3473): n is a, c, g, or t
  misc_feature (3475)..(3476): n is a, c, g, or t
  misc_feature (3478)..(3478): n is a, c, g, or t
  misc_feature (3480)..(3482): n is a, c, g, or t
  misc_feature (3484)..(3487): n is a, c, g, or t
  misc_feature (3489)..(3490): n is a, c, g, or t
  misc_feature (3492)..(3492): n is a, c, g, or t
  misc_feature (3496)..(3498): n is a, c, g, or t
  misc_feature (3500)..(3501): n is a, c, g, or t
  misc_feature (3509)..(3509): n is a, c, g, or t
  misc_feature (3511)..(3512): n is a, c, g, or t
  misc_feature (3516)..(3517): n is a, c, g, or t
  misc_feature (3519)..(3519): n is a, c, g, or t
  misc_feature (3522)..(3523): n is a, c, g, or t
  misc_feature (3525)..(3527): n is a, c, g, or t
  misc_feature (3529)..(3530): n is a, c, g, or t
  misc_feature (3533)..(3536): n is a, c, g, or t
  misc_feature (3538)..(3539): n is a, c, g, or t
  misc_feature (3543)..(3543): n is a, c, g, or t
  misc_feature (3545)..(3546): n is a, c, g, or t
  misc_feature (3548)..(3548): n is a, c, g, or t
  misc_feature (3551)..(3551): n is a, c, g, or t
  misc_feature (3553)..(3555): n is a, c, g, or t
  misc_feature (3561)..(3562): n is a, c, g, or t
  misc_feature (3565)..(3565): n is a, c, g, or t
  misc_feature (3567)..(3567): n is a, c, g, or t
  misc_feature (3569)..(3571): n is a, c, g, or t
  misc_feature (3574)..(3574): n is a, c, g, or t
  misc_feature (3577)..(3578): n is a, c, g, or t
  misc_feature (3580)..(3580): n is a, c, g, or t
  misc_feature (3583)..(3583): n is a, c, g, or t
  misc_feature (3586)..(3586): n is a, c, g, or t
  misc_feature (3588)..(3588): n is a, c, g, or t
  misc_feature (3591)..(3595): n is a, c, g, or t
  misc_feature (3600)..(3601): n is a, c, g, or t
  misc_feature (3604)..(3606): n is a, c, g, or t
  misc_feature (3609)..(3609): n is a, c, g, or t
  misc_feature (3614)..(3616): n is a, c, g, or t
  misc_feature (3620)..(3620): n is a, c, g, or t
  misc_feature (3622)..(3623): n is a, c, g, or t
  misc_feature (3627)..(3627): n is a, c, g, or t
  misc_feature (3629)..(3629): n is a, c, g, or t
  misc_feature (3633)..(3635): n is a, c, g, or t
  misc_feature (3637)..(3637): n is a, c, g, or t
  misc_feature (3640)..(3641): n is a, c, g, or t
  misc_feature (3643)..(3646): n is a, c, g, or t
  misc_feature (3648)..(3649): n is a, c, g, or t
  misc_feature (3652)..(3653): n is a, c, g, or t
  misc_feature (3656)..(3659): n is a, c, g, or t
  misc_feature (3662)..(3663): n is a, c, g, or t
  misc_feature (3666)..(3667): n is a, c, g, or t
  misc_feature (3671)..(3671): n is a, c, g, or t
  misc_feature (3676)..(3677): n is a, c, g, or t
  misc_feature (3680)..(3682): n is a, c, g, or t
  misc_feature (3684)..(3684): n is a, c, g, or t
  misc_feature (3686)..(3688): n is a, c, g, or t
  misc_feature (3690)..(3691): n is a, c, g, or t
  misc_feature (3693)..(3694): n is a, c, g, or t
  misc_feature (3696)..(3698): n is a, c, g, or t
  misc_feature (3702)..(3704): n is a, c, g, or t
  misc_feature (3712)..(3713): n is a, c, g, or t
  misc_feature (3715)..(3715): n is a, c, g, or t
  misc_feature (3717)..(3721): n is a, c, g, or t
  misc_feature (3723)..(3723): n is a, c, g, or t
  misc_feature (3725)..(3726): n is a, c, g, or t
  misc_feature (3729)..(3730): n is a, c, g, or t
  misc_feature (3732)..(3733): n is a, c, g, or t
  misc_feature (3736)..(3737): n is a, c, g, or t
  misc_feature (3739)..(3740): n is a, c, g, or t
  misc_feature (3743)..(3744): n is a, c, g, or t
  misc_feature (3748)..(3753): n is a, c, g, or t
  misc_feature (3756)..(3757): n is a, c, g, or t
  misc_feature (3759)..(3760): n is a, c, g, or t
  misc_feature (3765)..(3765): n is a, c, g, or t
  misc_feature (3771)..(3772): n is a, c, g, or t
  misc_feature (3774)..(3777): n is a, c, g, or t
  misc_feature (3781)..(3781): n is a, c, g, or t
  misc_feature (3786)..(3788): n is a, c, g, or t
  misc_feature (3791)..(3793): n is a, c, g, or t
  misc_feature (3797)..(3797): n is a, c, g, or t
  misc_feature (3803)..(3803): n is a, c, g, or t
  misc_feature (3805)..(3805): n is a, c, g, or t
  misc_feature (3808)..(3808): n is a, c, g, or t
  misc_feature (3810)..(3810): n is a, c, g, or t
  misc_feature (3817)..(3818): n is a, c, g, or t
  misc_feature (3820)..(3821): n is a, c, g, or t
  misc_feature (3825)..(3825): n is a, c, g, or t
  misc_feature (3827)..(3828): n is a, c, g, or t
  misc_feature (3831)..(3833): n is a, c, g, or t
  misc_feature (3836)..(3836): n is a, c, g, or t
  misc_feature (3839)..(3840): n is a, c, g, or t
  misc_feature (3843)..(3843): n is a, c, g, or t
  misc_feature (3846)..(3846): n is a, c, g, or t
  misc_feature (3848)..(3848): n is a, c, g, or t
  misc_feature (3850)..(3855): n is a, c, g, or t
  misc_feature (3857)..(3859): n is a, c, g, or t
  misc_feature (3865)..(3865): n is a, c, g, or t
  misc_feature (3867)..(3868): n is a, c, g, or t
  misc_feature (3871)..(3871): n is a, c, g, or t
  misc_feature (3873)..(3874): n is a, c, g, or t
  misc_feature (3876)..(3876): n is a, c, g, or t
  misc_feature (3878)..(3882): n is a, c, g, or t
  misc_feature (3884)..(3884): n is a, c, g, or t
  misc_feature (3886)..(3888): n is a, c, g, or t
  misc_feature (3890)..(3890): n is a, c, g, or t
  misc_feature (3892)..(3897): n is a, c, g, or t
  misc_feature (3901)..(3901): n is a, c, g, or t
  misc_feature (3904)..(3905): n is a, c, g, or t
  misc_feature (3908)..(3909): n is a, c, g, or t
  misc_feature (3911)..(3914): n is a, c, g, or t
  misc_feature (3916)..(3917): n is a, c, g, or t
  misc_feature (3919)..(3921): n is a, c, g, or t
  misc_feature (3923)..(3923): n is a, c, g, or t
  misc_feature (3925)..(3927): n is a, c, g, or t
  misc_feature (3929)..(3933): n is a, c, g, or t
  misc_feature (3935)..(3937): n is a, c, g, or t
  misc_feature (3943)..(3944): n is a, c, g, or t
  misc_feature (3949)..(3949): n is a, c, g, or t
  misc_feature (3951)..(3954): n is a, c, g, or t
  misc_feature (3957)..(3960): n is a, c, g, or t
  misc_feature (3979)..(3979): n is a, c, g, or t
  misc_feature (3984)..(3984): n is a, c, g, or t
cnnnnncnnnnnnngnnnnngncnnngncnnngnnnnnnnnnnnncnnnnncnnagncnnnnncnnnnncnnnnncnncngngncngcnncngcnncngcnncngcnccngcnccngcnccngcnccngcancngcnccngcaccagcaccagcaccagcaccagcaccagctgctgtgtcatccaaagtcacttatgccgctgatgcgttcttcgattttgataaatctgttatcaagcctgaaggcaaagccaagctggatgatttggccgataaagtcaaagccatcaatttggaagtcatcatcgctgtgggtcacaccgactcagtgggttccgatggatacaaccaaaaactgtctatgcgccgttcacaagctgtgaangcttatttggttagcaaaggcatagacaaaacccgcatttacaccgaaggtaaaggcgagaagcagcctgtggctgacaacaagaccaaagacggtcgcgccaaaaaccgtcgcgttgaaattgaagtggttggttcacgtaagaactgatttccaattcagtcccctgaaaccccgcttacgcggggtttttttatgtccgccatttgtcagacaatatctttatgaataccttcaatgtagaccccgccgaacttgccaagttctctgacctcgcccaccgctggtgggatgtcaacagcgaattcaaacccttgcaccaaatcaaccccctgcgcttgggttggattgaaacatttggcaagctgcaaggtttgcaggtgcttgatgtgggctgcggcgggggcattttgtcggacgccatggcgcgtgccggcgcccatgtcacgggtatcgacttngccaccaagtcgctcaaggtagcgcagttgcacgctttggaaacccaaacccccaacatcacttaccgcgaggtcagcgcngangccatggccgcccagcagcccgcccatttcgatgtggtgacttgcatggaaatgctggaacatgttcccgacccggcctccgtggttaaagcctgtgcgaccttggttaaaccaggtggcagggtgtttttctcaaccctcaaccgcaatcccaaatcttttgtgtttgcgattttgggtgctgaatatgtgctgaacctgctgcccaaaggcacgcatgcctacgacaaatttatccgtcccagcgagctggcggctttttgccgtgaagctaatttgaataccttggccatgcgcggtttgcaatacaacccattgacgcaacgctattggctagacgccaataccagcgtcaactacatgctggccacccagcgtgaggcctgagatgcccttgccgcaagccgtgttgttcgacttggacggcaccctcatagacagcgcccctgacttaggtgcngcngctgccaaaatgcgcaccgatcgtggtttgcccagcctagactactcgctttaccgncccatggcgggctcgggagctcgcggcatgcttgaaattgcttttggcatgaagccagagcaccccgactacgaaacctacaaagacgagtttttaaacaattacgagcgcgccatgaccgtgcgcacggctgtctttgatggggtacacgacttgctggcgcatttggcgggtcttggtttgaaatggggcgtggtcaccaacaagcatcaacgctttgctttgcccctgacggcacaaatccctatgttcgcctctgcccaagccatcatcagtggcgacaccacaccacacgccaaaccgcatcccgagcccctgtttgaggcggcgcggcgtatgcaactgccgcccgagcaatgctggtatgtgggtgacgacgaacgcgacatcgtggcgggcaaagcagccggtatgaccacggttgccgcccactatggttatttgggcagtctggcccaagtgcatagctggggcgctgaccacatcatccattcacccttggctttggtcgatctgctgcgacaggcgtagaatcannacctcttggggctgcattggtttcgacatgggttcggacgcggcgcagggcatgtcgaggttctgtcacctcgtaaatccgcagaaaaaaactaactgcaaacgacgaacgtttcgcactcgcggcttaaacccgcgagccttgcaacagttggccaataggctgggcaaggggggtcgcaagaccgtccaggctgcaaggtaattcatatcggctggtttctcatcgggtaccttgatgaggagcgagaaaatagggtgctggtttggggtgcagcgtgtcgctgcgcggcaccttgaatgagacaaaaaatcagacgactacacatgtagaactgtccgaaaaagacttgtggacgcgggttcaaatcccgccagctccaccaatancnnaaaancnaaccctaaccggttggtttttttttcgcgccatttcttgagtcacattgaattcaaatgcttgccgatgcggtcaagtagctgttcgaaatccggctgtccttggtagtagagcggagaggattttttgtattcccgagcaaaaagatctcgctgcccagaatcgttcagggtgaaggctggattcttggcgattaccaattcatcaccagaccgaaagcgttgcacttttcggtcctgatacgcctgctccttcatgaattcctgaacttcgggcagattgagcaagcaatacacgtcgtagtagtgacgcagaaagttgccgggaaatttttgagcttcagccaaacggcggtacttggtcgagatggtctggagcttctcgacgaacgtgtgagtcggcgcgtagcagggnacatcggcggcacggttgtcgaaaacttcaacgccncggctcatcgcgaaatctaaagcccaagatgagatggtgacnggtcggttgggtgcggtatcgtcgaaccccagttccagcaggatgccgtctttcaaacctgtgacggtggctgcgcggggtgagtagacgagccgaatgcctgcgctgcgcattttttcatcgtcaaagaaggtgtcccgctcaacactgtcgatnccngggatgcggatgcgttttgacaactcgtcgtaataagcacgccgcgaatcgatgtgngcaggtttgtcctggttgcgccctgttttgacatccatgtcagcaggtggctcgatgcggatgtcaatgtcttctgagaaacgatggatgacnccgaagcctttggacagtgaagtgccnccctttaattcgaacacaaagccttgagcttggagtccccagaggctgtgcatgatccagtagtctttttcgaccaacatngggtcgagcnnnnnntnnttngnnnnaaccnnannnantnnatnnangnnanntnnttcntnaanaanntnngcnncnnncccannccnnannnnnttnnnnnnngncnnnnttgcngnnncnnnccannncnnctngnagncggggtnnntnaaannnnnnnnnnttgnnncggncnngncnnngnnnngnntngcgnnntnnggccaatncnnccanntngtnnannngnnccnnnnannggantnngnaantnnntttttnnggnangnnnggnttnncncgnaantnaannnnncggtnnccnnnttngaaannnccangnngttngnggtnnnanacnngnnnncnnttnnagnnnnggnnggnncccnggccnnccnnntngnnngnngnngnnnaaannnccaaaaanncntnnnnncnannaanncnnctnncnnctnnttgnnnnnnggnngnnaaggnaccaanntnnnnttgnttggnnncgnnntaangccccngngcnanttttttnngnncccnannggnnnccngtnnatncanangnnnnnnannngcattncnnagncnngnannnnntncnnncngnnnnnnacgnccnnctnncnnnncnncnnnangnnncnnnnngnnncccctnnggggngnnnnaannnntgtggcagcggctgacatngaggntttttcattgaagttt

SEQ ID NO: 589 - DNA, 4000 bp, Escherichia coli
  misc_feature (689)..(689): n is a, c, g, or t
  misc_feature (774)..(774): n is a, c, g, or t
gctggctcaaacttgtggcggaagatgccgaaaacaccaaattcttggccaatcgcaaactgcgtgatcgggcaaaaaacaaacccgaaaaatctgtcacaaaatacgactcaaagaaatagcacccctcatgtcagccaatgacgcagggcagaaatggtcgcctctggctgttccagggtcgggatatgtcccgcgttttcaataacaaccagctctgcgggctcaatcaattcagctatgaattcttgtctctgaagcggggtgactagatcttcagcaccacagagcaccaaacaggggcacttaattaaggccagagaccgctgataatcccggcgtttttgcaaagcccgcgattggcgcacgaagacatctggcccgagcgacagtgccatatccaccatcatgtcgaaaatatgggctttgaagggtgtctcggccaggagctcagggatcaactcctcgcggatgacctgttccagccgccccgtgcgcgccgcgatgatctgcggctccctttcggccgcccgtaccggcgtttcgcccatgggattggtcgcaatcaagcacaggcggctcacgcgagtgggcgcgcgccgcaagatctccagcgcaacagtaccaccgaacccatgcccgcagagcgcaaaacgacgcggcgccatgtccaaaatcatgctggcacnctcttcgacccgctcacccaaatggaccggcccaaccatcacagctcggtcgtgagagagcccgtcaatttgtggcgcaaaaagncgcgcatcgcacatcatgtcaggtaaaactaccagcggatccaaattcatgccgcattacttgcaatttttaaaacgcttgccaagttctcccgaggggaattaaccttaatagttctatatcttacaaagatattcgcaaaacccatgcggcgcgggcaaaccaaatctcaaccgcccatgaccatcaattctgaaaccgccattttggcatgatctgaaaacgggtcggactgcgcgattttcacagcggcctccatatcgtctgcctcaacgatcaaaaacccggtgatggccacaggctcatcacttactccatccgggccaaccactttggagcgtttcaccggtgaagcgggataaaccacggcctcccccaagcccgtcaaccagttcatccatttgcccatatgcgccttgccttcttctggcgacgtcatctgaggttgctctaaataagttaataaaaattgtgccacgcgataatctcctaaaattcattatgccttaatcgcgccaatcacatccgtaatcgcctcttgggtcaaggccagagctcggggagatgaaaaacggtgatcccctcccttgagcaagcgcagttgaatatcatcgcccgtggcaagcgcaaaaaggcgttgagccaggtcaacggaaacctcctcatcctcatcaccttgcaaaaatcgcgtgggaaagggcaaatgcagcgggctgcgcagaacaagatgcaaccgaccgtcctcaatgaggcgtttggtgatcggatagggatcgccgtaatccgacggaatattaaccagcccctcttgagccaaaaacttgcgcgtgtccgcattgaagcttgcccaaaacccatcttctgtaaaatctggagccgcggcgatggtcaccagcccggcaatacgctctggaattctctttgccatcaaaagggaaatccagcctcccatcgacgagccaaccaaaatttgtgggccttgggtgagttcacaaattgccgcctgcgcatcttccgcccaatcgccaatgcatccatcggtgaaggcctccgaagacgcgccgtgccccgaatagtcaaatcgcagaaacccgcgcccctccgccttgcaccaggcctccaattgcagcgccttggtgcccgtcatatcggacataaacccacccaaaaacaccacgcccggccccatgcccttgctctgcacataggcaatcttgcggcccgtatccgttgttaaaaatttcatgcgccccccaaagtctgatcctaattttagctgcacaatggacactgacaatgatatttcacgcccccgcgagtccatctgatgggcctgtgtcataatggccgcaacgcgccccgccgcttgagcggttgacagtcaaattcaaaaccgccaaacagcggccgaaccaaatacccgcaaccgggcgttccgtgggcgccaaactgacgaggagtgcccgtgatggcccaaatctcactcacccttcctgacaattctatccgccattatgaggccggcatcaccgccgccgaagtggctgctgatatcgccagctctttggcgaagaaggcgatttctgccacagtgaatggcgcacattttgatctggcttggcccattgagaccgacgccacgatcgccattcacaccatgaaagatgaggcgcaagccaatgagctgattcgccatgatttggcccatatcatggcccgtgcggttcaagagatctggcccgatgttcaggtgaccataggcccggtgatcaaagacggctggtattatgattttgatcgcaaagaccctttcaccccggaagacttgggcgtgatcgagaaaaagatgaaggaaatcatcaacaagcgcgatgccgtccgcaccgaagtttgggaccgtgcgcgcgcggtgcaacattataccgatgccaaagagccctataaggtggagctgattgacgccatccctggcgacgaaccgctgcggatgtattggcacggtgactggcaagacctctgccgtggaccgcatttgcaacacacagggcaagtgcccgcggatgggttcaaactgatgaatgtggccggcgcctattggcgcggcgacagcgaccgagcgatgctacaacgcatctatggggtcgcattttccaataaggaaaagctcaaagcccatctgcatatgctggaagaagccgcaaaacgcgaccaccgcaaattgggccgcgaaatggatttgtaccatatgcaagaagaggcgcccgggcaggtcttttggcatccaaacggctggaccatctacaccgagctacaagattacatgcgccgcaaacaacgcgcaggcgggtatgttgaagtcaacaccccgcaggtcgtggaccgcaagctctgggtggcctcaggccattgggacaaataccaggagaatatgttcatcgttgaggtggatgaagaacatgcccgcgaaaaggccgtcaatgcgctcaagccgatgaactgcccctgccatgttcaaattttcaatcaaggcttgaaatcctacagagatctgccgctgcgcatggcggaatttggcagctgcgcacgctacgagccatccggtgcactgcatggcattatgcgggtgcgcggctttacccaagacgacgggcatattttctgccgtgaagatcaaatcgaagaggaaacggcgctatatatcgcctatctaacctccgtttacaaagatctcggctttgaatcctttcgggtgaaattcagtgatcggccagaaaagcgctccggctctgatgaggtttgggatcgtgcagaaaccgcccttttggccgcgacccgcaaagcgggcattgaaccggagatgaacccgggagaaggcgccttctatggtccaaaattggagtttgttttgacagacgccattggccgggattggcaatgcggcacccatcaggtggatttcgttctgcctgaacgcttggacgccagctacatcggcgaagatgggaataagcataggccggtcatgctgcatcgcgcctgcttgggatcttttgaacggttcatcgggatattgatcgaagaacatgccggtcgcttgccactttggctggcaccgcgtcaggtggtcgtagcttccattgtgtcggacgccgatgaatttgttcatgaggcggttgcggccctgcgcgccgcgggcattcgggccgaagccgatacccgcaacgaa

SEQ ID NO: 590 - DNA, 4000 bp, Escherichia coli
  misc_feature (42)..(44): n is a, c, g, or t
  misc_feature (47)..(48): n is a, c, g, or t
  misc_feature (1209)..(1209): n is a, c, g, or t
acaggttcaatccctgtaccacccaccaagagaaaatgcttnnncgnnccggtagttcagctggttagaatgccggcctgtcacgccggaggtcgcgggttcgagtcccgtccggtccgccaatattaaaaaaggctacttcgcaagaagtggccttttttaatattggtagattggactgccggacgagagccctgttcgacaaactatgcctgcggcagagtttggacgcccagctcgcctgggcgctccgcaggagttgtaaaagccctatggcttttacaatcagtccctctagatttactattctggtctccctcaacagtcggaccatccagatgcccatgccaaatactcaatttgaccacatagtagtctttgtcgccgatctaaatcaggccatcacagattttactgaccttgggtttcaggtcactccgggcggctcccacggcattactgaaaatgctctggtgatcttccccaatcaaacctacatcgaactattagctctgaggcccagctggtaccgccccttaatcaagctggcaataaaactcaatattccccagcgacaggcaagcctaaaaaccaatatctattccaggctcactggctggatctgcggtgagactggaccagttgattggtgtgtgcgaaccagcgatctcaatgccagcctagcgctatgggagagccaggaatttgaaattttgcacagcgaaatattttttcgcgaacgaaacgatggccagatagctcgctggaaactgggcggcagcagacaggctgatttgccgtttttattagaggatctcactccaattgatacacgtgtgcccctgactggcgcaactggacatgccaatggtgcaaaagatttaatcggcgttcagtttggagtaagcgataaaatagttgccggcgatagactggggaagtcacttcttgccaaggcacagcaaaccgataaagctgaatgcgaagtccgcctgagcaatatggttgttagctatggcgacatagaatccgtggattccagagtggcactcgccattgcctattccggcgggcacatccaacaactggataccagcaaaactcagggtatagcaataaccctgatacccaccacttagcggtttagcggacctgatttacggacaaaaaaaaccctgatccaataattagatcagggcttgtttactnaggggagagttgtatatttcacaaaattcacaaggaattaaatcacttgcacctaataggacagcccctccgcagtaagttccagttagtatcaaaaattggtcatttaagtcaccgaaccgcaatagcacacttaagcagcctcaaattaaggtaccatctgcccaaggttaatgattgtgcaagcacaagtggagcgccaacaatgacagttaagttcgatcaccaattcaatgcctcggctgatcagctgtgggccattctcggaacgccagatcgcattgactgggttcccggcgcgacaagctgcacattcgatgggtcagttcgctcactgtcactgccaggtgccggagatattaaagagcgaattctgagtcataacgattcagcacgcactatggaatactcctgttttgaaacgccagcgcccctgaagtcacatcactccagcattcaggtaatcccagagggcagaaagtgccgcctgctctgggaaacctctgtgactcctatcgaaattgaaacctttatccgcactagtatggcaggctgtattgaaaagctgaccgaaatactggagcagacaactgagagcaaataacaccagcgtgcatccaggaggtattccctccctagttcgtcccagtaaatgcatgtgaaatcgaattttaataagtagccctattgtgccaactaaactgtccgatatagacatgcttgtgacgggtttcgacagtgcatgcattatctcaaaagttatgatagatttaaggtgtaagcctgtgaattgtgctactgacgagtgcaagcgaggctaagataagaaaatcagtgtagaaaatcagtaatgtaactgtgtaagaaactagtagttagtactctggtcagtctatttaaacaaggccaataattataaaacgacggcgcaaagctgttactaataaaaacgttgaggggaaaaacgatgaaaacatcattacgtactatgagtgcgctggctttagccatcgccactgcttctggtggtgcctatgcagcccagctggaagaagtaatagtaacagcgcaaaagcgtgccgagagcttgcaggacgtgccaatttcgatgaccgctatcgctggagaaaagattcaagaggctagcatccagagcatgacagatctaggggcgtatgttcctaacctatctatcaccgaaaacgccgtgaacagtatcatatccatgcgaggcatcggtgtcggagcaaaccaatcattcgagcaatctgttggtgtctatgttgacgggattcactacggtaagagccgtcacgtgcggaccggcctctttgatttgggtcaggtggaagttctgcgcggacctcagggtattcttttcggcaaaaatactctggccggtgcaattaacgtaacctctgcttccgctaatatcggcgatgaaatgagtggccgcgtcagcgttagccgcgagagcaaccagggcgaaattgccgagggtgtaatcaatatgcctgtttcggacaatatggctctgaggcttgcagttagagatcgcagcgatgacggttatatgaacaatggctttgctacatcaggtaatggtgcacagccctctatgccctcaactgacgagcaaatctggcgtttatctgccacttgggagccgaacgacagcacgactgttaagttcaagcacggcgagagtgactttgtgcgtctcggctctacggccgcattgagccgttttcagccagagcccaacatcgccgcatccaatggcttgatgtatggggtgatgggcataatgtttcccagctatggcgctatggtggctgcaagtggtaacgagcaaaccgacggctatcgagattcaattagcatcggcggacttgctcttgcacagagccttggccgagacatggatagaacgcatgaaaaggaagagggtactgacacgcagacagatagtacgtctctgaatattgagatggagctagataacggctttacactcagctcagtgaccggtgtcggcggctatgagtatgaagatggcattgacgctgacttcctgcccgtgcaatttatcggtcgatccgatatttctgagtacgatcaaaagagccaggagctgcgtttatcttcgccaaccgatggtgatttttcatgggtagcgggcgcttactggcaggagcagactcaggaaattgaccgtaccgtaattattgacggtacattgggtaacccgggcttgatgacagccctcgttggttgtagctcattcctgaatattcctgccgcccttactggcccggctttctgtatcaatggtgtgacatcgttcaaccagtcaggccgcgtttccaactggaaacaggacacagacgcatgggcggtgttcttccaaggtacctatgacattaccgacacccttagtctgaccgctggtgttcgatataccgaagaagagaagaccgttcacgcagaaactgctctggtgcatgacaccactggtctggcaacacctgataccaacccatacaacgctgcaattaatgcggctagctttggctcttgggctcatgtgttcgatgaagaccgcaagactgatcagctgatgcctgcgatgaacctgcagtgggaaatgtctgatactagcttgttctacatcagctactcagaaggttttaagagtggcggctttaatgctgtggacgatcaaaaccctgccttcttggccgatggcactgtgctgcgcacaacgccaggcattggtttcgagtatgaa

SEQ ID NO: 591 - DNA, 4000 bp, Escherichia coli
  misc_feature (75)..(75): n is a, c, g, or t
  misc_feature (2335)..(2335): n is a, c, g, or t
cgcgttcattcaagctttgcgaccagttaaagatcttgatcagtcgacaaatgtctcttgagcgctcgcgaaatntaattttgtgatgctgtctgatttgcgtctccgcaggcgctctatgttagacagtccttattggccttcagcaaccgtcgaaaaatgtgctccccgctatatctcgggtttcagtcaagaggacggttatatccagtcaggatagcccgcaaaatgagatctataattaatagactgatgtaccggcaatgcgtggtcgaatttctttaaaggtgttgtcgctactccgacacaacctgaggattaccccacaacggttcactaccggcaacagcctatcagacaatacccttggggagatacgacaaggaaagcttcagcttactgcgtctttcgaccgtttatgtcatagccggatagcgcgtaatcaaccaggcccgtcgccctctcccaatcataagtacgatgcgcgtgcgtcttcacaataaatggagcgcccgcatagaacttttcgtactgctcgtgacggccagcaaattccgacccgatcatatcccatgcaagtttcatgagcttgatccgatcctcacccggcacacccggagattgaacatacttggtgatcgtatcccgaatctccgggttcttgagatcttctaccgacgaaggcagctgaattaggccaccgccagcgagctcacgaacaatgtctaatagcttgggatttatttccgattgaaggttcatgttcgcgtagatgtggggcatgctcggcaacacatagccgttgtcatttgtccagcattctgcctcttgagcatagacaagcccctcgtacattgacgcataagtcgccagctttcctaattcaccgatgaccggtggcaggctcccggtaccgttcatgtcagtgatctttttagccagacccacaagaaacctgagcttagtcatgtaacggatctgggcttggctattccccatgatatgcgcaggagcctcaaaccactgcgctctcgcgacatcgacatttttgtatacgaataccctctcccaagggacgaagacgtcgtcataaacgaacaaagagtcggtctcatcgaaacgcgaggcgagcggataatcgaacacgctgttggccgctgccgcgtaagaccgtcttgagaaaattttaaccccgggcgcattgcatggaacagcgacggagatcgcataattctcatcgccttgccgcatagggtgaatagtgctgagttggacgaaatccgctaaaactgcccccgttcccagcatttgcgcgcctcgaatgataacgccatcatcgcgctcttcaactatcccggcgtaaaggtctggcggttcctgctggtgagcaggttttgtgcgatcgatctggggaggcacaatcgtataggcaatatacatatcgtggtcgcggcagaactcgtaaaatttgacggcgttatcggcaaacttttgtccccccctagccaaaacttctggggccatagcgtaacccgcaaaaaaacccgcgacatggtcaggactacgccccattaacccaagcgtaagttcggaagtttttgtgagagctttccgtctggcgacgagctcttcccgactgcgaggcattgcccaatgacgattgaccctatcgcctgtggcgggcgatgcgtaggtcatcaagtctgcattctctggcgcgcaagcgttatcaaaaagaccggcaaccgaagtaaccgctccctcgaacgcaggatgggtagttacgtctctgatcacttccccgtcatgaacgacatggcgaccgtcatctcgaatgctatcgacatactgagccccggagcgcacccctgtcccgaaggcttccccgcgacaaaagccgatacagccgcagatcggttgttgtccgcagtctgccgacatttccgctaacttggtcgccatggttctacctttcaaaacgtttgttttcactactatacgcaaaaactgcgaagagagttgtcgcttttttgcggaaatggcaaatttgtcgcagccaagaaggagaaatttgatggcgagccggccggttacagagaacccgctctacaacgataataagatgaagatcggcatcattgcgatgaactgctcgcatggctcgacaatctctcaggtggaaggtgcctgggaaatgaactggccggacacccgagaagtggccgtcatggccgaccgcgccgggtttgaagcattgttgccagtagcacgctggcgtggttacggtgggcccactaattttaataacaggacgttcgaaacttataactgggcngccgccgtcgctgcggtgacgaattattcctgcatcttttcgacctctcacgtgcccctgacccacccggtcgccgcagccaaacagtgcgcgacgatcgatcacatctccggtggccgttttgccctcaacgttgtgtgcggctggttcaagaacgaattcgagatgttcggcgcagactggaacgagcacgacgtgcgctacgaatatgctaccgagtggctcaacttcgtgcgccggatatggagtgagaaaggagagttcgattttcacggccgctggttcgactcgaaaaacgtttggagcgagcccaagcccatccagagcccgatgccgcccgtgatgaatgccggcggatcggaggccggacaggtttttgcagccacccaggcggatatgaatttcgtcatcctgaaagaacgcgacatcgaaggcggcaaggcgcaaatcgcgcatctgaaaaacatggcgaaggacgcggggcgcgacgtcaagagctggatccacgtttacgtggtatgccgggagaccgagcaggaagcaaaggactacctaaactactatgtgagcgaaaaaggcgattacgaggcggtcaacaacctgctcgaaatattcggcatgcagtccgaaacgcttccaaatgaagtactcgatgaatttcgcttccactttatcgccggacacggcggatatccgctggttggcacgcccgaacagatcgtagacgaaatcggcaaactgatcgaaatcggcgtcgacgggatgctgatttcatgggttgactacaagaccgagtgcgaacagtggatcaaagaaattttgccactcatggagcaagctggacaaagagcacctgtaaaaacgctgtgacccagcattacgcacagccttgtcagcgtcgtctcatccatgacagtatcgtcgcattggaaaacagggagaggataatgaacttcaagttaaaaaaatatgccgcagcgtcgatcgttgcagccgcatcgcttggcgtcgcatcaatggcttctgcgcagatcgatatgaaaatcggctatccaacgacagctgacccgcaacatgactacgccgtgaaatttgttgccgaagtcaacaagcgaacgaatggaaaaataaagggtcgtgtattcccaactagtcagctgggtaaaattccgagacaaattgaaggcattcagctcggctcacaggagggattttttgcgcctccaggatttcttcaaggcgttaacaaggcgtttcaggtcgctgatgttcctgggctttttgcagatcatcaacatgcccatcgaagcctcaatgaccccagcttcaaaccattatttaccgcccttggggaaaacaaaggtataaccatctcgggtgtatggatctacgacggcgcctcctacatggcaacgaaaccgatcggcaagattgccgattttcgaggattgaagatacgggtgcttgcgacggaaatagaacgtctgagtgttgcaacgcttggagcgaccggtgtcccgattccgttcaccgaggtggtgccgtctattcaacgtaaagtcgtagatggagctaggaccagcctggtagtcgcgggcaaagctaaatttccgacggttactaataacctcactataaccaacggctactatattccttgcatat

SEQ ID NO: 592 - DNA, 4000 bp, Escherichia coli
  misc_feature (1)..(13): n is a, c, g, or t
  misc_feature (15)..(20): n is a, c, g, or t
  misc_feature (22)..(22): n is a, c, g, or t
  misc_feature (24)..(25): n is a, c, g, or t
  misc_feature (27)..(32): n is a, c, g, or t
  misc_feature (35)..(38): n is a, c, g, or t
  misc_feature (40)..(41): n is a, c, g, or t
  misc_feature (43)..(45): n is a, c, g, or t
  misc_feature (47)..(49): n is a, c, g, or t
  misc_feature (52)..(53): n is a, c, g, or t
  misc_feature (55)..(55): n is a, c, g, or t
  misc_feature (57)..(60): n is a, c, g, or t
  misc_feature (62)..(62): n is a, c, g, or t
  misc_feature (64)..(64): n is a, c, g, or t
  misc_feature (66)..(66): n is a, c, g, or t
  misc_feature (68)..(68): n is a, c, g, or t
  misc_feature (71)..(84): n is a, c, g, or t
  misc_feature (86)..(86): n is a, c, g, or t
  misc_feature (89)..(93): n is a, c, g, or t
  misc_feature (95)..(97): n is a, c, g, or t
  misc_feature (99)..(106): n is a, c, g, or t
  misc_feature (108)..(110): n is a, c, g, or t
  misc_feature (113)..(125): n is a, c, g, or t
  misc_feature (128)..(128): n is a, c, g, or t
  misc_feature (130)..(139): n is a, c, g, or t
  misc_feature (141)..(143): n is a, c, g, or t
  misc_feature (147)..(149): n is a, c, g, or t
  misc_feature (152)..(152): n is a, c, g, or t
  misc_feature (154)..(169): n is a, c, g, or t
  misc_feature (171)..(172): n is a, c, g, or t
  misc_feature (174)..(174): n is a, c, g, or t
  misc_feature (178)..(179): n is a, c, g, or t
  misc_feature (181)..(181): n is a, c, g, or t
  misc_feature (183)..(184): n is a, c, g, or t
  misc_feature (186)..(187): n is a, c, g, or t
  misc_feature (189)..(190): n is a, c, g, or t
  misc_feature (192)..(193): n is a, c, g, or t
  misc_feature (195)..(195): n is a, c, g, or t
  misc_feature (199)..(208): n is a, c, g, or t
  misc_feature (210)..(212): n is a, c, g, or t
  misc_feature (214)..(216): n is a, c, g, or t
  misc_feature (218)..(218): n is a, c, g, or t
  misc_feature (220)..(227): n is a, c, g, or t
  misc_feature (229)..(229): n is a, c, g, or t
  misc_feature (232)..(234): n is a, c, g, or t
  misc_feature (237)..(242): n is a, c, g, or t
  misc_feature (244)..(247): n is a, c, g, or t
  misc_feature (250)..(255): n is a, c, g, or t
  misc_feature (258)..(264): n is a, c, g, or t
  misc_feature (266)..(266): n is a, c, g, or t
  misc_feature (268)..(270): n is a, c, g, or t
  misc_feature (272)..(276): n is a, c, g, or t
  misc_feature (278)..(278): n is a, c, g, or t
  misc_feature (280)..(286): n is a, c, g, or t
  misc_feature (288)..(288): n is a, c, g, or t
  misc_feature (290)..(293): n is a, c, g, or t
  misc_feature (296)..(304): n is a, c, g, or t
  misc_feature (307)..(308): n is a, c, g, or t
  misc_feature (310)..(318): n is a, c, g, or t
  misc_feature (321)..(328): n is a, c, g, or t
  misc_feature (330)..(334): n is a, c, g, or t
  misc_feature (336)..(336): n is a, c, g, or t
  misc_feature (339)..(339): n is a, c, g, or t
  misc_feature (342)..(343): n is a, c, g, or t
  misc_feature (345)..(350): n is a, c, g, or t
  misc_feature (352)..(355): n is a, c, g, or t
  misc_feature (357)..(358): n is a, c, g, or t
  misc_feature (361)..(366): n is a, c, g, or t
  misc_feature (368)..(376): n is a, c, g, or t
  misc_feature (378)..(378): n is a, c, g, or t
  misc_feature (380)..(380): n is a, c, g, or t
  misc_feature (382)..(383): n is a, c, g, or t
  misc_feature (385)..(385): n is a, c, g, or t
  misc_feature (387)..(394): n is a, c, g, or t
  misc_feature (396)..(398): n is a, c, g, or t
  misc_feature (400)..(400): n is a, c, g, or t
  misc_feature (402)..(402): n is a, c, g, or t
  misc_feature (404)..(404): n is a, c, g, or t
  misc_feature (406)..(408): n is a, c, g, or t
  misc_feature (411)..(414): n is a, c, g, or t
  misc_feature (416)..(417): n is a, c, g, or t
  misc_feature (419)..(419): n is a, c, g, or t
  misc_feature (421)..(421): n is a, c, g, or t
  misc_feature (423)..(425): n is a, c, g, or t
  misc_feature (427)..(429): n is a, c, g, or t
  misc_feature (431)..(431): n is a, c, g, or t
  misc_feature (433)..(433): n is a, c, g, or t
  misc_feature (435)..(442): n is a, c, g, or t
  misc_feature (444)..(444): n is a, c, g, or t
  misc_feature (448)..(449): n is a, c, g, or t
  misc_feature (451)..(451): n is a, c, g, or t
  misc_feature (455)..(458): n is a, c, g, or t
  misc_feature (460)..(462): n is a, c, g, or t
  misc_feature (465)..(468): n is a, c, g, or t
  misc_feature (470)..(473): n is a, c, g, or t
  misc_feature (475)..(475): n is a, c, g, or t
  misc_feature (477)..(477): n is a, c, g, or t
  misc_feature (479)..(485): n is a, c, g, or t
  misc_feature (488)..(491): n is a, c, g, or t
  misc_feature (494)..(498): n is a, c, g, or t
  misc_feature (500)..(503): n is a, c, g, or t
  misc_feature (507)..(507): n is a, c, g, or t
  misc_feature (509)..(511): n is a, c, g, or t
  misc_feature (513)..(517): n is a, c, g, or t
  misc_feature (520)..(523): n is a, c, g, or t
  misc_feature (525)..(526): n is a, c, g, or t
  misc_feature (528)..(528): n is a, c, g, or t
  misc_feature (530)..(531): n is a, c, g, or t
  misc_feature (533)..(555): n is a, c, g, or t
  misc_feature (558)..(558): n is a, c, g, or t
  misc_feature (560)..(560): n is a, c, g, or t
  misc_feature (562)..(569): n is a, c, g, or t
  misc_feature (571)..(571): n is a, c, g, or t
  misc_feature (573)..(575): n is a, c, g, or t
  misc_feature (581)..(592): n is a, c, g, or t
  misc_feature (594)..(594): n is a, c, g, or t
  misc_feature (596)..(600): n is a, c, g, or t
  misc_feature (603)..(608): n is a, c, g, or t
  misc_feature (610)..(617): n is a, c, g, or t
  misc_feature (619)..(621): n is a, c, g, or t
  misc_feature (624)..(624): n is a, c, g, or t
  misc_feature (626)..(629): n is a, c, g, or t
  misc_feature (632)..(632): n is a, c, g, or t
  misc_feature (634)..(635): n is a, c, g, or t
  misc_feature (637)..(637): n is a, c, g, or t
  misc_feature (639)..(640): n is a, c, g, or t
  misc_feature (642)..(643): n is a, c, g, or t
  misc_feature (646)..(647): n is a, c, g, or t
  misc_feature (649)..(655): n is a, c, g, or t
  misc_feature (657)..(659): n is a, c, g, or t
  misc_feature (661)..(664): n is a, c, g, or t
  misc_feature (667)..(667): n is a, c, g, or t
  misc_feature (670)..(670): n is a, c, g, or t
  misc_feature (672)..(672): n is a, c, g, or t
  misc_feature (675)..(675): n is a, c, g, or t
  misc_feature (678)..(679): n is a, c, g, or t
  misc_feature (682)..(682): n is a, c, g, or t
  misc_feature (684)..(685): n is a, c, g, or t
  misc_feature (687)..(688): n is a, c, g, or t
  misc_feature (690)..(691): n is a, c, g, or t
  misc_feature (694)..(696): n is a, c, g, or t
  misc_feature (698)..(698): n is a, c, g, or t
  misc_feature (701)..(701): n is a, c, g, or t
  misc_feature (703)..(704): n is a, c, g, or t
  misc_feature (706)..(709): n is a, c, g, or t
  misc_feature (711)..(712): n is a, c, g, or t
  misc_feature (717)..(718): n is a, c, g, or t
  misc_feature (721)..(721): n is a, c, g, or t
  misc_feature (723)..(723): n is a, c, g, or t
  misc_feature (725)..(725): n is a, c, g, or t
  misc_feature (727)..(728): n is a, c, g, or t
  misc_feature (732)..(732): n is a, c, g, or t
  misc_feature (734)..(736): n is a, c, g, or t
  misc_feature (739)..(741): n is a, c, g, or t
  misc_feature (743)..(746): n is a, c, g, or t
  misc_feature (748)..(748): n is a, c, g, or t
  misc_feature (751)..(753): n is a, c, g, or t
  misc_feature (761)..(763): n is a, c, g, or t
  misc_feature (768)..(768): n is a, c, g, or t
  misc_feature (771)..(772): n is a, c, g, or t
  misc_feature (774)..(775): n is a, c, g, or t
  misc_feature (777)..(777): n is a, c, g, or t
  misc_feature (781)..(781): n is a, c, g, or t
  misc_feature (783)..(783): n is a, c, g, or t
  misc_feature (787)..(787): n is a, c, g, or t
  misc_feature (789)..(789): n is a, c, g, or t
  misc_feature (791)..(791): n is a, c, g, or t
  misc_feature (793)..(793): n is a, c, g, or t
  misc_feature (795)..(795): n is a, c, g, or t
  misc_feature (797)..(799): n is a, c, g, or t
  misc_feature (801)..(801): n is a, c, g, or t
  misc_feature (803)..(803): n is a, c, g, or t
  misc_feature (807)..(807): n is a, c, g, or t
  misc_feature (812)..(812): n is a, c, g, or t
  misc_feature (814)..(814): n is a, c, g, or t
  misc_feature (817)..(817): n is a, c, g, or t
  misc_feature (821)..(822): n is a, c, g, or t
  misc_feature (826)..(826): n is a, c, g, or t
  misc_feature (830)..(833): n is a, c, g, or t
  misc_feature (838)..(841): n is a, c, g, or t
  misc_feature (846)..(846): n is a, c, g, or t
  misc_feature (849)..(852): n is a, c, g, or t
  misc_feature (854)..(854): n is a, c, g, or t
  misc_feature (859)..(859): n is a, c, g, or t
  misc_feature (861)..(861): n is a, c, g, or t
  misc_feature (863)..(863): n is a, c, g, or t
  misc_feature (865)..(865): n is a, c, g, or t
  misc_feature (867)..(867): n is a, c, g, or t
  misc_feature (870)..(873): n is a, c, g, or t
  misc_feature (875)..(875): n is a, c, g, or t
  misc_feature (877)..(877): n is a, c, g, or t
  misc_feature (879)..(880): n is a, c, g, or t
  misc_feature (887)..(889): n is a, c, g, or t
  misc_feature (891)..(892): n is a, c, g, or t
  misc_feature (894)..(894): n is a, c, g, or t
  misc_feature (897)..(897): n is a, c, g, or t
  misc_feature (899)..(899): n is a, c, g, or t
  misc_feature (901)..(903): n is a, c, g, or t
  misc_feature (905)..(909): n is a, c, g, or t
  misc_feature (911)..(911): n is a, c, g, or t
  misc_feature (913)..(915): n is a, c, g, or t
  misc_feature (918)..(918): n is a, c, g, or t
  misc_feature (920)..(921): n is a, c, g, or t
  misc_feature (926)..(930): n is a, c, g, or t
  misc_feature (934)..(935): n is a, c, g, or t
  misc_feature (937)..(941): n is a, c, g, or t
  misc_feature (944)..(946): n is a, c, g, or t
  misc_feature (949)..(949): n is a, c, g, or t
  misc_feature (951)..(951): n is a, c, g, or t
  misc_feature (953)..(956): n is a, c, g, or t
  misc_feature (958)..(959): n is a, c, g, or t
  misc_feature (961)..(961): n is a, c, g, or t
  misc_feature (965)..(965): n is a, c, g, or t
  misc_feature (967)..(967): n is a, c, g, or t
  misc_feature (969)..(971): n is a, c, g, or t
  misc_feature (973)..(974): n is a, c, g, or t
  misc_feature (976)..(979): n is a, c, g, or t
  misc_feature (982)..(982): n is a, c, g, or t
  misc_feature (985)..(986): n is a, c, g, or t
  misc_feature (993)..(996): n is a, c, g, or t
  misc_feature (1004)..(1004): n is a, c, g, or t
  misc_feature (1009)..(1009): n is a, c, g, or t
  misc_feature (1012)..(1012): n is a, c, g, or t
  misc_feature (1021)..(1021): n is a, c, g, or t
  misc_feature (1023)..(1026): n is a, c, g, or t
  misc_feature (1031)..(1032): n is a, c, g, or t
  misc_feature (1034)..(1034): n is a, c, g, or t
  misc_feature (1037)..(1040): n is a, c, g, or t
  misc_feature (1042)..(1044): n is a, c, g, or t
  misc_feature (1053)..(1053): n is a, c, g, or t
  misc_feature (1062)..(1062): n is a, c, g, or t
  misc_feature (1075)..(1075): n is a, c, g, or t
  misc_feature (1078)..(1079): n is a, c, g, or t
  misc_feature (1081)..(1082): n is a, c, g, or t
  misc_feature (1087)..(1087): n is a, c, g, or t
  misc_feature (1090)..(1091): n is a, c, g, or t
  misc_feature (1098)..(1098): n is a, c, g, or t
  misc_feature (1101)..(1105): n is a, c, g, or t
  misc_feature (1109)..(1109): n is a, c, g, or t
  misc_feature (1112)..(1114): n is a, c, g, or t
  misc_feature (1116)..(1116): n is a, c, g, or t
  misc_feature (1119)..(1120): n is a, c, g, or t
  misc_feature (1123)..(1123): n is a, c, g, or t
  misc_feature (1125)..(1126): n is a, c, g, or t
  misc_feature (1130)..(1130): n is a, c, g, or t
  misc_feature (1132)..(1132): n is a, c, g, or t
  misc_feature (1136)..(1136): n is a, c, g, or t
  misc_feature (1138)..(1138): n is a, c, g, or t
  misc_feature (1145)..(1145): n is a, c, g, or t
  misc_feature (1148)..(1148): n is a, c, g, or t
  misc_feature (1159)..(1159): n is a, c, g, or t
  misc_feature (1165)..(1165): n is a, c, g, or t
  misc_feature (1173)..(1173): n is a, c, g, or t
  misc_feature (1180)..(1180): n is a, c, g, or t
  misc_feature (1183)..(1188): n is a, c, g, or t
  misc_feature (1190)..(1190): n is a, c, g, or t
  misc_feature (1192)..(1194): n is a, c, g, or t
  misc_feature (1196)..(1196): n is a, c, g, or t
  misc_feature (1202)..(1202): n is a, c, g, or t
  misc_feature (1208)..(1209): n is a, c, g, or t
  misc_feature (1221)..(1222): n is a, c, g, or t
  misc_feature (1224)..(1226): n is a, c, g, or t
  misc_feature (1229)..(1231): n is a, c, g, or t
  misc_feature (1234)..(1235): n is a, c, g, or t
  misc_feature (1238)..(1239): n is a, c, g, or t
  misc_feature (1241)..(1241): n is a, c, g, or t
  misc_feature (1243)..(1243): n is a, c, g, or t
  misc_feature (1245)..(1247): n is a, c, g, or t
  misc_feature (1249)..(1249): n is a, c, g, or t
  misc_feature (1251)..(1251): n is a, c, g, or t
  misc_feature (1253)..(1255): n is a, c, g, or t
  misc_feature (1257)..(1258): n is a, c, g, or t
  misc_feature (1262)..(1266): n is a, c, g, or t
  misc_feature (1268)..(1268): n is a, c, g, or t
  misc_feature (1271)..(1275): n is a, c, g, or t
  misc_feature (1278)..(1279): n is a, c, g, or t
  misc_feature (1281)..(1282): n is a, c, g, or t
  misc_feature (1286)..(1288): n is a, c, g, or t
  misc_feature (1291)..(1291): n is a, c, g, or t
  misc_feature (1293)..(1293): n is a, c, g, or t
  misc_feature (1295)..(1295): n is a, c, g, or t
  misc_feature (1300)..(1302): n is a, c, g, or t
  misc_feature (1305)..(1305): n is a, c, g, or t
  misc_feature (1307)..(1307): n is a, c, g, or t
  misc_feature (1314)..(1314): n is a, c, g, or t
  misc_feature (1316)..(1317): n is a, c, g, or t
  misc_feature (1319)..(1320): n is a, c, g, or t
  misc_feature (1323)..(1324): n is a, c, g, or t
  misc_feature (3000)..(3000): n is a, c, g, or t
nnnnnnnnnnnnngnnnnnnananngnnnnnnaannnntnncnnnannnttnngngnnnntntntntnttnnnnnnnnnnnnnntnttnnnnngnnnannnnnnnnannnttnnnnnnnnnnnnnatntnnnnnnnnnntnnncccnnnatntnnnnnnnnnnnnnnnnanntntttnncncnnanngnntnnanaaannnnnnnnnncnnntnnngngnnnnnnnntnttnnncannnnnnannnnaannnnnnttnnnnnnnanannntnnnnnanannnnnnnanannnnttnnnnnnnnnccnnannnnnnnnntannnnnnnnannnnntntanaanncnnnnnnannnnannctnnnnnntnnnnnnnnnanananncncnnnnnnnnannntntntntnnntcnnnnanncncncnnnannncncncnnnnnnnntntttnnanatannnntnnngcnnnncnnnnananannnnnnnatnnnnagnnnnntnnnntgtntnnnannnnnttnnnntnncncnncnnnnnnnnnnnnnnnnnnnnnnngtntntnnnnnnnnanannntctctnnnnnnnnnnnncncnnnnngcnnnnnnannnnnnnncnnntanannnnaananntntnncnnctnngnnnnnnntnnnannnnaanatntnttnggnnatntnnanncnnaannncnttnanncnnnncnnttttnnggnangngnnaaangnnnttnnntnnnnanggnnntttttttnnnaaaanttnnanntncccntntttngntntnanannncncncccnccacncnaanaaanncccnaatnnnnaaaannnnaaatntcnnnnanttttntncncnanttnnnncntngnntatatannntnnanttngncnnncnnnnncntnnntgngnnaaaannnnntttnncnnnnnccnnntcncncnnnnanncncccncnannnanncnnnnttnccnnccccccnnnntttttccntgggnttncgggaaaancnnnnaaccnngnaannnnannnttttttaantttaaaccntttaaataaaggnttnnannctttnagnntaaattngcnnnnntttntcnnntnaannttncnnaaantntttngnttttccnttnaattaaaaaanttaaanttgggganaaaaaanaannnnnntnannntntttttntttttnnaaaaaaacacanngnnnaannnagnntcnnantnannntntngnnngnntttnnnnngnaannnnnttnntnnaaannnttnantntttcnnnttncnaaaaaanannannccnnaaaaaaactagtattaatgcgcaacgtccgtaaagcgagtctccctaataacggtaattttaacttctccggggtatgtcacttctttttctatacgtctagcgactttcttagccaacatgttggattcctcatctgtagcaatatcaggaacaacaacaatacgaacctcacgtccagcttgaatcgcataagttttttcaacgcccttgaaagaatctccaatttcttccagctttgtcattcgcttcacgtaagtttctagcatttcacggcgagctcctgggcgagaagcagaaatagtatctcctgctataactaaaacggcgtaaagagactccggctctatgtcttcatggtgcgcgccaatagcattaacaacatatttgtgttcattaaaccgcttggcaacatcaactcccaattgagtgtgcgtaccatctgtttgccgatcgatagacttaccaatatcgtgtaaaagtccagcacgtttagcaagttgaacatccaaccctaactctgcagccaaaaacccgcaaactctagcaacttctttaacatgttcaagaacattctgtgtgtagcttgtgcgatatttaagccgccctagcatatgcaccatctctgtatttatattatctatttccagctccataacggcttgttctccagccttcctagtttggctcgcgacctctttacgacacttggccacaacctcttcaatctttcctgggtgaatgcgcccatcaagtatcaattgctctaatgtaagacgggcaacttcgcggcgtatcggatcgaacccggataatattactgctcccggcgtatcgtcaataataagatcaactcccgtggcctgctcaagagcacgaatatttctaccttcacgccctataatgcgccccttaatcgaatcgtccgaaagggccaccacagagactgtactttcggccacactatcagacgctaatctctgcactgccatggtgataattttttttgcctcttcctccgcattattcttcgcattctcttcaattttctttacttcttttgctgcatccagatgtgctaaatcgacaaccttcgccttaatttcttctatagcttgctcagcggtaaaagagccgatgagttcaagttttttcatttcttcctgagccaatgcctcgtaccgcgacttttcatctaagcccgactgcttagttttttctgcttctttcaccctagcggctaactgtttttcaaaatctaccaaactcaccttcgaaagccttaactcatcttcttttttgtgcattctacgttgctgatctcgcaattcctcccgtttggcctgaacttctttttcgactttttccttttcaactaagacttgctcttttccttcaacaacagcggctttaaatctattttgcgcctcctgttctgcttcttcgataatctttatctttctggcttcagcttccttaagctggtattgacttattagtttacgcaggaaataaccaatcaaataaccaaccaccgctgccaaaaacattcctacaagcagggtggaaaaattaaatttaacagctgtaaaaatatgcatacccattacctcaatattatgtaattaaacctcaacgcctgacatgtcacggcatcttagtgctttagtttctgtnattaaaaaatgaactggttcatctaagtctgagtgtggaactaaattaaaaagttgaaaatcataacccaccgcgactcggctcacatttccggtaatttttttaaaaaatttatcatagaatcctcccccgtaaccaattcgattcccgaaactatcgaatgctaggccaggcactacgacaaagtctatatttgaaaaaggaactatattccgaaatttaggagcaggttgtctaacgccatactctcctatcacaaaatctatatccatcgaaggaatacggcttgcctttaaattttctcctcctggatctagcaatggaaccaaaacttgctttcctaaccgtagggattccagaattatcctctctgtctgcacttcaaaagaagtcgagagaaaacaaaaaatagttttggacttcttaaattcatccatgccaaacaaccgttgagcaatggcaatgtttttctcctctttttctagaccaccaagctcctctcgtttttgaacaatcatttttcggatcgctattttagctttggctgccgactccgaattgacctctaacgtcatatcaaacctcatcaagtagtcacactcaattatccagtcaacacaaccttaaatgcagtcagacaagtaaaagttcagtcaaaataaaataagtttaaatccctaaaaatacaggtagagcaatcttttatgagcgaatcgcgagataacgcatcaaagcgaaaagcgagaggtgggttaatttaacacaagggtgaatcaagcaggaaagtctcttaaaaaattaatttatgcagtaaaatcactagacagtcttatcttgacaaacaaaacaagtccattgcttcgtttagaacttcatttaaccaaaaggcgcaaagagataaagctccagacacccatcacccaactttcctgagaacataaagggaatcaattctaccctacaaaaaaacacttaaacctccccgaaatgccgtgcaaaa

SEQ ID NO: 593 - DNA, 4000 bp, Escherichia coli
  misc_feature (1)..(13): n is a, c, g, or t
  misc_feature (15)..(45): n is a, c, g, or t
  misc_feature (47)..(83): n is a, c, g, or t
  misc_feature (85)..(136): n is a, c, g, or t
  misc_feature (138)..(157): n is a, c, g, or t
  misc_feature (159)..(176): n is a, c, g, or t
  misc_feature (178)..(210): n is a, c, g, or t
  misc_feature (212)..(212): n is a, c, g, or t
  misc_feature (214)..(239): n is a, c, g, or t
  misc_feature (241)..(279): n is a, c, g, or t
  misc_feature (281)..(281): n is a, c, g, or t
  misc_feature (283)..(291): n is a, c, g, or t
  misc_feature (293)..(301): n is a, c, g, or t
  misc_feature (303)..(325): n is a, c, g, or t
  misc_feature (327)..(327): n is a, c, g, or t
  misc_feature (329)..(329): n is a, c, g, or t
  misc_feature (331)..(358): n is a, c, g, or t
  misc_feature (360)..(362): n is a, c, g, or t
  misc_feature (364)..(365): n is a, c, g, or t
  misc_feature (367)..(374): n is a, c, g, or t
  misc_feature (376)..(382): n is a, c, g, or t
  misc_feature (384)..(385): n is a, c, g, or t
  misc_feature (387)..(391): n is a, c, g, or t
  misc_feature (393)..(400): n is a, c, g, or t
  misc_feature (402)..(406): n is a, c, g, or t
  misc_feature (408)..(410): n is a, c, g, or t
  misc_feature (412)..(420): n is a, c, g, or t
  misc_feature (422)..(424): n is a, c, g, or t
  misc_feature (426)..(467): n is a, c, g, or t
  misc_feature (470)..(470): n is a, c, g, or t
  misc_feature (472)..(477): n is a, c, g, or t
  misc_feature (479)..(481): n is a, c, g, or t
  misc_feature (483)..(485): n is a, c, g, or t
  misc_feature (487)..(498): n is a, c, g, or t
  misc_feature (500)..(502): n is a, c, g, or t
  misc_feature (505)..(517): n is a, c, g, or t
  misc_feature (519)..(564): n is a, c, g, or t
  misc_feature (566)..(573): n is a, c, g, or t
  misc_feature (575)..(583): n is a, c, g, or t
  misc_feature (586)..(590): n is a, c, g, or t
  misc_feature (593)..(593): n is a, c, g, or t
  misc_feature (596)..(602): n is a, c, g, or t
  misc_feature (604)..(612): n is a, c, g, or t
  misc_feature (614)..(617): n is a, c, g, or t
  misc_feature (619)..(619): n is a, c, g, or t
  misc_feature (621)..(624): n is a, c, g, or t
  misc_feature (626)..(644): n is a, c, g, or t
  misc_feature (646)..(649): n is a, c, g, or t
  misc_feature (651)..(744): n is a, c, g, or t
  misc_feature (746)..(753): n is a, c, g, or t
  misc_feature (755)..(764): n is a, c, g, or t
  misc_feature (766)..(775): n is a, c, g, or t
  misc_feature (777)..(785): n is a, c, g, or t
  misc_feature (787)..(800): n is a, c, g, or t
  misc_feature (802)..(803): n is a, c, g, or t
  misc_feature (805)..(809): n is a, c, g, or t
  misc_feature (811)..(814): n is a, c, g, or t
  misc_feature (816)..(819): n is a, c, g, or t
  misc_feature (821)..(821): n is a, c, g, or t
  misc_feature (823)..(824): n is a, c, g, or t
  misc_feature (827)..(828): n is a, c, g, or t
  misc_feature (830)..(830): n is a, c, g, or t
  misc_feature (832)..(834): n is a, c, g, or t
  misc_feature (837)..(840): n is a, c, g, or t
  misc_feature (842)..(842): n is a, c, g, or t
  misc_feature (844)..(844): n is a, c, g, or t
  misc_feature (846)..(853): n is a, c, g, or t
  misc_feature (855)..(872): n is a, c, g, or t
  misc_feature (876)..(877): n is a, c, g, or t
  misc_feature (879)..(883): n is a, c, g, or t
  misc_feature (886)..(886): n is a, c, g, or t
  misc_feature (888)..(890): n is a, c, g, or t
  misc_feature (892)..(898): n is a, c, g, or t
  misc_feature (900)..(902): n is a, c, g, or t
  misc_feature (904)..(906): n is a, c, g, or t
  misc_feature (908)..(909): n is a, c, g, or t
  misc_feature (913)..(919): n is a, c, g, or t
  misc_feature (922)..(927): n is a, c, g, or t
  misc_feature (931)..(931): n is a, c, g, or t
  misc_feature (933)..(934): n is a, c, g, or t
  misc_feature (936)..(939): n is a, c, g, or t
  misc_feature (942)..(942): n is a, c, g, or t
  misc_feature (944)..(946): n is a, c, g, or t
  misc_feature (948)..(948): n is a, c, g, or t
  misc_feature (950)..(951): n is a, c, g, or t
  misc_feature (953)..(969): n is a, c, g, or t
  misc_feature (971)..(976): n is a, c, g, or t
  misc_feature (978)..(986): n is a, c, g, or t
  misc_feature (989)..(991): n is a, c, g, or t
  misc_feature (993)..(993): n is a, c, g, or t
  misc_feature (995)..(995): n is a, c, g, or t
  misc_feature (997)..(1003): n is a, c, g, or t
  misc_feature (1008)..(1010): n is a, c, g, or t
  misc_feature (1012)..(1015): n is a, c, g, or t
  misc_feature (1017)..(1019): n is a, c, g, or t
  misc_feature (1021)..(1029): n is a, c, g, or t
  misc_feature (1031)..(1032): n is a, c, g, or t
  misc_feature (1034)..(1034): n is a, c, g, or t
  misc_feature (1036)..(1036): n is a, c, g, or t
  misc_feature (1038)..(1039): n is a, c, g, or t
  misc_feature (1041)..(1043): n is a, c, g, or t
  misc_feature (1045)..(1045): n is a, c, g, or t
  misc_feature (1047)..(1047): n is a, c, g, or t
  misc_feature (1049)..(1051): n is a, c, g, or t
  misc_feature (1053)..(1058): n is a, c, g, or t
  misc_feature (1060)..(1067): n is a, c, g, or t
  misc_feature (1070)..(1070): n is a, c, g, or t
  misc_feature (1074)..(1074): n is a, c, g, or t
  misc_feature (1076)..(1078): n is a, c, g, or t
  misc_feature (1080)..(1108): n is a, c, g, or t
  misc_feature (1110)..(1110): n is a, c, g, or t
  misc_feature (1112)..(1126): n is a, c, g, or t
  misc_feature (1130)..(1130): n is a, c, g, or t
  misc_feature (1134)..(1134): n is a, c, g, or t
  misc_feature (1136)..(1137): n is a, c, g, or t
  misc_feature (1140)..(1143): n is a, c, g, or t
  misc_feature (1145)..(1147): n is a, c, g, or t
  misc_feature (1151)..(1152): n is a, c, g, or t
  misc_feature (1154)..(1160): n is a, c, g, or t
  misc_feature (1162)..(1166): n is a, c, g, or t
  misc_feature (1168)..(1168): n is a, c, g, or t
  misc_feature (1170)..(1170): n is a, c, g, or t
  misc_feature (1173)..(1174): n is a, c, g, or t
  misc_feature (1177)..(1183): n is a, c, g, or t
  misc_feature (1188)..(1192): n is a, c, g, or t
  misc_feature (1194)..(1195): n is a, c, g, or t
  misc_feature (1198)..(1202): n is a, c, g, or t
  misc_feature (1204)..(1207): n is a, c, g, or t
  misc_feature (1209)..(1210): n is a, c, g, or t
  misc_feature (2029)..(2029): n is a, c, g, or t
nnnnnnnnnnnnncnnnnnnnnnnnnnnnnnnnnnnnnnnnnnnnannnnnnnnnnnnnnnnnnnnnnnnnnnnnnnnnnnnntnnnnnnnnnnnnnnnnnnnnnnnnnnnnnnnnnnnnnnnnnnnnnnnnnnnngnnnnnnnnnnnnnnnnnnnncnnnnnnnnnnnnnnnnnntnnnnnnnnnnnnnnnnnnnnnnnnnnnnnnnnntntnnnnnnnnnnnnnnnnnnnnnnnnnnannnnnnnnnnnnnnnnnnnnnnnnnnnnnnnnnnnnnnncntnnnnnnnnncnnnnnnnnncnnnnnnnnnnnnnnnnnnnnnnnananannnnnnnnnnnnnnnnnnnnnnnnnnnngnnntnntnnnnnnnngnnnnnnngnngnnnnngnnnnnnnngnnnnntnnnannnnnnnnngnnncnnnnnnnnnnnnnnnnnnnnnnnnnnnnnnnnnnnnnnnnnntantnnnnnnannngnnngnnnnnnnnnnnngnnnctnnnnnnnnnnnnncnnnnnnnnnnnnnnnnnnnnnnnnnnnnnnnnnnnnnnnnnnnnnncnnnnnnnntnnnnnnnnngcnnnnnaanaannnnnnngnnnnnnnnnannnnanannnnannnnnnnnnnnnnnnnnnntnnnncnnnnnnnnnnnnnnnnnnnnnnnnnnnnnnnnnnnnnnnnnnnnnnnnnnnnnnnnnnnnnnnnnnnnnnnnnnnnnnnnnnnnnnnnnnnnnntnnnnnnnncnnnnnnnnnntnnnnnnnnnntnnnnnnnnnannnnnnnnnnnnnntnncnnnnntnnnntnnnncntnnttnnanannnttnnnntnancnnnnnnnncnnnnnnnnnnnnnnnnnngaannannnnnttnannngnnnnnnnannnannncnnattnnnnnnncannnnnncgangnnannnnttngnnntntnntnnnnnnnnnnnnnnnnnannnnnntnnnnnnnnnttnnnangngnnnnnnntactnnngnnnnannntnnnnnnnnnannanancnnannncngntnnngnnnnnnannnnnnnnatnacancnnngnnnnnnnnnnnnnnnnnnnnnnnnnnnnnanannnnnnnnnnnnnnngatnattncnntgnnnngnnntaannannnnnnnannnnntnantgnnctnnnnnnnggtannnnncnnttnnnnnannnncnntcctcttttctcattttccgatccttccgtaccgcttcgtgatctcatacagcgtcttcacttccttctctccgaattcatccttcagaagacgccatttccagttgtttccgtaggtggaaggagcgttcatccttgcctcgtttccgtaccccagaaggtcctgcatggggatgatgcagagtctgctgacgcttcgcatggcggcgcagatcaggggtatgtgcatcccggcgtcgggagtcgtatggtcgcagaaatagtctctgactgcctccttctcctccggcttcaggccctcggaaaaccagccggtcaccgtctcgttgtcatgggtgccggtgtagaccacactgttcttttcgtaattgtggggaaggtaatcctccgcacagccggaatctcttgagtcaaaggcaaattccaggaccttcatcccgggatagccgctgtccttcaccagctgccggacactgtccgtcacataccccagatcctccgcgatgatctcccgtcccgggaaggcttccgagaccttccggaacagatccatgccgggtcccttctcccaatggcctgctcttgcgtcctccgcaccggcaggaatggaaaaatattcatcgaagccgcggaaatggtcgatccgcatcacatcataaatatcaaagcagtttttaagacgtttcagccaccaggcaaaacaggtctttttgtgatagtcccagtcatagagtgggttgccccagagctgtcccacagcgctgaagccatccggcgggcagcccgccgccgcggtctgtcggcggttttcatccagcnggaaaagttccggatccgcccagacgtctgaactgtccagggatacatagatcgggatgtctccgatgatccgtattcccttccggttcacgtagtccttcagctgcatccactcttcgtaaaactcaaactgcaggaaactgcagaaaccgatgccttcctccaggcgttcccgcgccgcggccaaggcttccggatccctgagtctcagcggatcttcccattcgtaccagggccttcctccgttctcttccttcagagccatgaacagcgcgtagtccggaagccattccgtcttctccgtgaacgcccggaacttctcattctcttcgatccggctgtttctgtacgccttccggagcagctcatagcggcgttggtactgcagcacgtaatccacaccgcgcgggtcggaagaaaggccggcttcgcggcagtccgcctcagtgatccatcccttttccaccagcgtctcaggtgaaatgtagtaagggttgcccgcgaaggtggagaaggactggtacggtgaatctccgtatcccaccggccccagcggcaggatctgccagtaactctggcccgcctctgaaaggcggtccgcaaactcatatgcttccctgctgaagcagccgatcccgtattcggaaggaaggctgctgatggcaagaagaattccactttctctcatgctgtctgctcctttattcattcgatcaccgccaggactccgaaatggtcggaaagcaccggcccgctgatcccgttcaggaccacctttgactgaagcaccctgtgcctttttgcggtccagatataatccaggcgcatgcccgtatgttcaccgtccctccatccgtcgatgtttcccggaacggtgatgccgctgtcttttatttcggcatcctcataactgtcccgccacccgaggtccaggaccatgtcccttccctctccgcggatcgctgcgggactgttgaaatctcccataaggaaactgtcagaaccgtcctgcggacgaagcttcctttcgcggagcgccttctgcagccgttccatctgcccccggaagttttcctccggatcattccaccatcccatgtggacgctcaaaaaggcaggcccgtcagcggtgcaggccgccagcgccttccgggtcttccagttggagaagtcccggacgccggaaatatagaaactgtccgcgcctgtaacagggcggcggctgaagatggccagaccctcattgtattttccgtacccgagcttcgctccggtccaggtccaccagtactcctgctgcaggccctgaagttcctccgccaggaccagcgcacagttatcctcccggacgcgggagtccggtccggccggcacccaatgcatggggagggggccggagaccaccggcctgtcctcctcttcactgcattcctggatcgccgcggcatcgatctcttcttccttcataaatgccgccagcgccttcatcttctgatgataaagttccggttcaaagtcacttccatggctgtgaatattgatagtaagcagtctcatagttctttcctctgcgtattgagcaaaatctgcccggtgagcaggctccccgttcatatttcactcattttttccggggtgctgaattgttacaggatatcgttgatatccgatttcagcacgtccgccttgggtccgtaaattgcctggatgccgttgtctttcttcacaaggcccatggcgccctctgccttccacgccggaagttcagccaccttggagagatccttcactgtcacgcggagcctggtcatgcaggcgtccacaaattcaatgttctcccgtccgccaaggagggcgatgatacgctcgggctggctgttcccgcccgctgcgtttcctgccgcgccggcagcggggcctgcctcttccttgccttcgtcatccatgtagtttcccagacggcccggcgta

SEQ ID NO: 594 - DNA, 4000 bp, Escherichia coli
  misc_feature (3)..(5): n is a, c, g, or t
  misc_feature (7)..(8): n is a, c, g, or t
  misc_feature (10)..(10): n is a, c, g, or t
  misc_feature (12)..(12): n is a, c, g, or t
  misc_feature (14)..(19): n is a, c, g, or t
  misc_feature (21)..(21): n is a, c, g, or t
  misc_feature (24)..(24): n is a, c, g, or t
  misc_feature (26)..(26): n is a, c, g, or t
  misc_feature (30)..(39): n is a, c, g, or t
  misc_feature (42)..(42): n is a, c, g, or t
  misc_feature (44)..(45): n is a, c, g, or t
  misc_feature (50)..(50): n is a, c, g, or t
  misc_feature (53)..(53): n is a, c, g, or t
  misc_feature (57)..(57): n is a, c, g, or t
  misc_feature (59)..(60): n is a, c, g, or t
  misc_feature (62)..(62): n is a, c, g, or t
  misc_feature (64)..(65): n is a, c, g, or t
  misc_feature (69)..(69): n is a, c, g, or t
  misc_feature (73)..(73): n is a, c, g, or t
  misc_feature (75)..(77): n is a, c, g, or t
  misc_feature (79)..(79): n is a, c, g, or t
  misc_feature (82)..(82): n is a, c, g, or t
  misc_feature (84)..(84): n is a, c, g, or t
  misc_feature (86)..(87): n is a, c, g, or t
  misc_feature (89)..(90): n is a, c, g, or t
  misc_feature (95)..(95): n is a, c, g, or t
  misc_feature (99)..(100): n is a, c, g, or t
  misc_feature (104)..(104): n is a, c, g, or t
  misc_feature (106)..(106): n is a, c, g, or t
  misc_feature (108)..(111): n is a, c, g, or t
  misc_feature (113)..(114): n is a, c, g, or t
  misc_feature (116)..(117): n is a, c, g, or t
  misc_feature (119)..(123): n is a, c, g, or t
  misc_feature (125)..(125): n is a, c, g, or t
  misc_feature (128)..(129): n is a, c, g, or t
  misc_feature (131)..(132): n is a, c, g, or t
  misc_feature (134)..(137): n is a, c, g, or t
  misc_feature (139)..(139): n is a, c, g, or t
  misc_feature (141)..(141): n is a, c, g, or t
  misc_feature (143)..(143): n is a, c, g, or t
  misc_feature (147)..(149): n is a, c, g, or t
  misc_feature (151)..(151): n is a, c, g, or t
  misc_feature (153)..(153): n is a, c, g, or t
  misc_feature (155)..(158): n is a, c, g, or t
  misc_feature (162)..(164): n is a, c, g, or t
  misc_feature (168)..(168): n is a, c, g, or t
  misc_feature (170)..(170): n is a, c, g, or t
  misc_feature (172)..(173): n is a, c, g, or t
  misc_feature (175)..(176): n is a, c, g, or t
  misc_feature (178)..(178): n is a, c, g, or t
  misc_feature (180)..(183): n is a, c, g, or t
  misc_feature (185)..(185): n is a, c, g, or t
  misc_feature (187)..(187): n is a, c, g, or t
  misc_feature (191)..(194): n is a, c, g, or t
  misc_feature (197)..(197): n is a, c, g, or t
  misc_feature (199)..(200): n is a, c, g, or t
  misc_feature (202)..(202): n is a, c, g, or t
  misc_feature (205)..(205): n is a, c, g, or t
  misc_feature (207)..(208): n is a, c, g, or t
  misc_feature (211)..(213): n is a, c, g, or t
  misc_feature (215)..(216): n is a, c, g, or t
  misc_feature (218)..(221): n is a, c, g, or t
  misc_feature (223)..(224): n is a, c, g, or t
  misc_feature (226)..(226): n is a, c, g, or t
  misc_feature (228)..(228): n is a, c, g, or t
  misc_feature (230)..(230): n is a, c, g, or t
  misc_feature (233)..(234): n is a, c, g, or t
  misc_feature (236)..(236): n is a, c, g, or t
  misc_feature (244)..(244): n is a, c, g, or t
  misc_feature (247)..(249): n is a, c, g, or t
  misc_feature (251)..(252): n is a, c, g, or t
  misc_feature (254)..(258): n is a, c, g, or t
  misc_feature (260)..(260): n is a, c, g, or t
  misc_feature (263)..(263): n is a, c, g, or t
  misc_feature (265)..(266): n is a, c, g, or t
  misc_feature (268)..(268): n is a, c, g, or t
  misc_feature (270)..(270): n is a, c, g, or t
  misc_feature (272)..(272): n is a, c, g, or t
  misc_feature (274)..(275): n is a, c, g, or t
  misc_feature (278)..(278): n is a, c, g, or t
  misc_feature (281)..(284): n is a, c, g, or t
  misc_feature (286)..(286): n is a, c, g, or t
  misc_feature (290)..(290): n is a, c, g, or t
  misc_feature (293)..(294): n is a, c, g, or t
  misc_feature (296)..(296): n is a, c, g, or t
  misc_feature (298)..(301): n is a, c, g, or t
  misc_feature (304)..(304): n is a, c, g, or t
  misc_feature (307)..(308): n is a, c, g, or t
  misc_feature (312)..(314): n is a, c, g, or t
  misc_feature (316)..(316): n is a, c, g, or t
  misc_feature (318)..(318): n is a, c, g, or t
  misc_feature (320)..(321): n is a, c, g, or t
  misc_feature (327)..(327): n is a, c, g, or t
  misc_feature (329)..(331): n is a, c, g, or t
  misc_feature (333)..(334): n is a, c, g, or t
  misc_feature (337)..(337): n is a, c, g, or t
  misc_feature (341)..(343): n is a, c, g, or t
  misc_feature (345)..(345): n is a, c, g, or t
  misc_feature (348)..(348): n is a, c, g, or t
  misc_feature (350)..(350): n is a, c, g, or t
  misc_feature (355)..(355): n is a, c, g, or t
  misc_feature (359)..(359): n is a, c, g, or t
  misc_feature (361)..(361): n is a, c, g, or t
  misc_feature (366)..(366): n is a, c, g, or t
  misc_feature (371)..(373): n is a, c, g, or t
  misc_feature (453)..(453): n is a, c, g, or t
  misc_feature (540)..(540): n is a, c, g, or t
  misc_feature (835)..(835): n is a, c, g, or t
  misc_feature (1062)..(1062): n is a, c, g, or t
  misc_feature (1237)..(1237): n is a, c, g, or t
  misc_feature (1240)..(1241): n is a, c, g, or t
  misc_feature (1960)..(1960): n is a, c, g, or t
  misc_feature (1991)..(1991): n is a, c, g, or t
  misc_feature (2005)..(2005): n is a, c, g, or t
  misc_feature (2301)..(2301): n is a, c, g, or t
  misc_feature (2493)..(2493): n is a, c, g, or t
  misc_feature (2502)..(2506): n is a, c, g, or t
  misc_feature (2508)..(2508): n is a, c, g, or t
  misc_feature (2510)..(2510): n is a, c, g, or t
  misc_feature (2513)..(2513): n is a, c, g, or t
  misc_feature (2521)..(2524): n is a, c, g, or t
  misc_feature (2526)..(2526): n is a, c, g, or t
  misc_feature (2529)..(2532): n is a, c, g, or t
  misc_feature (2534)..(2535): n is a, c, g, or t
  misc_feature (2537)..(2538): n is a, c, g, or t
  misc_feature (2540)..(2542): n is a, c, g, or t
  misc_feature (2544)..(2544): n is a, c, g, or t
  misc_feature (2546)..(2546): n is a, c, g, or t
  misc_feature (2548)..(2551): n is a, c, g, or t
  misc_feature (2553)..(2568): n is a, c, g, or t
  misc_feature (2572)..(2574): n is a, c, g, or t
  misc_feature (2576)..(2576): n is a, c, g, or t
  misc_feature (2579)..(2582): n is a, c, g, or t
  misc_feature (2585)..(2585): n is a, c, g, or t
  misc_feature (2588)..(2588): n is a, c, g, or t
  misc_feature (2591)..(2593): n is a, c, g, or t
  misc_feature (2595)..(2597): n is a, c, g, or t
  misc_feature (2599)..(2599): n is a, c, g, or t
  misc_feature (2601)..(2602): n is a, c, g, or t
  misc_feature (2604)..(2606): n is a, c, g, or t
  misc_feature (2608)..(2616): n is a, c, g, or t
  misc_feature (2618)..(2622): n is a, c, g, or t
  misc_feature (2625)..(2625): n is a, c, g, or t
  misc_feature (2627)..(2631): n is a, c, g, or t
  misc_feature (2633)..(2633): n is a, c, g, or t
  misc_feature (2635)..(2640): n is a, c, g, or t
  misc_feature (2642)..(2650): n is a, c, g, or t
  misc_feature (2654)..(2656): n is a, c, g, or t
  misc_feature (2658)..(2658): n is a, c, g, or t
  misc_feature (2660)..(2664): n is a, c, g, or t
  misc_feature (2668)..(2677): n is a, c, g, or t
  misc_feature (2679)..(2690): n is a, c, g, or t
  misc_feature (2692)..(2693): n is a, c, g, or t
  misc_feature (2695)..(2697): n is a, c, g, or t
  misc_feature (2701)..(2706): n is a, c, g, or t
  misc_feature (2708)..(2716): n is a, c, g, or t
  misc_feature (2720)..(2720): n is a, c, g, or t
  misc_feature (2723)..(2727): n is a, c, g, or t
  misc_feature (2729)..(2729): n is a, c, g, or t
  misc_feature (2731)..(2731): n is a, c, g, or t
  misc_feature (2734)..(2734): n is a, c, g, or t
  misc_feature (2736)..(2738): n is a, c, g, or t
  misc_feature (2741)..(2741): n is a, c, g, or t
  misc_feature (2743)..(2743): n is a, c, g, or t
  misc_feature (2746)..(2746): n is a, c, g, or t
  misc_feature (2749)..(2749): n is a, c, g, or t
  misc_feature (2751)..(2756): n is a, c, g, or t
  misc_feature (2758)..(2780): n is a, c, g, or t
  misc_feature (2782)..(2784): n is a, c, g, or t
  misc_feature (2787)..(2787): n is a, c, g, or t
  misc_feature (2789)..(2789): n is a, c, g, or t
  misc_feature (2792)..(2793): n is a, c, g, or t
  misc_feature (2795)..(2804): n is a, c, g, or t
  misc_feature (2806)..(2807): n is a, c, g, or t
  misc_feature (2812)..(2814): n is a, c, g, or t
  misc_feature (2816)..(2822): n is a, c, g, or t
  misc_feature (2825)..(2826): n is a, c, g, or t
  misc_feature (2828)..(2831): n is a, c, g, or t
  misc_feature (2833)..(2836): n is a, c, g, or t
  misc_feature (2838)..(2845): n is a, c, g, or t
  misc_feature (2854)..(2855): n is a, c, g, or t
  misc_feature (2858)..(2859): n is a, c, g, or t
  misc_feature (2862)..(2862): n is a, c, g, or t
  misc_feature (2865)..(2869): n is a, c, g, or t
  misc_feature (2871)..(2871): n is a, c, g, or t
  misc_feature (2873)..(2873): n is a, c, g, or t
  misc_feature (2875)..(2881): n is a, c, g, or t
  misc_feature (2883)..(2883): n is a, c, g, or t
  misc_feature (2885)..(2885): n is a, c, g, or t
  misc_feature (2887)..(2887): n is a, c, g, or t
  misc_feature (2892)..(2892): n is a, c, g, or t
  misc_feature (2895)..(2901): n is a, c, g, or t
  misc_feature (2908)..(2910): n is a, c, g, or t
  misc_feature (2912)..(2915): n is a, c, g, or t
  misc_feature (2918)..(2919): n is a, c, g, or t
  misc_feature (2921)..(2927): n is a, c, g, or t
  misc_feature (2930)..(2930): n is a, c, g, or t
  misc_feature (2934)..(2937): n is a, c, g, or t
  misc_feature (2940)..(2941): n is a, c, g, or t
  misc_feature (2943)..(2946): n is a, c, g, or t
  misc_feature (2948)..(2948): n is a, c, g, or t
  misc_feature (2950)..(2951): n is a, c, g, or t
  misc_feature (2953)..(2954): n is a, c, g, or t
  misc_feature (2956)..(2958): n is a, c, g, or t
  misc_feature (2960)..(2963): n is a, c, g, or t
  misc_feature (2965)..(2967): n is a, c, g, or t
  misc_feature (2969)..(2972): n is a, c, g, or t
  misc_feature (2974)..(2975): n is a, c, g, or t
  misc_feature (2977)..(2977): n is a, c, g, or t
  misc_feature (2979)..(2979): n is a, c, g, or t
  misc_feature (2981)..(2988): n is a, c, g, or t
  misc_feature (2990)..(2994): n is a, c, g, or t
  misc_feature (2996)..(2996): n is a, c, g, or t
  misc_feature (2999)..(3000): n is a, c, g, or t
  misc_feature (3002)..(3005): n is a, c, g, or t
  misc_feature (3008)..(3015): n is a, c, g, or t
  misc_feature (3017)..(3018): n is a, c, g, or t
  misc_feature (3021)..(3023): n is a, c, g, or t
  misc_feature (3026)..(3026): n is a, c, g, or t
  misc_feature (3031)..(3039): n is a, c, g, or t
  misc_feature (3041)..(3048): n is a, c, g, or t
  misc_feature (3050)..(3050): n is a, c, g, or t
  misc_feature (3055)..(3055): n is a, c, g, or t
  misc_feature (3057)..(3060): n is a, c, g, or t
  misc_feature (3062)..(3064): n is a, c, g, or t
  misc_feature (3067)..(3070): n is a, c, g, or t
  misc_feature (3072)..(3073): n is a, c, g, or t
  misc_feature (3076)..(3076): n is a, c, g, or t
  misc_feature (3080)..(3080): n is a, c, g, or t
  misc_feature (3082)..(3082): n is a, c, g, or t
  misc_feature (3085)..(3086): n is a, c, g, or t
  misc_feature (3089)..(3092): n is a, c, g, or t
  misc_feature (3094)..(3097): n is a, c, g, or t
  misc_feature (3100)..(3101): n is a, c, g, or t
  misc_feature (3103)..(3104): n is a, c, g, or t
  misc_feature (3107)..(3117): n is a, c, g, or t
  misc_feature (3119)..(3119): n is a, c, g, or t
  misc_feature (3121)..(3122): n is a, c, g, or t
  misc_feature (3124)..(3126): n is a, c, g, or t
  misc_feature (3128)..(3132): n is a, c, g, or t
  misc_feature (3134)..(3134): n is a, c, g, or t
  misc_feature (3137)..(3139): n is a, c, g, or t
  misc_feature (3141)..(3145): n is a, c, g, or t
  misc_feature (3147)..(3150): n is a, c, g, or t
  misc_feature (3153)..(3155): n is a, c, g, or t
  misc_feature (3159)..(3163): n is a, c, g, or t
  misc_feature (3165)..(3168): n is a, c, g, or t
  misc_feature (3170)..(3173): n is a, c, g, or t
  misc_feature (3175)..(3175): n is a, c, g, or t
  misc_feature (3177)..(3177): n is a, c, g, or t
  misc_feature (3179)..(3182): n is a, c, g, or t
  misc_feature (3186)..(3186): n is a, c, g, or t
  misc_feature (3188)..(3189): n is a, c, g, or t
  misc_feature (3191)..(3192): n is a, c, g, or t
  misc_feature (3194)..(3194): n is a, c, g, or t
  misc_feature (3196)..(3196): n is a, c, g, or t
  misc_feature (3200)..(3204): n is a, c, g, or t
  misc_feature (3206)..(3206): n is a, c, g, or t
  misc_feature (3208)..(3220): n is a, c, g, or t
  misc_feature (3222)..(3224): n is a, c, g, or t
  misc_feature (3226)..(3245): n is a, c, g, or t
  misc_feature (3247)..(3247): n is a, c, g, or t
  misc_feature (3249)..(3249): n is a, c, g, or t
  misc_feature (3252)..(3256): n is a, c, g, or t
  misc_feature (3259)..(3263): n is a, c, g, or t
  misc_feature (3265)..(3267): n is a, c, g, or t
  misc_feature (3269)..(3274): n is a, c, g, or t
  misc_feature (3276)..(3280): n is a, c, g, or t
  misc_feature (3282)..(3284): n is a, c, g, or t
  misc_feature (3287)..(3287): n is a, c, g, or t
  misc_feature (3289)..(3293): n is a, c, g, or t
  misc_feature (3295)..(3296): n is a, c, g, or t
  misc_feature (3299)..(3301): n is a, c, g, or t
  misc_feature (3306)..(3306): n is a, c, g, or t
  misc_feature (3310)..(3317): n is a, c, g, or t
  misc_feature (3320)..(3324): n is a, c, g, or t
  misc_feature (3327)..(3327): n is a, c, g, or t
  misc_feature (3329)..(3330): n is a, c, g, or t
  misc_feature (3332)..(3335): n is a, c, g, or t
  misc_feature (3337)..(3341): n is a, c, g, or t
  misc_feature (3343)..(3344): n is a, c, g, or t
  misc_feature (3347)..(3347): n is a, c, g, or t
  misc_feature (3350)..(3351): n is a, c, g, or t
  misc_feature (3353)..(3353): n is a, c, g, or t
  misc_feature (3356)..(3358): n is a, c, g, or t
  misc_feature (3360)..(3366): n is a, c, g, or t
  misc_feature (3368)..(3369): n is a, c, g, or t
  misc_feature (3371)..(3379): n is a, c, g, or t
  misc_feature (3381)..(3383): n is a, c, g, or t
  misc_feature (3385)..(3389): n is a, c, g, or t
  misc_feature (3392)..(3392): n is a, c, g, or t
  misc_feature (3394)..(3394): n is a, c, g, or t
  misc_feature (3398)..(3399): n is a, c, g, or t
  misc_feature (3401)..(3405): n is a, c, g, or t
  misc_feature (3407)..(3414): n is a, c, g, or t
  misc_feature (3416)..(3416): n is a, c, g, or t
  misc_feature (3418)..(3421): n is a, c, g, or t
  misc_feature (3423)..(3425): n is a, c, g, or t
  misc_feature (3427)..(3428): n is a, c, g, or t
  misc_feature (3430)..(3435): n is a, c, g, or t
  misc_feature (3437)..(3440): n is a, c, g, or t
  misc_feature (3442)..(3442): n is a, c, g, or t
  misc_feature (3445)..(3448): n is a, c, g, or t
  misc_feature (3451)..(3451): n is a, c, g, or t
  misc_feature (3453)..(3456): n is a, c, g, or t
  misc_feature (3458)..(3464): n is a, c, g, or t
  misc_feature (3468)..(3469): n is a, c, g, or t
  misc_feature (3472)..(3475): n is a, c, g, or t
  misc_feature (3477)..(3477): n is a, c, g, or t
  misc_feature (3479)..(3480): n is a, c, g, or t
  misc_feature (3482)..(3482): n is a, c, g, or t
  misc_feature (3484)..(3485): n is a, c, g, or t
  misc_feature (3487)..(3487): n is a, c, g, or t
  misc_feature (3489)..(3494): n is a, c, g, or t
  misc_feature (3497)..(3497): n is a, c, g, or t
  misc_feature (3499)..(3499): n is a, c, g, or t
  misc_feature (3502)..(3505): n is a, c, g, or t
  misc_feature (3508)..(3510): n is a, c, g, or t
  misc_feature (3512)..(3512): n is a, c, g, or t
  misc_feature (3514)..(3514): n is a, c, g, or t
  misc_feature (3516)..(3516): n is a, c, g, or t
  misc_feature (3518)..(3520): n is a, c, g, or t
  misc_feature (3522)..(3522): n is a, c, g, or t
  misc_feature (3525)..(3528): n is a, c, g, or t
  misc_feature (3531)..(3531): n is a, c, g, or t
  misc_feature (3533)..(3533): n is a, c, g, or t
  misc_feature (3535)..(3535): n is a, c, g, or t
  misc_feature (3537)..(3542): n is a, c, g, or t
  misc_feature (3545)..(3546): n is a, c, g, or t
  misc_feature (3549)..(3549): n is a, c, g, or t
  misc_feature (3551)..(3551): n is a, c, g, or t
  misc_feature (3554)..(3555): n is a, c, g, or t
  misc_feature (3557)..(3558): n is a, c, g, or t
  misc_feature (3560)..(3568): n is a, c, g, or t
  misc_feature (3570)..(3570): n is a, c, g, or t
  misc_feature (3572)..(3572): n is a, c, g, or t
  misc_feature (3574)..(3574): n is a, c, g, or t
  misc_feature (3576)..(3578): n is a, c, g, or t
  misc_feature (3580)..(3580): n is a, c, g, or t
  misc_feature (3582)..(3582): n is a, c, g, or t
  misc_feature (3584)..(3585): n is a, c, g, or t
  misc_feature (3588)..(3588): n is a, c, g, or t
  misc_feature (3590)..(3591): n is a, c, g, or t
  misc_feature (3593)..(3594): n is a, c, g, or t
  misc_feature (3596)..(3598): n is a, c, g, or t
  misc_feature (3600)..(3601): n is a, c, g, or t
  misc_feature (3604)..(3605): n is a, c, g, or t
  misc_feature (3607)..(3609): n is a, c, g, or t
  misc_feature (3611)..(3614): n is a, c, g, or t
  misc_feature (3616)..(3620): n is a, c, g, or t
  misc_feature (3622)..(3622): n is a, c, g, or t
  misc_feature (3624)..(3625): n is a, c, g, or t
  misc_feature (3627)..(3630): n is a, c, g, or t
  misc_feature (3632)..(3632): n is a, c, g, or t
  misc_feature (3635)..(3638): n is a, c, g, or t
  misc_feature (3640)..(3642): n is a, c, g, or t
  misc_feature (3645)..(3645): n is a, c, g, or t
  misc_feature (3647)..(3654): n is a, c, g, or t
  misc_feature (3656)..(3660): n is a, c, g, or t
  misc_feature (3662)..(3664): n is a, c, g, or t
  misc_feature (3666)..(3667): n is a, c, g, or t
  misc_feature (3669)..(3669): n is a, c, g, or t
  misc_feature (3671)..(3672): n is a, c, g, or t
  misc_feature (3674)..(3675): n is a, c, g, or t
  misc_feature (3678)..(3680): n is a, c, g, or t
  misc_feature (3683)..(3687): n is a, c, g, or t
  misc_feature (3689)..(3690): n is a, c, g, or t
  misc_feature (3692)..(3697): n is a, c, g, or t
  misc_feature (3700)..(3700): n is a, c, g, or t
  misc_feature (3702)..(3702): n is a, c, g, or t
  misc_feature (3705)..(3714): n is a, c, g, or t
  misc_feature (3717)..(3717): n is a, c, g, or t
  misc_feature (3719)..(3722): n is a, c, g, or t
  misc_feature (3724)..(3741): n is a, c, g, or t
  misc_feature (3743)..(3744): n is a, c, g, or t
  misc_feature (3747)..(3748): n is a, c, g, or t
  misc_feature (3750)..(3753): n is a, c, g, or t
  misc_feature (3757)..(3757): n is a, c, g, or t
  misc_feature (3759)..(3763): n is a, c, g, or t
  misc_feature (3767)..(3768): n is a, c, g, or t
  misc_feature (3771)..(3771): n is a, c, g, or t
  misc_feature (3773)..(3780): n is a, c, g, or t
  misc_feature (3783)..(3789): n is a, c, g, or t
  misc_feature (3791)..(3793): n is a, c, g, or t
  misc_feature (3795)..(3798): n is a, c, g, or t
  misc_feature (3800)..(3800): n is a, c, g, or t
  misc_feature (3802)..(3804): n is a, c, g, or t
  misc_feature (3806)..(3807): n is a, c, g, or t
  misc_feature (3809)..(3810): n is a, c, g, or t
  misc_feature (3812)..(3817): n is a, c, g, or t
  misc_feature (3821)..(3821): n is a, c, g, or t
  misc_feature (3825)..(3830): n is a, c, g, or t
  misc_feature (3834)..(3834): n is a, c, g, or t
  misc_feature (3838)..(3843): n is a, c, g, or t
  misc_feature (3845)..(3851): n is a, c, g, or t
  misc_feature (3854)..(3857): n is a, c, g, or t
  misc_feature (3859)..(3861): n is a, c, g, or t
  misc_feature (3865)..(3866): n is a, c, g, or t
  misc_feature (3868)..(3872): n is a, c, g, or t
  misc_feature (3875)..(3879): n is a, c, g, or t
  misc_feature (3881)..(3881): n is a, c, g, or t
  misc_feature (3883)..(3883): n is a, c, g, or t
  misc_feature (3885)..(3895): n is a, c, g, or t
  misc_feature (3898)..(3900): n is a, c, g, or t
  misc_feature (3902)..(3902): n is a, c, g, or t
  misc_feature (3906)..(3913): n is a, c, g, or t
  misc_feature (3916)..(3916): n is a, c, g, or t
  misc_feature (3918)..(3919): n is a, c, g, or t
  misc_feature (3921)..(3931): n is a, c, g, or t
  misc_feature (3933)..(3934): n is a, c, g, or t
  misc_feature (3936)..(3941): n is a, c, g, or t
  misc_feature (3943)..(3943): n is a, c, g, or t
  misc_feature (3947)..(3948): n is a, c, g, or t
  misc_feature (3951)..(3956): n is a, c, g, or t
  misc_feature (3958)..(3971): n is a, c, g, or t
  misc_feature (3973)..(3995): n is a, c, g, or t
  misc_feature (3997)..(3998): n is a, c, g, or t
cgnnntnngncncnnnnnncnccngngccnnnnnnnnnnccngnnccccnggngcgngnntntnncgcncccngnnngnggncncnnannccccncggnnctcngngnnnngnncnngnnnnncnggnntnngnnnngngngngcgnnngngngnnnncgcnnngccngnanncnngngnnnngngngggnnnnccngnncnccncnnaannncnntnnnngnntncncnggnncncgcgcggngcnnngnncnnnnngnggnanngngntntnnccnggnnnngngccncgnntntnnnnccncgnncccnnncngncnngtgtgngnnntnncgnaaannncnccncncgcgngggngngcggnggcannnggcgcgcgcgcttcccggccgcgggcgatgccgctatcatacgcggcccttttttgtgcataccggcgctgaagcgcagntacgcgagcgcgagagtcagatggccagctacacgaccagcgagatccgcggaggcctcaaagtcctcctcgacggcgagccctacnccgtgatcgagaacgagttcgtcaagccgggcaagggccaggcgttcaaccgcatcaaggtgcgcaacctcaagaccggccgcacgatcgagcggaccttcaagtcaggcgaatcgctcgaggccgccgacgtcgtcgacaccgacatgcagtatctctaccaggacggcgacttctggcatttcatggtgccggagaacttcgagcagtacaccgcgggcaagtcggcgctgggcgagaacgcgcagtggctcaaggagggcgtggtctgcatcgtgacgctctggaacaacgngccgctcgtggtcacgccgccgccgcacatcgagctcaaggtcatcgagaccgacccggggctgcgcggcgacaccgccaccggcggccagaagcccgccaagctcgagaccggcgcggtggtgcgggtgccgctcttcatcaacgagggtgaagtgatccgcatcgacacccgcacgggcgagtacatctcgcgcagcaaggggtaggcgcgccggcgggcgcgcnctctgaagggctcgggggccgccgacttcaggcgcgctgcagccgcggcgcgctccgcacccgccacaggccatcggccgcgtagatcgcgagcgccgcccagatcagcgcaaagccgagagcgcgggcgagcccgaagtgctcgtgatagaccacgacgccgcagagcagctgnagnntcggcgcgatgtactgcagcacgcccaccgtcgagtaaggaaggcggcgcgccccgtaagcgaacagcaggagcggaatcgccgtcaccagcccgctgccgacgaggagcgcatcgatggcggcgccggaggagcccagcgcgccggtgcccgcgacctgacaccacccgagataggccaccgcgagcggcagcagcagcagcgtctcgctcgcaagtcccgggagcgcctcgacgctgatcaccttgcgcagcagtccgtagagcgagaaggtgagcgcgaggaaacaggcgatccacggcagacgcccggcgagcacggtgagatagccgacggcgatcgcggcgagcgccaccgcgagccactgcgtgcggttcagccgctcgtgcagcaccaccaccccgagcaccacgttcaccagcggattgatgtagtagccgaggctggtctcgacgatgtgctggtgcgtcacgccccagacgtacaccagccagttgcagctgacgaggagcgccgtgagcgtgaggcgcaccaggagcgccgggttggtgagggtcgccgtgagccgtccgagctgcccgcgcagcagcatccacccgaggaggaacaggcacgaccaggcgacgcggtgcgcgatcacctgcgtcgccggcacgccgctcaagggatgcaggtagagcgggaacagtccccagatcgcaaaggccgcgctccccgcngccagcccccgcgtcccggaccgcgggccgntcatgcgggattcncgagcgcgctcgtctcccggatgctccgcacgaagagcccggcgagcgactcgaggccgcgggcgtcggcctcgtcgaagcgcgccgcgcgcggactgtcgagatcgagcaccccgagcagcgacccatcgcgcgcgtcgccggcgatgagcggcaccacgatctccgagcgcgacgccggatcgcaggcgatatggcccgggaactcgagcacgtcgggcacgacgagcgtgcggcgctgcaccgccgccgtgccgcacacgcccgagccgagcgcgatccgcacgcacgccggncggccctgaaagggcccgaccacgagctgcccgcccttgaggaaatagaagccggcccagttcacctccggcagagcctcgaagacgagcgccgcggtgttggcggcgttggcgatcggatcgctctcgcccgcgagcagcgcgccgagctcctgcgcgagacgcgcgtagtccgcgggcttgtcgtgaaantggtagcgnnnnncngngtngctcatgnnnngngcnnnncnnanncnnngncntnnnnannnnnnnnnnnnnnnngatnnncnagnnnncgncgncgnnnannngngnncnnncnnnnnnnnngnnnnnccngnnnnnancnnnnnngnnnnnnnnnagcnnngngnnnnnccgnnnnnnnnnngnnnnnnnnnnnngnncnnngcgnnnnnncnnnnnnnnntcgngcnnnnngngngcncnnngcncngcngcngnnnnnngnnnnnnnnnnnnnnnnnnnnnnncnnngcngncgnngnnnnnnnnnnanngccgnnngnnnnnnnganncnnnngnnnnannnnnnnnagcgccgcnnggnncgnggnnnnncngngnnnnnnngngngngcgcngcnnnnnnngcggggnnncnnnngannannnnnnnggngctnnnnccnngnnnngngnncnncnnngnnnncnnnannnncnngngncnnnnnnnncnnnnngngcnncnnnncgnnnnnnnnannggnnncgnggccnnnnnnnnngnnnnnnnngncgcgntnnnngnnncgnnnncnngcncgcngnggnncgnnnngnnnnagnngnngcnnnnnnnnnnncncnncnnngnnnnngngcnnngnnnnngnnnnacnnncgcnnnnncnnnntnnnngngngnnnncagngnnanncngncgcnnnnncncnnnnnnnnnnnnnannngnnnnnnnnnnnnnnnnnnnncncngcnnnnngcnnnnngnnncnnnnnngnnnnntnnngcnannnnngnnggnnngcagncgcnnnnnnnngtnnnnnggngnngnnnncnnnnngnncgncgnncnccnnngnnnnnnngnngnnnnnnnnntnnncnnnnngcncnccgnngnnnnnannnnnnnngngnnnncnnncnngnnnnnncnnnngncgnnnnagnannnncnnnnnnncgcnnggnnnncngnncncnncncnnnnnncgncngcnnnncgnnngncngncnnncnccnnnnccncncncnnnnnnctnncgngngcnngnngnnnnnnnnncncncncnnncncngnngcngnngnngnnngnncgnngnnncnnnntnnnnncngnngnnnncngcnnnntnnncgngnnnnnnnngnnnnngnnncnnancnngnngcnnntcnnnnncnngnnnnnngcncngcnnnnnnnnnncgncnnnncnnnnnnnnnnnnnnnnnncnncgnngnnnnctcncnnnnncacnnggncnnnnnnnngcnnnnnnngnnngnnnncncnnncnncnngnnnnnngcgngcgnnnnnngcgngaannnnnncnnnnnnngcnnnntnnncgcnnannnnncgnnnnngnangnnnnnnnnnnngcnnngncgcnnnnnnnncgncnngnnnnnnnnnnngnngnnnnnngncgcnnggnnnnnngnnnnnnnnnnnnnngnnnnnnnnnnnnnnnnnnnnnnnanntc

SEQ ID NO: 595 - DNA, 4000 bp, Escherichia coli
  misc_feature (500)..(500): n is a, c, g, or t
  misc_feature (1962)..(1962): n is a, c, g, or t
  misc_feature (1965)..(1966): n is a, c, g, or t
  misc_feature (1968)..(1968): n is a, c, g, or t
  misc_feature (1974)..(1975): n is a, c, g, or t
  misc_feature (1980)..(1980): n is a, c, g, or t
  misc_feature (1983)..(1983): n is a, c, g, or t
  misc_feature (1986)..(1987): n is a, c, g, or t
  misc_feature (1998)..(1998): n is a, c, g, or t
  misc_feature (2004)..(2004): n is a, c, g, or t
gctatactccagacggagatcttgctgttccagcagagagtaagatgtggatcactccatatagtgacctttgggtgactgtacaggcaggtactacatactacgtcaaaagagcggttgctggagaaactgtagaactccagcttggtacttccaaactgaataacacagaaatctatccgatggatgcagctttcctgaaagatcttggtcctcttgcaggtctttatcctggttatattgatgtatccccgtgcccgaagttgacaagggcagatatcggaagtagtgtttctggatatctgaatacaaacctgactgacgttggacttgaaaatgccatgaatcttgagtatgtaaatatcgagaactgtccgaatttcaaaaaagaacttggccttgcgaagaatgtcaatgttaaagaatgttattccagaggaagtggcgtgacaggtgttacgttcgctgaccatggaagactgcagaaagcatatctgaangcagtaacatccatcacagcgaagaatcttctctacgttgcagagtttacgttacagaattatgagagccttctttctttgaatgtggtgaacagtccgtctatcaataccttggatattgcaacaagagcggtgaatatgatccgtgtacgtctgctcgagattgtatggataacaacagtaaaagcatacaccacactgatgcgtctgcagaagatgagcggcattgatgaagctggttataacgcagagaaagcagtggttaccggctctgtattctttgatgctatctctcagaccaaatacgacaccttggtcaatgcacttcctgatgtgaatttcacatacggagaatttttggaagagcacacggtaaccttctgtaactatgatggaacagtgttgaatgttcagaaagtagaacatggaggtacagcagaagacccaattacggtaggatacatcaagactccagtaaaagagccggatgatgatttttcgtacacttatttcaagtgggatgtgccgcttgagaatatcgtagaagacgttacggttactgcaacctacacacagtctatcagaatcaaccttgtacgttatctgaaagatggagaagtccttcagacttataatgtgccagcacatggttcctgtgcatatgttggagaagaccttgtgaaatccggctatgtatggatcggatgggataaggttgcagaagatgtcgtggaagatatggacatcaatgcagtattcatctatccgaagcttccggctacggtaaaggatcttacgaagtatgattatgcatactccgatgaccctgatgacaattcagcctatacttttggagaactgtattccatcttcaagatgggacgtgctgttgactatgggtttggcccaggagtcttattgaaattgattccaagaaaggctcttgcaaacggattgattactgacacaagcatggtattccgctatcatgcaaaagggcattatgctcttgctgatggttccggcatgagtaatggagacttttatatggtcggagtcatgacagcgaacaggaaaatgaacagtacaaatacgaacgtagggggctgggatgcctgtgagcttagaacttggctgaatgacacgttattcccaacgttcgaaccgggatggagaaactttatttctttatcagatacgttggccaatgccggaaatcagtcttccaacattacaacatctaaggattatctgagaattccgtctcatgcagaagtcggttttgatgtggctgctgttccatacaaaaatgaaattgatgcgaacgcagaggaagttacattctcctgttatacggataataattctcgtattaagaagcagttcaatggagagggttcagcacagtactggtggctgcggtctgcggatgcgggcggctctgtcgcctttcgcgcggtcnatnncnatggcnnttctnatnctnntaacgctaacntttctnatggcgtgtgcgtgggcttctcagtataatctgtatatctttataatcaagccggccttgtgccggcgggtaaaaaaagatgttaaaaaatatcgaaatgtgatattattttctccggaggtgccagtgtatgagcgtattatcgagatatagaaatgagtcaaaagtagactttctttatacggcaagacagcttgccgtaagtgtaatcaaatcatgtgtagattccaagaaaggaagatatacggcgacggtctctgaaccagttgcccaatcagcatggaaggtatacgaacatgtgaagagagcaaattctatatatcctacgaatcagcatgaagcacagctccggagagatcagtttcttcttgcgaaagcagaactgtatgttctggattccaaaatcggagtcgctcatgaattttatcatttcagtgatcacgatttagatgaaatgggttcattcattgacaatgaaatgaaattgattgaaaaaatgttagattctgaccggaagagatataagaatcttccactatgaattggttttatcctgtatgattttagtactggtggctgcggtctgcggatgcgggcggctctgtcgcctttcgcgcggtcaataacaatggcaattctaatactaataacgctaacaattctaatggcgtgtgcgtgggatcctgtcctttctacaaagtaatcccatgcgggaggaaataagaaacaggatagaaggaggataagaccttcctactgaaaagtgggtaaatatacgttccgatgggtctgggaggacgctgcttgcatggctggagttgcctgattatctccagtttcattcccagtgaccctatgcagctagtcggaaaatcgggaatcatgctgtacggggcaagtttttaaggagcagttatgacgagcgaggaaagaagagaggctcgttatcaaagaagaaaagctgcaagagatgccaataaggcaaaagataaagagatgcaagactttaagaaaatctttactacagaccatctcttcaaatcttacagaaagtgcataaaaggggttaagtggaaggcaagtactcagaagtacattgacaatgctacccttacattgtaccggacaaagaagagtcttcttaatgggacattcagatcagatggtttctatgaatttgatctgtatgaaagaggaaaacatcgacatatcagcagtgttaccattaaggaaagagttgtccagagatgcctctgtgattatagtctggttccgttgatgagcaaaacgttcatttatgacaatggagccagccttgataagagaggctatcattttgccattcgcagattggtaagacatttgcagtatcattacagaaaacatggacaggaaggatatatcctgctgttcgattttacaaaattcttcgataacgtgtctcataaggttgttgaatggttattacgcaaacaatatcaggataagtggacattgggacttatccttcattttgtgcgctcatttggcaatgttggtatgggtctgggaagccagatcagtcagactctcgccgttgcatctgcaaatcctttggaccattatgtaaaagaaaaacagagaatcaagggctatgcacgttacatggatgatggatatctcattcatcatgacaaagagtatctgcagaaatgtttagatgaaatcgtgaaaatatgccagattctcgacataaaaatcaatatgaggaagactcagattgtaaagctgagccatggatttacatggttgaaatgcagattttatcttctggaatccggaaaggtagtacggaagatctataaacgtagtgtgacgaagatgagacagaaactaaaggctttcaagagactgtatgataataaagaaatgaacttcgaacagttaagaggaagcctgcagagctggctctcttatgcgttgaattttgacgcatgtggcacagcaaagaatactg

SEQ ID NO: 596 - DNA, 4000 bp, Escherichia coli
  misc_feature (1323)..(1323): n is a, c, g, or t
  misc_feature (3412)..(3412): n is a, c, g, or t
  misc_feature (3423)..(3423): n is a, c, g, or t
  misc_feature (3447)..(3447): n is a, c, g, or t
  misc_feature (3483)..(3483): n is a, c, g, or t
  misc_feature (3763)..(3763): n is a, c, g, or t
acccctgagatacaggcgaatagaatggcaatggctacccgtggcgcaaatatgcggtcaacagcaaaacctaccaagagtcggcccagtacaacggcgataccaataacacctgcaattttggccgcggcatttgtggtgaagccgatctctagcagaacgggtacaaagtgaatcatcaatccgccaagccctagagacaggcaaaatatcgccgccatgattgtccagtaggtgcgacttgcctttgcaattttaaagtctctgctagccgcctctgtgtcgatattcaatggtgttttggcgccattgagacgggatagaacggcaacgatgattaatcccactaccagagtgaatgcggccattgcaaagtaagcgcctcgccagccgaaggattcgattgcgttactaatcaaagtcggcccaaatgtggctgccacacctgcacccgacagagcaatgccaagggccaagccccgttgtttattgaatacggtattgatcgcgcgggtataggccaatggtgatgatgcactaccaagtatggcctgcagcattgccagcatgacaaaggtagcaatagactgaacgaacataccgagcaatacataggcgagtgacagccccatcagagaaatcataaccggcattacaaggccgtagcggtcaacaactaagccgataaaaggcaatgctgcagccagagccagggtcgaccccagaatgccaagagaggcttgagcccttgtccaaccaaagtcggcgatccaggcttcaataaatatgccctgggtgtaaaagggcagtgcggagacacccacgccgatccccgcagcgcaaaccaacactaatagccaatgccgagaaaactccccaccgctgttttcattattaaccttgaggctttcttgattactcatttatattaccgccttataattttgtttgagataacaccaattttttcgacttcaagctcgacaatgtcgccatcgtttaaaaagcgcagatgctcaagaccacagcccaaacctacggtacccgagccaatcacttcgccggggtaaagggtctcgctcttgctgatatgggcgatcatgtctgagaacttccagtgaattgtgttgctgttgttgtcgcaccaggtctctccattgacccgagcttgcatgcgcaagttgtaaggattgtcgagctcatctctggtgacgataaccggcccaagaacaattgaatcgtcaaagtctttgcctttggctggccccaacatgccttgagactcgaccatttgagcgtctcgtgctgagaagtcgttatatnttgtgtagccaaatatatggttttcggcgttgtctgtactgatatctttgccctttttaccaataacgcaggccatttctaactcaaaatccattacctcggaatagtctggccagacaatatctttgccagttggtgcgacagaaaaacggttgcctttgtaatagaggggttgttgataccagacgtctggggcagcaaatcgaccactagcacgaaattcttgttcagctttcccggggtcatccgtagccatagcgctcagcttaatggcgctttcaaacgcattctttaaatgctcttcgaaacccaggcagtcacgtatttgagttggtatcggcagtggtgctaaccagtccacttggtcagatggtatggaggctgggccagaggctagtagagcataggcgcgatcaagggctggctgaccagcttctatgaactgttgcatggaggaaaaagcgagatcttccggcgcagcagcactcaggttgacgacgccggtatccgtcaaagcacccagatattcttcgctttgcagtttgaacgtgagtaacttcatttgtctatctcgctatgctttgaggctaggtctgatgagtccgagctgcctcttattagttttatttttagatgtgtgatcttaattgaacggtggtcagtatataaatgaacggtggtcattgcaatgttaaattagttgaagtagcaacagcttagactttgcccacctgactattttttgctggcaatcggcactcacaactatctcatcttaataaagaggttgaaatgaccattggtcagctatatagtaaattgcagatctgctcatggccgagagcttccagccaatcttagccaggcatccaaacagaaaatattatggagatactcatgagttcagtcgttgctattaatcagagagcgagaagcgcagaccaaaaggcgctgcggcgacaagcagtactagagacagctgaaacgtacttccttgaggttgggtatgaggcgttctctatgtctaagctcgccaagaagactgggttagctaagggtacgctgtacctctacttccaaactagggaagaacttttcctgaccctctatgagcaaagcctgattcgatggagtcatgtgttcttcgatggcttatctgattccatgacaagtaaggcgtatgcccaaaaactagttagcactgcctcagcagacggaaccttcttgccactacttatcaggcttgaacatatgatcgaacacaatgttgccatcccccggctcatcagttctaagcaattgttcatcaaacaggtggaggcgattgctgaggcgacgtccatctcactcagtttaagtgaggcgcaagcgatagaggtagtaaaaacaatgggcgttctcctgattggtgcaagccaaggggaccagggtccatcacttgatcacgaagagttgcctgaagatgttcaagatcttatcgctagtttttcgtccgagcccctctttattaagaacgctgttcgcattatagagggcattcgtaccgaagcagtatccaatatttaagcgaagaaaatccctagccaataacaacatagaacgcatgcatattaaccagagaaagaaattatgagcacagctaaaaacaaaaaagtcactcaattagacactcaaaatctggacgcactaatcgaactgcagagaagccagtttcgtgctgagggcgaagtcacctatgcgacaaggattgaccgcctaaagagactcaaggcactgattgttgaaaataaaaaagagtttgcggaaacgaccaagcgcgaatttggtggtgcacggtcctatgagttcagtttgttctcagagtttgcgggaaaggtcgagggtatcgactattcaatgaaacatctgaaagagtggatgaagcccgaaaagcgaaaaaccaataaaccaatgaattttttgggtggtaagagtcaggttaggcatttccccaagggcgttgtcggcattatttctccttggaatctgccctttggtttgactgttgcgcctctgacaagtgcgcttgctgcaggtaaccgagcgttantaaagccttcngaattcgttcctgaaacagcggcnctgttcgccgaagttgtccccaagtatttctcagangatgaagtcgcagtcgtaaccggtggagccgagattagtcaacgttttgcggagctgcctttcgatcaccttctgtttaccgggtctactaatgtcggcgcgaaagtaatgcaatcagcctcgaaaaatctggttcccgtcacattagaacttggcggcaagtcgcctgtcatcattggtcgaagtgcaaagcttgatctggccggaacacgcctcacattcggcaagcttttaaatggtggtcaattatgcctgtcgccagactacgttgttgtgccgnatgagctggaagagcagttgatagcgcgggtagttcaggaggtgcagtcaatgtatcccaacattactgaaaatgaggattatgcgggtgttatcaacgaaagacacttcgccaggttgcagaactacattgatgacgcagtagctaagggggccaaactcacaattgtcggtgctgacaagacgcgtgcgtctaaagacaatcgtcgtatgcccttacatattttgcaaaacgtta

SEQ ID NO: 597 - DNA, 4000 bp, Escherichia coli
  misc_feature (53)..(53): n is a, c, g, or t
  misc_feature (987)..(987): n is a, c, g, or t
  misc_feature (1503)..(1503): n is a, c, g, or t
  misc_feature (1988)..(1988): n is a, c, g, or t
  misc_feature (1992)..(1992): n is a, c, g, or t
gagaactgggatgaattttttgcttcagtcttccctacgatatcatcaggtantacaacaaagatacttttcacctctacaccaaatggtttaaatcatttttataaaacgtgtgaaggtgcaaaagaaggtcgtaatggatacatctttatcgaagtgccttggcaaagagtgccaggtcgtgacgataagtggaaagacgaaactctagcggcgatggataatgactatcagaagttctcgcaagagtttgaatgtcagtttttagggtcatctggtactttgatcgaaggctctaaactaaaatctttagtatggaaagaacctcttgcggaagcagagaatattaaaatacttgaagaacgaaaagatgatcatacgtatgtatgtgtagtagacgtatctagaggaaaaggtctggactattcagcatttcaaataatagatgtgactagtatgccttataaacaagtttgcgtatacagagataacatgatcacaccaatagattatgcggaaataatatatagaactacaaagcaatataatgatgcatatacattaattgagattaatgacataggtgaacaagtatctgagattttacactatgaattcgaagtcgaaactcttatgcacacagaatcagcaggcagagcaggtaaaaggatttcaggtgggtttggtaagtctaccgataaaggtattagaaccacaaaatctgtaaagtcaataggctgtaacatgctaaaaatgctcattgagcaagatcaaattttaattaatgattacgatacgatacgagaactatctacgttttcacgtagaggcaactcttacgaagcggaatcgggtaaccatgatgatctagtcatgtgtttagtattatttgcttggctatcagaccaaactttctttagagagattactgatatcaatacaatgaataaactaaagcaaagaaatgaagatgaaatgttggagagnttactaccagtaggcttcaataacatgcacgaagaggactccgagcttatgggagaaagggatttcagaaactggttcaattactagagatgagttttttataaatataacgacaaagatcaaagatttgaaatctataaatcataatagacaaggagaaatgagatggcttttcaattaagtccaggagttaacgttagcgagatcgatctaacaacagttgtgccagcagtggctacaactgaaggtgctatcgctggcgtatttcgttggggaccaaccgacgaacccgttctaatcggctctgaaattgacctagtaaaccgttttggcaaacctttcgccaacacaacttggtcaaatgcagaaaccttttttacagcggcgaattttttatcatacagtgatgcattgtatgttcagcgtgtacacgaaaatggcgtaaaagcaacaggtacaaacttcgaaggcgcttacgaaggcgcactaggaaatgatatcgaagttgcatggtgngacaacgcaggctatgcgggtactacagtaaacgaaacattgaacattccagcatcaagcacaatcggtactatcactgaaaacgatacaacaccctcacacgggcttacgcttggtcaatcagtaattgtcgcagggcaagaattggtcgtaactggtgttgaagataacgcaaacagtacacatactgttgcgacagttaactttgacagaaagtttgttggaactgcggctcatgccgccgcttccttcgtcagacaatggcaatttgcttcatcgtttgattctgcacccgtagcaggagcaggtggtcgtggatttcacgtaatagttcttgataagggtggatttactggtaaagcaggtgtactagagaagtttgagaacttgggcgataccgctacagacaaaaactttgacggttcaacttcatatatcaatcaagtactagaaaatagctctaactatgtaagagttaagagcgncgcntcatttgcaggtacttcggcagtagaagcatttacaactggcgcagacggttcgagtgaaacagcaatcggtgcaggtccagttggactaggttgggacaagtttaaagcggctgagaacattgatgtgtctctacttcttactggtcacccagatttggttgtacagaactacgtgattgataatatcgcagaaactagaaaagactgtatggcgtttatcacaccagatgtacctaacacagcatcagcacaagatatcgttacagcagtatcaacactatcatcatcgtcttacgcagttgtagacagtggacataagtatcagtacgataagtacaacgatgtatatcgttggattccactaaacggtgatgtagcaggtctatgtgcaagaacagacgatgcacgtgatccttggttctcaccagcaggctatagtcgtggtggaattaagaacgttgttaagttggcattaaacccaactaagacagatcgtgatttattgtacaaaaacggtatcaaccccgttatcacacaagcagggcaaggtacgctactatttggtgataaaacatatttgaaccaaccgagtgcattcgaccgaattaacgtccgccgtttgtttatcgttcttgaaaaagcaatctcaactgcttctaagtctactctattcgaatttaacgatgagtttaccagagcgcagttccgcaatctagttgagcctttcttacgagatgttcaaggtcgtagaggtatctatgacttcagagttgtctgcgatgagactaacaacacttcacaggtgattgacagcaatcagtttgtaggcgatatctatatcaagcctgcacgtgctatcaacttcatccaactcaactttgttgcagttagaactggtgttgaattctcagagatcgttggtcagtaacataaataaaagaaagaggagataacgcacaatggctttcaacattaatgaaatcaagagccagctaaccttcgggggtgctaaagcgtctcttttccaagttcagattactaatccgatcaatggaattgctgaccttaagacaccctttatggtacaagcggcacagctacccgaatcaacgttagggactattgaaatcccttacttcgggcgcaaagtaaaactagcaggtgacagaacattcgctgaatggactgtgactattatgaacgatgaagattttctagttcgcaacgcaatggaaaactggatggcttctatcaatagtcaccagggcaaccaaagacagttgaatactgcacaagcatctgagtataaatctcaggcgcagatcattcagtattctaagactggtgttccactacgtgaatatacatttaatggactattcccaacaactgtagcggcaatcacaatggattggtcaactacagatgacattgaaagatttgatgtgacattccaatatgattggtgggaagtaagcggtggcgcaacaggtaacgctggcacaaacgcttaatccagaatgactaagtaaagagaggggtataatgcctctctcttattaaaggatgaagtatggaattatttggatttgaaataaaacgaaaaaacgaagagaacaagaatttacgttccttcgcagaaccgaacaatgacgatggcgcagtaagcgttacggctactggcggcgctgtaagtagttttatcgatttagagggtactgctaagtccgaagctgagttagtgcagaaataccgtggtatgatgcaacaaccagaagttcaaatggcagttgatgatattgtgaatgagtctattaatatcacatacgacagcaaacctgttgagtgtgtaacagatgacgtagacttaccagataatattaagaaaagaattagagaagagtttgataattgtcttagactattagacttttcaaatcatggatatgatatttttacaaaatggtacgttgatggtagattaaactttcacgtgatgattgatg

SEQ ID NO: 598 - DNA, 4000 bp, Escherichia coli
  misc_feature (2)..(8): n is a, c, g, or t
  misc_feature (10)..(10): n is a, c, g, or t
  misc_feature (12)..(12): n is a, c, g, or t
  misc_feature (15)..(15): n is a, c, g, or t
  misc_feature (19)..(32): n is a, c, g, or t
  misc_feature (34)..(35): n is a, c, g, or t
  misc_feature (38)..(39): n is a, c, g, or t
  misc_feature (41)..(42): n is a, c, g, or t
  misc_feature (44)..(55): n is a, c, g, or t
  misc_feature (57)..(67): n is a, c, g, or t
  misc_feature (69)..(75): n is a, c, g, or t
  misc_feature (78)..(78): n is a, c, g, or t
  misc_feature (81)..(84): n is a, c, g, or t
  misc_feature (87)..(87): n is a, c, g, or t
  misc_feature (89)..(89): n is a, c, g, or t
  misc_feature (92)..(93): n is a, c, g, or t
  misc_feature (96)..(97): n is a, c, g, or t
  misc_feature (99)..(99): n is a, c, g, or t
  misc_feature (101)..(102): n is a, c, g, or t
  misc_feature (104)..(108): n is a, c, g, or t
  misc_feature (110)..(112): n is a, c, g, or t
  misc_feature (114)..(120): n is a, c, g, or t
  misc_feature (122)..(125): n is a, c, g, or t
  misc_feature (127)..(131): n is a, c, g, or t
  misc_feature (133)..(134): n is a, c, g, or t
  misc_feature (136)..(137): n is a, c, g, or t
  misc_feature (139)..(139): n is a, c, g, or t
  misc_feature (142)..(142): n is a, c, g, or t
  misc_feature (144)..(144): n is a, c, g, or t
  misc_feature (146)..(149): n is a, c, g, or t
  misc_feature (151)..(152): n is a, c, g, or t
  misc_feature (154)..(154): n is a, c, g, or t
  misc_feature (156)..(157): n is a, c, g, or t
  misc_feature (159)..(159): n is a, c, g, or t
  misc_feature (161)..(165): n is a, c, g, or t
  misc_feature (167)..(171): n is a, c, g, or t
  misc_feature (173)..(173): n is a, c, g, or t
  misc_feature (175)..(175): n is a, c, g, or t
  misc_feature (177)..(177): n is a, c, g, or t
  misc_feature (179)..(181): n is a, c, g, or t
  misc_feature (183)..(184): n is a, c, g, or t
  misc_feature (187)..(187): n is a, c, g, or t
  misc_feature (189)..(196): n is a, c, g, or t
  misc_feature (198)..(200): n is a, c, g, or t
  misc_feature (202)..(211): n is a, c, g, or t
  misc_feature (214)..(214): n is a, c, g, or t
  misc_feature (216)..(216): n is a, c, g, or t
  misc_feature (218)..(221): n is a, c, g, or t
  misc_feature (223)..(225): n is a, c, g, or t
  misc_feature (227)..(227): n is a, c, g, or t
  misc_feature (229)..(229): n is a, c, g, or t
  misc_feature (232)..(235): n is a, c, g, or t
  misc_feature (237)..(252): n is a, c, g, or t
  misc_feature (254)..(268): n is a, c, g, or t
  misc_feature (270)..(272): n is a, c, g, or t
  misc_feature (275)..(277): n is a, c, g, or t
  misc_feature (279)..(279): n is a, c, g, or t
  misc_feature (281)..(286): n is a, c, g, or t
  misc_feature (289)..(295): n is a, c, g, or t
  misc_feature (297)..(300): n is a, c, g, or t
  misc_feature (302)..(312): n is a, c, g, or t
  misc_feature (314)..(315): n is a, c, g, or t
  misc_feature (317)..(321): n is a, c, g, or t
  misc_feature (323)..(324): n is a, c, g, or t
  misc_feature (326)..(327): n is a, c, g, or t
  misc_feature (331)..(331): n is a, c, g, or t
  misc_feature (333)..(334): n is a, c, g, or t
  misc_feature (339)..(361): n is a, c, g, or t
  misc_feature (363)..(364): n is a, c, g, or t
  misc_feature (367)..(373): n is a, c, g, or t
  misc_feature (376)..(377): n is a, c, g, or t
  misc_feature (379)..(379): n is a, c, g, or t
  misc_feature (381)..(381): n is a, c, g, or t
  misc_feature (384)..(389): n is a, c, g, or t
  misc_feature (391)..(392): n is a, c, g, or t
  misc_feature (394)..(400): n is a, c, g, or t
  misc_feature (403)..(404): n is a, c, g, or t
  misc_feature (406)..(406): n is a, c, g, or t
  misc_feature (408)..(411): n is a, c, g, or t
  misc_feature (413)..(415): n is a, c, g, or t
  misc_feature (417)..(418): n is a, c, g, or t
  misc_feature (420)..(423): n is a, c, g, or t
  misc_feature (425)..(426): n is a, c, g, or t
  misc_feature (428)..(433): n is a, c, g, or t
  misc_feature (435)..(439): n is a, c, g, or t
  misc_feature (441)..(443): n is a, c, g, or t
  misc_feature (445)..(447): n is a, c, g, or t
  misc_feature (449)..(449): n is a, c, g, or t
  misc_feature (451)..(453): n is a, c, g, or t
  misc_feature (455)..(464): n is a, c, g, or t
  misc_feature (466)..(466): n is a, c, g, or t
  misc_feature (468)..(470): n is a, c, g, or t
  misc_feature (472)..(472): n is a, c, g, or t
  misc_feature (475)..(477): n is a, c, g, or t
  misc_feature (479)..(479): n is a, c, g, or t
  misc_feature (482)..(496): n is a, c, g, or t
  misc_feature (498)..(498): n is a, c, g, or t
  misc_feature (500)..(501): n is a, c, g, or t
  misc_feature (503)..(508): n is a, c, g, or t
  misc_feature (510)..(511): n is a, c, g, or t
  misc_feature (513)..(518): n is a, c, g, or t
  misc_feature (520)..(521): n is a, c, g, or t
  misc_feature (525)..(526): n is a, c, g, or t
  misc_feature (528)..(539): n is a, c, g, or t
  misc_feature (543)..(556): n is a, c, g, or t
  misc_feature (560)..(560): n is a, c, g, or t
  misc_feature (563)..(563): n is a, c, g, or t
  misc_feature (565)..(566): n is a, c, g, or t
  misc_feature (570)..(570): n is a, c, g, or t
  misc_feature (574)..(574): n is a, c, g, or t
  misc_feature (576)..(577): n is a, c, g, or t
  misc_feature (579)..(581): n is a, c, g, or t
  misc_feature (584)..(586): n is a, c, g, or t
  misc_feature (588)..(593): n is a, c, g, or t
  misc_feature (596)..(597): n is a, c, g, or t
  misc_feature (599)..(600): n is a, c, g, or t
  misc_feature (602)..(602): n is a, c, g, or t
  misc_feature (604)..(609): n is a, c, g, or t
  misc_feature (611)..(614): n is a, c, g, or t
  misc_feature (616)..(616): n is a, c, g, or t
  misc_feature (618)..(622): n is a, c, g, or t
  misc_feature (624)..(624): n is a, c, g, or t
  misc_feature (626)..(639): n is a, c, g, or t
  misc_feature (642)..(649): n is a, c, g, or t
  misc_feature (651)..(653): n is a, c, g, or t
  misc_feature (655)..(681): n is a, c, g, or t
  misc_feature (683)..(683): n is a, c, g, or t
  misc_feature (685)..(687): n is a, c, g, or t
  misc_feature (689)..(689): n is a, c, g, or t
  misc_feature (691)..(692): n is a, c, g, or t
  misc_feature (694)..(694): n is a, c, g, or t
  misc_feature (697)..(698): n is a, c, g, or t
  misc_feature (700)..(707): n is a, c, g, or t
  misc_feature (709)..(712): n is a, c, g, or t
  misc_feature (714)..(723): n is a, c, g, or t
  misc_feature (725)..(726): n is a, c, g, or t
  misc_feature (728)..(734): n is a, c, g, or t
  misc_feature (737)..(737): n is a, c, g, or t
  misc_feature (739)..(743): n is a, c, g, or t
  misc_feature (745)..(745): n is a, c, g, or t
  misc_feature (747)..(752): n is a, c, g, or t
  misc_feature (755)..(757): n is a, c, g, or t
  misc_feature (759)..(768): n is a, c, g, or t
  misc_feature (770)..(772): n is a, c, g, or t
  misc_feature (774)..(775): n is a, c, g, or t
  misc_feature (777)..(787): n is a, c, g, or t
  misc_feature (790)..(795): n is a, c, g, or t
  misc_feature (797)..(803): n is a, c, g, or t
  misc_feature (805)..(806): n is a, c, g, or t
  misc_feature (808)..(811): n is a, c, g, or t
  misc_feature (814)..(825): n is a, c, g, or t
  misc_feature (827)..(830): n is a, c, g, or t
  misc_feature (832)..(837): n is a, c, g, or t
  misc_feature (840)..(841): n is a, c, g, or t
  misc_feature (843)..(848): n is a, c, g, or t
  misc_feature (851)..(854): n is a, c, g, or t
  misc_feature (856)..(857): n is a, c, g, or t
  misc_feature (859)..(862): n is a, c, g, or t
  misc_feature (864)..(866): n is a, c, g, or t
  misc_feature (868)..(871): n is a, c, g, or t
  misc_feature (875)..(880): n is a, c, g, or t
  misc_feature (882)..(882): n is a, c, g, or t
  misc_feature (884)..(889): n is a, c, g, or t
  misc_feature (891)..(897): n is a, c, g, or t
  misc_feature (900)..(912): n is a, c, g, or t
  misc_feature (914)..(919): n is a, c, g, or t
  misc_feature (921)..(935): n is a, c, g, or t
  misc_feature (937)..(941): n is a, c, g, or t
  misc_feature (943)..(944): n is a, c, g, or t
  misc_feature (947)..(948): n is a, c, g, or t
  misc_feature (950)..(951): n is a, c, g, or t
  misc_feature (953)..(954): n is a, c, g, or t
  misc_feature (956)..(957): n is a, c, g, or t
  misc_feature (960)..(960): n is a, c, g, or t
  misc_feature (962)..(968): n is a, c, g, or t
  misc_feature (970)..(971): n is a, c, g, or t
  misc_feature (973)..(973): n is a, c, g, or t
  misc_feature (975)..(977): n is a, c, g, or t
  misc_feature (979)..(979): n is a, c, g, or t
  misc_feature (983)..(985): n is a, c, g, or t
  misc_feature (987)..(988): n is a, c, g, or t
  misc_feature (990)..(991): n is a, c, g, or t
  misc_feature (993)..(998): n is a, c, g, or t
  misc_feature (1000)..(1002): n is a, c, g, or t
  misc_feature (1004)..(1004): n is a, c, g, or t
  misc_feature (1006)..(1008): n is a, c, g, or t
  misc_feature (1010)..(1012): n is a, c, g, or t
  misc_feature (1014)..(1017): n is a, c, g, or t
  misc_feature (1019)..(1019): n is a, c, g, or t
  misc_feature (1021)..(1021): n is a, c, g, or t
  misc_feature (1024)..(1026): n is a, c, g, or t
  misc_feature (1030)..(1033): n is a, c, g, or t
  misc_feature (1035)..(1038): n is a, c, g, or t
  misc_feature (1041)..(1041): n is a, c, g, or t
  misc_feature (1045)..(1046): n is a, c, g, or t
  misc_feature (1048)..(1052): n is a, c, g, or t
  misc_feature (1054)..(1055): n is a, c, g, or t
  misc_feature (1057)..(1058): n is a, c, g, or t
  misc_feature (1066)..(1067): n is a, c, g, or t
  misc_feature (1071)..(1071): n is a, c, g, or t
  misc_feature (1073)..(1074): n is a, c, g, or t
  misc_feature (1077)..(1077): n is a, c, g, or t
  misc_feature (1079)..(1080): n is a, c, g, or t
  misc_feature (1082)..(1082): n is a, c, g, or t
  misc_feature (1086)..(1087): n is a, c, g, or t
  misc_feature (1089)..(1092): n is a, c, g, or t
  misc_feature (1096)..(1097): n is a, c, g, or t
  misc_feature (1099)..(1101): n is a, c, g, or t
  misc_feature (1103)..(1105): n is a, c, g, or t
  misc_feature (1107)..(1109): n is a, c, g, or t
  misc_feature (1111)..(1113): n is a, c, g, or t
  misc_feature (1115)..(1116): n is a, c, g, or t
  misc_feature (1118)..(1120): n is a, c, g, or t
  misc_feature (1122)..(1122): n is a, c, g, or t
  misc_feature (1124)..(1124): n is a, c, g, or t
  misc_feature (1128)..(1128): n is a, c, g, or t
  misc_feature (1131)..(1134): n is a, c, g, or t
  misc_feature (1136)..(1136): n is a, c, g, or t
  misc_feature (1139)..(1143): n is a, c, g, or t
  misc_feature (1145)..(1152): n is a, c, g, or t
  misc_feature (1154)..(1154): n is a, c, g, or t
  misc_feature (1156)..(1157): n is a, c, g, or t
  misc_feature (1159)..(1164): n is a, c, g, or t
  misc_feature (1166)..(1166): n is a, c, g, or t
  misc_feature (1168)..(1171): n is a, c, g, or t
  misc_feature (1173)..(1181): n is a, c, g, or t
  misc_feature (1183)..(1184): n is a, c, g, or t
  misc_feature (1187)..(1187): n is a, c, g, or t
  misc_feature (1193)..(1194): n is a, c, g, or t
  misc_feature (1196)..(1196): n is a, c, g, or t
  misc_feature (1198)..(1198): n is a, c, g, or t
  misc_feature (1201)..(1201): n is a, c, g, or t
  misc_feature (1203)..(1204): n is a, c, g, or t
  misc_feature (1207)..(1211): n is a, c, g, or t
  misc_feature (1213)..(1213): n is a, c, g, or t
  misc_feature (1216)..(1217): n is a, c, g, or t
  misc_feature (1221)..(1221): n is a, c, g, or t
  misc_feature (1223)..(1223): n is a, c, g, or t
  misc_feature (1225)..(1226): n is a, c, g, or t
  misc_feature (1253)..(1257): n is a, c, g, or t
  misc_feature (1259)..(1262): n is a, c, g, or t
  misc_feature (1264)..(1265): n is a, c, g, or t
  misc_feature (1268)..(1269): n is a, c, g, or t
  misc_feature (1271)..(1271): n is a, c, g, or t
  misc_feature (1273)..(1274): n is a, c, g, or t
  misc_feature (1276)..(1277): n is a, c, g, or t
  misc_feature (1279)..(1279): n is a, c, g, or t
  misc_feature (1281)..(1281): n is a, c, g, or t
  misc_feature (1283)..(1285): n is a, c, g, or t
  misc_feature (1287)..(1287): n is a, c, g, or t
  misc_feature (1289)..(1289): n is a, c, g, or t
  misc_feature (1291)..(1291): n is a, c, g, or t
  misc_feature (1293)..(1296): n is a, c, g, or t
  misc_feature (1299)..(1308): n is a, c, g, or t
  misc_feature (1312)..(1322): n is a, c, g, or t
  misc_feature (1324)..(1324): n is a, c, g, or t
  misc_feature (1326)..(1331): n is a, c, g, or t
  misc_feature (1333)..(1334): n is a, c, g, or t
  misc_feature (1336)..(1337): n is a, c, g, or t
  misc_feature (1339)..(1339): n is a, c, g, or t
  misc_feature (1342)..(1342): n is a, c, g, or t
  misc_feature (1344)..(1345): n is a, c, g, or t
  misc_feature (1356)..(1357): n is a, c, g, or t
  misc_feature (1361)..(1361): n is a, c, g, or t
  misc_feature (1367)..(1380): n is a, c, g, or t
  misc_feature (1387)..(1392): n is a, c, g, or t
  misc_feature (1395)..(1403): n is a, c, g, or t
  misc_feature (1406)..(1441): n is a, c, g, or t
  misc_feature (1443)..(1452): n is a, c, g, or t
  misc_feature (1455)..(1461): n is a, c, g, or t
  misc_feature (1466)..(1468): n is a, c, g, or t
  misc_feature (1473)..(1485): n is a, c, g, or t
  misc_feature (1488)..(1495): n is a, c, g, or t
  misc_feature (1498)..(1499): n is a, c, g, or t
  misc_feature (1504)..(1507): n is a, c, g, or t
  misc_feature (1510)..(1513): n is a, c, g, or t
  misc_feature (1516)..(1517): n is a, c, g, or t
  misc_feature (1522)..(1522): n is a, c, g, or t
  misc_feature (1525)..(1525): n is a, c, g, or t
  misc_feature (1530)..(1530): n is a, c, g, or t
  misc_feature (1533)..(1533): n is a, c, g, or t
  misc_feature (1538)..(1538): n is a, c, g, or t
  misc_feature (1543)..(1544): n is a, c, g, or t
  misc_feature (1549)..(1549): n is a, c, g, or t
  misc_feature (1552)..(1552): n is a, c, g, or t
  misc_feature (1556)..(1557): n is a, c, g, or t
  misc_feature (1560)..(1562): n is a, c, g, or t
  misc_feature (1573)..(1574): n is a, c, g, or t
  misc_feature (1595)..(1595): n is a, c, g, or t
  misc_feature (1599)..(1599): n is a, c, g, or t
  misc_feature (1611)..(1611): n is a, c, g, or t
  misc_feature (1625)..(1626): n is a, c, g, or t
  misc_feature (1628)..(1628): n is a, c, g, or t
  misc_feature (1693)..(1696): n is a, c, g, or t
  misc_feature (1946)..(1947): n is a, c, g, or t
  misc_feature (1991)..(1991): n is a, c, g, or t
  misc_feature (1994)..(1994): n is a, c, g, or t
  misc_feature (2008)..(2009): n is a, c, g, or t
  misc_feature (2025)..(2025): n is a, c, g, or t
cnnnnnnnangnatnagcnnnnnnnnnnnnnnannttnnanntnnnnnnnnnnnngnnnnnnnnnnngnnnnnnngcnctnnnngantnacnncgnngntnnannnnngnnngnnnnnnnannnngnnnnnannannangangnannnnannanannangnnnnngnnnnnanangnannntnncancnnnnnnnnannnannnnnnnnnngtngngnnnnannnanantcnnnngnnnnnnnnnnnnnnnngnnnnnnnnnnnnnnnannnaannngntnnnnnntgnnnnnnncnnnntnnnnnnnnnnncnngnnnnnanncnngccnannccgcnnnnnnnnnnnnnnnnnnnnnnntnncgnnnnnnntcnncncncgnnnnnncnngnnnnnnnccnncncnnnngnnngnncnnnncnncnnnnnnannnnnannncnnncnannngnnnnnnnnnncnannngnagnnngncgnnnnnnnnnnnnnnncnanngnnnnnntnncnnnnnngnncttnntnnnnnnnnnnnnttcnnnnnnnnnnnnnnttcngcncnncgancatntnngnnngcnnnannnnnncgnngnngncnnnnnngnnnngnannnnnancnnnnnnnnnnnnnnaannnnnnnnannncnnnnnnnnnnnnnnnnnnnnnnnnnnntngnnngnannanaanntnnnnnnnncnnnnannnnnnnnnncnngnnnnnnnacncnnnnngnannnnnncgnnntnnnnnnnnnngnnnanncnnnnnnnnnnnacnnnnnngnnnnnnncnngnnnnagnnnnnnnnnnnngnnnncnnnnnnacnnannnnnncgnnnnanngnnnntnnngnnnnatcnnnnnngngnnnnnntnnnnnnngannnnnnnnnnnnngnnnnnncnnnnnnnnnnnnnnncnnnnncnncgnntnncnncnnccncnnnnnnncnncnannncncgcnnncnncnnannnnnncnnncncnnnannntnnnngncncgnnncgcnnnngnnnncgncgcnncnnnnncnncnncgccgccnncgcncnnccncnncncgcnntnnnncccnncnnncnnngnnncnnncnnannncngncgcngannnngnccnnnnncnnnnnnnncncnnannnnnncncnnnncnnnnnnnnncnncgnccgccnncncnccncnnccnnnnncnccnncccncncnncgacgtcgtacgccccgaacgtcgagnnnnncnnnncnncgnntncnncnncncncnnntncncncnnnncgnnnnnnnnnnctcnnnnnnnnnnncncnnnnnncnncnncnccncnnccccccccgcnncccncccccnnnnnnnnnnnnnnccccccnnnnnnggnnnnnnnnnccnnnnnnnnnnnnnnnnnnnnnnnnnnnnnnnnnnnncnnnnnnnnnnggnnnnnnnccccnnnggggnnnnnnnnnnnnnggnnnnnnnnttnnaacgnnnnggnnnnaannaaatnttnaaatnttnaaatntttcnnaaatntgngcgnnttnnngcccctcgcgnngcgtcgcgacggattcgcgtntccncgcgtcgctcgngggcgtcccgcgcnntnacgcgcgcgaatccacgacgacgcgcggcgtcagcgcgcgaaccgcgtcgcgaaatgccgaatcnnnngcgtcactgcgcgacgccgatcgatcgacgacatggcgccgagcgacgcgctgacgcgattgctcggcgaaacgccgctcacgacggacgcgtgggtgcagtgcgattcgtgcgagacgtggcgccgcgtcccgcgcgtcgtcgcggaccggttgggggagcacacggcgtggttttgtcatcagaatttggatcagaaattctcgacgtgcgacgacgcgcaggagctggacgacgacgagatcgatcnnttgatggccgcgcaggcgcgggcggcgacgcgcgcgacgaacgntgnggacgcgaacgatnnggattcgggcgcgcgngcgcgccgaagcgcggtgacgaacgagtggtacaggacgacgcgaaatatattcgcgcaccgagcgccgaggacgccgtcggaggacgacgcgatgatctgcgcgtgcgcgccggagagcggcgcggggtgcgggagcgattgtttgaatcgattggtgctgagcgagtgcgatccggcgcactgtccgtgcgggagcgcgtgcgggaatcagaggatgagtcggggggagagcagagcgacgacggtgcgacgaacggggaaaaagggacacgggttgttcgccgcggagcgcgtcggcgcgggggagttcgtgttggagtactgcggggaggttttgcacgaggaggcgtacaaggaacggaagcggcggtatcaagacgagggaaggagtcattattacttcatgacgctgtcgagcagcgaaacgatcgacgcgacgattcgaggaaacgaggggcggtttttaaatcactcgtgcgcgccgaattgcgagacgcaaaagtggatggttcgcggggagctgtgcatcggaatattcgccacgcgagacatcgaggagggggaggagctgacgatcgattacaagtttgagcgcttcggtgagaaaccgtcgcgatgctactgcatggcgggcgcgtgttgcgggtggatcggcggcgcgaaagccgccgaggcggccaaggcgtacaacgtcgacggcgacgacgacgaggggcacgaggacgatccggagccgataatgcgcgaactcgacgaggcgctcatcgcgcaagaagaagccaagggacgagaacagatggcggacaagtacgcaccgaaaaaggtggccgtcaaggccgaaaacaagtcttggcgaccgcccgaggaggttcgcgaaatcgagcgacagcgcaaggcgacggaacgagacgaaaaccgcgcggcgcgcgcggcgagatcgagcggtggctccaacgtccgtcgcgtcaagattcccgcgggttcgtacgcgcaaaagtggagcgcgatgtccgccggggcgaagaagcggaccgaggtcgatctcaccatggaggagttgcaatccacgactggggggttgcgttcgaaggacgccgtgtcgcactgcgtgcagcttttcaacttgtgctatccagtcgacgccgacggtgtgacgcaaatcaacactcgcgatctcggtttgattctcgaagcgatttcgttgacgaaaaatcccagtctgcagcaagaactcgtcggcggcggcgtcatgtcgtgctttcaaaagtgcatcaacgtcctcggcggtccgactgcgtccgcggcgcacgccgcgcttcagcgcaagattttgaaaatcttgatggatttgatgcttcatttcaaagagtttgtcatcactcgcatcggtgaaacgagaacagcggcggggacgctgatgcaagccatcggcgacttgcgcgtggcgaacgacacgccgttgatgaagctggcgcgagatttcgagtacaagtacatcggcaccggcgtcatgggaccgatgcccgaacgtccgcgcgcgcagcctccgcagcagcagcttcgtcgaaatgactcgggttcggggtcgggcgccggttgggggatgcgatctccatccaccggttctttgaatcgctacgggagttcgcccgcgggatcgatgttcaacggtagcgcgccgccgcgaagcgcgatgtccggcggtcgaggcggctttaacggtagcgcgccgccaagaagcgccatgtccagcggcggtattcgaggcggcggctacggtggtggctacggtgcgccgccgcagcagcaatcgagcctgtcgcaagcgatgcgtccgcaatcgcaagcgtacccgccgcaacagcgcgacggcggttggggacctccgcccgccgccgctccgccgcactcgtcgtacgacgacggtcgagggataaaacgcgcgcgcgacgaaccgcttcgccagcctcaac

SEQ ID NO: 599 - DNA, 4000 bp, Escherichia coli
  misc_feature (27)..(27): n is a, c, g, or t
  misc_feature (30)..(31): n is a, c, g, or t
  misc_feature (42)..(42): n is a, c, g, or t
  misc_feature (73)..(75): n is a, c, g, or t
  misc_feature (78)..(78): n is a, c, g, or t
  misc_feature (93)..(93): n is a, c, g, or t
  misc_feature (96)..(97): n is a, c, g, or t
  misc_feature (100)..(100): n is a, c, g, or t
  misc_feature (103)..(104): n is a, c, g, or t
  misc_feature (106)..(106): n is a, c, g, or t
  misc_feature (111)..(113): n is a, c, g, or t
  misc_feature (116)..(117): n is a, c, g, or t
  misc_feature (122)..(122): n is a, c, g, or t
  misc_feature (126)..(126): n is a, c, g, or t
  misc_feature (128)..(128): n is a, c, g, or t
  misc_feature (130)..(131): n is a, c, g, or t
  misc_feature (134)..(134): n is a, c, g, or t
  misc_feature (141)..(141): n is a, c, g, or t
  misc_feature (145)..(147): n is a, c, g, or t
  misc_feature (150)..(150): n is a, c, g, or t
  misc_feature (153)..(153): n is a, c, g, or t
  misc_feature (155)..(155): n is a, c, g, or t
  misc_feature (157)..(157): n is a, c, g, or t
  misc_feature (160)..(161): n is a, c, g, or t
  misc_feature (163)..(163): n is a, c, g, or t
  misc_feature (167)..(175): n is a, c, g, or t
  misc_feature (177)..(179): n is a, c, g, or t
  misc_feature (181)..(182): n is a, c, g, or t
  misc_feature (188)..(188): n is a, c, g, or t
  misc_feature (193)..(197): n is a, c, g, or t
  misc_feature (199)..(201): n is a, c, g, or t
  misc_feature (203)..(207): n is a, c, g, or t
  misc_feature (211)..(212): n is a, c, g, or t
  misc_feature (214)..(218): n is a, c, g, or t
  misc_feature (222)..(225): n is a, c, g, or t
  misc_feature (229)..(230): n is a, c, g, or t
  misc_feature (235)..(235): n is a, c, g, or t
  misc_feature (237)..(237): n is a, c, g, or t
  misc_feature (239)..(240): n is a, c, g, or t
  misc_feature (242)..(242): n is a, c, g, or t
  misc_feature (244)..(244): n is a, c, g, or t
  misc_feature (248)..(249): n is a, c, g, or t
  misc_feature (251)..(251): n is a, c, g, or t
  misc_feature (253)..(253): n is a, c, g, or t
  misc_feature (255)..(258): n is a, c, g, or t
  misc_feature (260)..(260): n is a, c, g, or t
  misc_feature (263)..(264): n is a, c, g, or t
  misc_feature (266)..(268): n is a, c, g, or t
  misc_feature (271)..(271): n is a, c, g, or t
  misc_feature (273)..(276): n is a, c, g, or t
  misc_feature (278)..(284): n is a, c, g, or t
  misc_feature (287)..(288): n is a, c, g, or t
  misc_feature (293)..(294): n is a, c, g, or t
  misc_feature (297)..(297): n is a, c, g, or t
  misc_feature (301)..(302): n is a, c, g, or t
  misc_feature (306)..(307): n is a, c, g, or t
  misc_feature (309)..(312): n is a, c, g, or t
  misc_feature (315)..(316): n is a, c, g, or t
  misc_feature (318)..(318): n is a, c, g, or t
  misc_feature (321)..(321): n is a, c, g, or t
  misc_feature (332)..(332): n is a, c, g, or t
  misc_feature (342)..(342): n is a, c, g, or t
  misc_feature (344)..(344): n is a, c, g, or t
  misc_feature (444)..(444): n is a, c, g, or t
  misc_feature (494)..(494): n is a, c, g, or t
  misc_feature (513)..(514): n is a, c, g, or t
  misc_feature (1987)..(1987): n is a, c, g, or t
  misc_feature (2058)..(2058): n is a, c, g, or t
  misc_feature (2125)..(2125): n is a, c, g, or t
  misc_feature (2226)..(2226): n is a, c, g, or t
  misc_feature (2741)..(2741): n is a, c, g, or t
  misc_feature (2793)..(2793): n is a, c, g, or t
atcggcggtgatgactggctgacattnctnntcgcaacggcngttggtgttccagcctatcttaacggttatnnngcnttacctttggttggnggnntgnttnngnaaggnnnggnncccgncgcngnannggnttttttnttgnnnggnggngngngtnntnttcnnnnnnnnntnnngnngtgggntttgnnnnnannncnnnnntttnngnnnnntttnnnntttnnttttntngnngngntttnncngngnnnncnttnnannnttntnnnntnnnnnnngcnntttannaanaatnntggnntnnnnaannantcntaatttaattntttgtcatcncnaacgaagagagagatcttaataaaattagtgcttaaaaaataattgatgaagtggatgggtgaacaacttgggttggatgacgtttcgtctttctatacncattcgactataaaaatgaagacttctatgatttagcagaaaacgcagtnggtggaaattgtgaggagnntaatggtcagttagctgttactgcaaagaagcataatcggaatttcagctgcagatggactttccgtttgcagaacaataaatgtttgaggattctatgagcttaacatctgctaaactcaagtatttaaagtttgtttcagtcaagaatgaaataagaaattagtttaattgatcaattaaaatttgttaatttaatttaaattctgattcatccattaaattattttctaacaatttatgtagttcacgaagttttattattaacacaatacatcgaaaattccaattcatgctgaaacaatacaggttaagaagattcgttgtggttgtgtgcctttctcaattcttgcacccaggttaggttcagccctgttttttcagcgagggtctgatcgtccagaatgtcgagcaattgaaccgcgacttgttcgatgccttgttcaatgccttgtttcatgccttgtttcatgcctttttgctctgcggtgcgcagttgatcgaggcggcttccttcctgaagacacatataatcatacacatccatttcttgcttgctccaaccgaacatcaacagtgcttgaaacgcctgttcgatttgcggatctgtgctgagttctgccggaatcaggtcaaaagaagacgcatacttgagaaaataaagccaccgttcaaaccggttttccaactcgtttaagtcttttttgaattttggcagttccacaaaacaaaactcaaaatcggccaagtcttgggtttgagtttcttgattgagaatcaaatgccggctgacgcagttttgattttcaaacatcttaaaatccagaattccgataaaataaactttttctaattgctgatagttgtctcctccatccatttggttgacataagctttggcagtgtaatagagactgcgtttggcaaagtctccctgatcgtttttttgcatttccacaatgaactgttcgcccttttgattcgttgctttgatgtccagaatcgtctctttcaaggcttcaatcttgggaacttgataaggattgacgagtgtgacctccactatcgtctgttcgtcttgaaaatccaaaatcgcattcagaaaagagatcaatacctctttgtgatgttcgtctccaaaaatctttttgaaggccatgtcgtttttcgggtctgcaaatttcatcctgcggctctgtaaaatttagtcattgttgattctgctaaacagtatcacccctctcacaattaaacaagttgttccggcagcgcaaaagtggtcggtgagaaaagcgaagagttctgtgatttaccagaaaacgcagtcggtggaaattgtgaggaggttatttggtcggtcaactgttactgcaaagaataacattctatgctggacgctgtactagcatcaatagttttgtgtatttatttgcttgtaaaattaaagagatgtaattattatagtgaaaatcanaactctatctttcgattttcatgattatttacaaacgcagattaagagaagagctcgagcgggcattgaanagttttcctgtagtggcactgattggtagcagacaagttggcaaaacaacattagcgagggaaattnccaccaaacaaaatgccgtttttctggatttagagcgaccttcagatttagcaaagctggatgaacctgaactttatctaagtgaacaaaaagacaatttngtggtattggacgaaattcaacgcaaacctgaattgttcccacttttgcgcagtttgattgacgaagatcgcagaccagggcgttttctgatattgggctcagcatctccaaaacttttgcgtcaaggttctgaaacattggcgggcagaattaaatttttggagttgtctccgtttgatattacagaaatcattagtgaaaaagaaagtaagcaaaataatataaattacaattcagaaataatttcagtcaaaaaggaagcagatgacttgaatgagctgtggttgcgtggaggttatccggccagttttctcgctgataatcatcaaactagttttgaatggcgcgaagcttttgtggcaacttttttggaaagggatttgccgcaatggggttttcgcgtgaatgcaacacagtcgcgacgtttttggacaatgttagctcatgttcacggtcaactttggaatgccgcaactcttgcgcgaagtttaggcgtcagcactcctacggttangcatcatcttgatttgctgacagatatgcttattgtgcgtcagctaagtccnttacatgccaatgtcagaaaaagactagttaaatcaccaaaagtgtatattagagattccggtctacttcatgtattgttggggatacaagaatatgaatcgctgtggggacatcctgtgcgtggagcttcctttgaaggttatgttttagaacaaattttagctcgaataccgactcatattcaaccttcattttttcgcagtcatagcggagatgaactagatcttgttctccagtttcccaacagtttcgttgctgttgaaataaaacatacagcttctcccaaattgagtgcaggctttcatcgtgcaagaaaggatttaggtattcagaaatcatatgttatttatcctggcacggaaacttttactatgtcagagggtgttcaggctatgccactgatctcttttctaaatatgctagattcgcaaaacatttagacgctctcgaccgacttacatacttccttacttcatacaaatgagtgcatccacggcaaccacaccttttccgcggggacgcacgattaacggattgatgtcacatccggcaagacggtcggcatgacgttccacaaaatcagcgagcttgagaactgcttcaaccagagcttctatatcgccttccggttttccacgccagccttgcagtaaagcatttatccgcaatttttcaatagattgcctgactagtttttcagtaagcggaaacagcaaagcgacggaatcttgcagtaactccgtataaattccacctgcaccaagagtcagggtcgctccaaattgcggatcaacggaaacaccgagaattatttcggcaactccgtcgctgatcatttcctctactaaaaaagattcggtaattccggacattgcagttgcggcttcaacaacttccggcacatttttcaggttcaaagcaactccgccgaattccgttttgtgggacatttcagcagcaactgctttgagtactacaggaaaaccaatttcttccgcagcagcagaaactttttccgcatttgccagacgactctttggaattgaaaatccgtgttgcgccagcatttctttcgactccatttcagtcaatgtgcggacagttaagtcatccggaattgctggcaaaatttccggcagtaaacattcgttccaagctttgctgattttcgcggcatgttggagagcttccagagattccgctagt

SEQ ID NO: 600 - DNA, 4000 bp, Escherichia coli
  misc_feature (27)..(27): n is a, c, g, or t
  misc_feature (39)..(39): n is a, c, g, or t
  misc_feature (132)..(132): n is a, c, g, or t
  misc_feature (143)..(143): n is a, c, g, or t
  misc_feature (171)..(171): n is a, c, g, or t
  misc_feature (238)..(238): n is a, c, g, or t
  misc_feature (260)..(260): n is a, c, g, or t
  misc_feature (281)..(281): n is a, c, g, or t
  misc_feature (366)..(366): n is a, c, g, or t
  misc_feature (414)..(414): n is a, c, g, or t
  misc_feature (498)..(498): n is a, c, g, or t
  misc_feature (2404)..(2404): n is a, c, g, or t
  misc_feature (2446)..(2446): n is a, c, g, or t
  misc_feature (2609)..(2609): n is a, c, g, or t
  misc_feature (2772)..(2772): n is a, c, g, or t
  misc_feature (2876)..(2877): n is a, c, g, or t
  misc_feature (2898)..(2898): n is a, c, g, or t
  misc_feature (2919)..(2919): n is a, c, g, or t
  misc_feature (2933)..(2933): n is a, c, g, or t
  misc_feature (2937)..(2937): n is a, c, g, or t
  misc_feature (2949)..(2949): n is a, c, g, or t
  misc_feature (2961)..(2961): n is a, c, g, or t
  misc_feature (3075)..(3075): n is a, c, g, or t
  misc_feature (3177)..(3177): n is a, c, g, or t
  misc_feature (3180)..(3180): n is a, c, g, or t
  misc_feature (3318)..(3318): n is a, c, g, or t
  misc_feature (3321)..(3321): n is a, c, g, or t
  misc_feature (3324)..(3324): n is a, c, g, or t
  misc_feature (3330)..(3330): n is a, c, g, or t
  misc_feature (3333)..(3333): n is a, c, g, or t
  misc_feature (3336)..(3336): n is a, c, g, or t
  misc_feature (3411)..(3411): n is a, c, g, or t
  misc_feature (3490)..(3490): n is a, c, g, or t
  misc_feature (3492)..(3492): n is a, c, g, or t
  misc_feature (3498)..(3498): n is a, c, g, or t
  misc_feature (3583)..(3583): n is a, c, g, or t
  misc_feature (3592)..(3592): n is a, c, g, or t
  misc_feature (3594)..(3595): n is a, c, g, or t
  misc_feature (3599)..(3599): n is a, c, g, or t
  misc_feature (3601)..(3601): n is a, c, g, or t
  misc_feature (3604)..(3606): n is a, c, g, or t
  misc_feature (3609)..(3610): n is a, c, g, or t
  misc_feature (3612)..(3613): n is a, c, g, or t
  misc_feature (3618)..(3628): n is a, c, g, or t
  misc_feature (3630)..(3630): n is a, c, g, or t
  misc_feature (3632)..(3632): n is a, c, g, or t
  misc_feature (3634)..(3639): n is a, c, g, or t
  misc_feature (3641)..(3643): n is a, c, g, or t
  misc_feature (3645)..(3646): n is a, c, g, or t
  misc_feature (3648)..(3650): n is a, c, g, or t
  misc_feature (3652)..(3652): n is a, c, g, or t
  misc_feature (3654)..(3671): n is a, c, g, or t
  misc_feature (3673)..(3676): n is a, c, g, or t
  misc_feature (3678)..(3690): n is a, c, g, or t
  misc_feature (3692)..(3693): n is a, c, g, or t
  misc_feature (3695)..(3713): n is a, c, g, or t
  misc_feature (3715)..(3715): n is a, c, g, or t
  misc_feature (3717)..(3722): n is a, c, g, or t
  misc_feature (3724)..(3733): n is a, c, g, or t
  misc_feature (3735)..(3743): n is a, c, g, or t
  misc_feature (3745)..(3766): n is a, c, g, or t
  misc_feature (3768)..(3780): n is a, c, g, or t
  misc_feature (3782)..(3784): n is a, c, g, or t
  misc_feature (3786)..(3793): n is a, c, g, or t
  misc_feature (3795)..(3815): n is a, c, g, or t
  misc_feature (3817)..(3829): n is a, c, g, or t
  misc_feature (3831)..(3886): n is a, c, g, or t
  misc_feature (3888)..(3893): n is a, c, g, or t
  misc_feature (3895)..(3897): n is a, c, g, or t
  misc_feature (3899)..(3930): n is a, c, g, or t
  misc_feature (3932)..(3937): n is a, c, g, or t
  misc_feature (3942)..(3944): n is a, c, g, or t
  misc_feature (3946)..(3947): n is a, c, g, or t
  misc_feature (3949)..(3952): n is a, c, g, or t
  misc_feature (3954)..(3954): n is a, c, g, or t
  misc_feature (3956)..(3956): n is a, c, g, or t
  misc_feature (3958)..(3967): n is a, c, g, or t
  misc_feature (3969)..(3977): n is a, c, g, or t
  misc_feature (3979)..(3979): n is a, c, g, or t
  misc_feature (3981)..(3982): n is a, c, g, or t
  misc_feature (3984)..(3984): n is a, c, g, or t
  misc_feature (3987)..(3995): n is a, c, g, or t
acgcgtttgaccacaaattggctttcnggataatctgangccgcaatcgccgctgcaatgatggagacgtgcttagcttcttctgcttctaccggtacaaaagcttctaatttttcccattcagattctgtntgtgcagactncgtcgatgcgtgttccgttgcttcaganttcttcttgccaaataatcgttggagaattcccattccttcactcccttcccaacataatctacatncaattattatacagaaaacatnatcattcctaaactagaaacnggggtttttcctgttcttttggtgttttattataaataggatataaatattatgctcaatttgtcacatcaaactgttcttttantgtttttcgttatgaaaacactatcttttttattaaatattgtttaanatatcgctataagtaaacgaattcattctacctaatgagttcgtggagctccctttcaggttttagcgactgaacggttctccnactaaaaacaatttttttaataaagaaaggaagatatgatggttatcacaatttcagcttacgtaatgatggcaattttcatgtacgttatcatgaagaaaaaaatgtcaccatttacagctttagtattaattccattagtttttgcaattattttagttgctacaggtcaagtccaagacgttaacatcggtacattaattcgccaagggttattcggaaataactcaaaagataaattaacagcgatgaaagggactgctgaaacaggaattatgcttctattcgcaatcctttacttctctacaatgttagacgctggattattcgatccaatcactaacaaaatgattcgcttcgctaaaggcgacccaatgaaagtattgatggctactgctatcgttgctgctgccgtatcattaaacggtgacggaacaacaactacattaatctgctgctcagctttcgtgccaatttacaaaaaattagacatgaaattaatgaacttaggggttcttattatcttacaaaacactatcatgaacttattaccatggggcggacctactgctcgtgcgatgtcagttcttggtgtagaagcagatatcctagcttacttagcaccaggtatgattctttcagttctttacgtaatcttctttgttgctcgctcaatgggtaaaaaagaacgcgctcgtttaggtatccaagaattaactgaagaagaattaaacgaattgactacaatttctgatcctgaagtattagaaaaacgtcgtccacaaaacttcgtaatcaacgctatcttaacaatcgtattaatcggttggttagttgctggttcattcatcaattcaatcgaagtgaaaccagttgtattattcttagttggtacaggtttagccttaatgattaactacccagacttaaaagctcaatctaaacgtattggggacaacgctggggatgctgtacaagtagtattactagtattcggtgccggagtattcatgggattattccaaggaactggaatggcaactgctttaacagatagcatcgttcaaatcatccctaaacaattagcaggattctggtcattaatcattgcattaatctcgatccctggtacattcttcttaacaaacgacggattctactacggagtattaattccattcgctgaagttggacgtcaatacggcttcacagatatgcaaatggcattagcttcattaatgggtcaagcattccacttattaagcccattagtagcgttcatctacttactattacgtctaacaggattagacatgggtgaatggcaaaaagaatcagctaaatacgcagctgttatcttcgtcatcttcgttgtaacaatcgtattaatgggtcatatgccattatacttaccacaaaattaaacaattgaatttgtgaaaaagacttgttcaggcctagcctaacaagtctttttttgtgcattttaccatcttatcgtttatactatttctaatgtttacaataatttccaggaggctactatgtcagcgattatccaagcggtaaagaaaaatttagatattacccaaaacaaacctcttaaaatttcgctctacgaagcatttcgtaaaacgattatcttaggagaaatccctgcaggtacgcgtattaacgagaaagaattctcgactgagttaaacatcagccgtacacccattcgctacgctcttaacgagttaacgaaagagcacctagtagagcacatccctaagattggtgtcatcgtaaaaggaatttccattaaagatgcccatgaaatttacgaaattagaaaatcactcgacacattggcaacaattaatgcgatgaaacttatgacgaaagaagacttcaaagagttgancggcatcctcgaagaatgcgaacgtctcaacaacgaagacanagtcgacgaagtacttgcaaacttcacgactttcaatgatttcatctacgaaaaatgccaaatgacacgtctaaaagaaatcgtatttgaattacgtacatacgtcatttacttccgcgacttatcgattcgttcttcagaacgccgtacaaaagcactcgangaacacaaactcatctatcgcggcatgctcaataacgacgtggaacaaatcacgctgattacacacgagcacttagatcgctcattacaatttattttgaaacaaatggagaaattacacattgattaatcctgagtttttagcaaaagtggctacagacgcncttctacaagaagtcaatctcgcgccaaaacccggcttagtggaccctatttctgtcggcgctcataaggacatgacaaaggaaaccttctatcaaagtatcgnngctctccgtccttatttactngcctacgccgaagcaggaagncgccacaacggcantccnctcgacttattnaacgaacttcgngcccttggaaaacaagccgaaaacgcgatgatgaccgccactaacaatatcaatacccataaaggagccaacttctcctttgccctcgtcttaggggctacagctcatacaaanggcaacattccagaagccttgcactactgccacctaatgacgcgccacctcatcgaagtggactttgccaacctcgaccaaaaagaacacctctcttacggnganaaactctacgtcgaacatggcatcacaggcattcgaggcgaagcagcaacaggctacccaagccttgcaaaagccctcgactattacaacacactagacacgcacacaccacgtcaccgcgacttactccttcttctntanttnatgacnttngtngaagacggaaaccttattcaccgcggcggaatcgatgcgtataaacaagtgcaacaagaagcacaacaattattngaagaagcccaaaccctcacagaagagcagctagcaaaccgactcgaggactacgacaacgtccttatcgagcgtaacntnagcccnggaggcagcgcagacctactctcgctcaccttcttctgtcataaaatacaacaaaacggatgaaccctcatccgttttttctttnccctttttncnncacncnctnnnttnncnnttttnnnnnnnnnnnantncnnnnnntnnntnncnnncncnnnnnnnnnnnnnnnnnnannnncnnnnnnnnnnnnntnntnnnnnnnnnnnnnnnnnnntntnnnnnnannnnnnnnnntnnnnnnnnnannnnnnnnnnnnnnnnnnnnnnannnnnnnnnnnnntnnnannnnnnnntnnnnnnnnnnnnnnnnnnnnntnnnnnnnnnnnnntnnnnnnnnnnnnnnnnnnnnnnnnnnnnnnnnnnnnnnnnnnnnnnnnnnnnnnnntnnnnnnannncnnnnnnnnnnnnnnnnnnnnnnnnnnnnnnnntnnnnnntctcnnncnntnnnnananannnnnnnnnntnnnnnnnnntnanncnttnnnnnnnnnttttt

SEQ ID NO: 601 - DNA, 4000 bp, Escherichia coli
  misc_feature (1990)..(1990): n is a, c, g, or t
  misc_feature (2558)..(2558): n is a, c, g, or t
  misc_feature (2748)..(2748): n is a, c, g, or t
  misc_feature (2967)..(2967): n is a, c, g, or t
  misc_feature (3183)..(3183): n is a, c, g, or t
  misc_feature (3433)..(3433): n is a, c, g, or t
  misc_feature (3915)..(3915): n is a, c, g, or t
  misc_feature (3945)..(3945): n is a, c, g, or t
agtctgaatatgcaactcagctcaaggagaagcagaaactgaagtttatttacggcgttctggagcaccagtttgcaagctattttgatatggctgagcgtcagaccggcatgacgggcgaaaacctgcttcgtctgctggagcgtcgtctcgataacgtcgtgttccgtctcggctttgcttccacccgccgcgacgcacgccagcttgtcaaccacggtcacttcaccgtgaacggcaagaaggtcaacattccgtcttaccttgtgaagccgggcgacgtcattgctgtgcgtgaagctagccgcagcagcgtgaagttctccaagctcaccggcgcagacgcaccgctcgtcaccactcccgagtggatggagcgcaacaaggaagcccttgagggcaagatccttcgcatgccggagcgcagcgacattgaatttgaggtagaagagcatctcatcgttgagttgtactccaagtaatccagtaaaacttaacattattttatgggttttacgaattacgtcaaatgtgtaaaggaggatcgcaaatgattgagatgatacaaagaccgagaatagagaccgaggaattatccaacgataacacttacggccggtttatggtagagccgctggagcgcggcttcggcactacgctgggcaacagcctgcgccgtgtgcttctttccagcctgccgggtgtagccccgaagtcgatcaagatcgacggcgtcgtacacgagttctccaccattccgggtgttaaggaagatgtcaccgaaatcgttctgaacatcaagggtctcattgccaagttgcactgcgaaggcccgaaaaccgtggagatttctgctgaaggcccctgcatcgtaacggcagattccatcaagtgcgacagcgaagtagagatcctgaacccggacctgcacattgcaacgcttggtgaaggcgcaaagctgtacatggagatcgtgctcgatgagggccgcggctatgtttccggtgaacgcaacaagcagaatatgccgcagggcgtgatcggtgaattggcagttgattctatttacacaccggtgttaaaggttaactttaacgtagagcctgcccgtgtaggccagcgcatcgatttcgacaagctgacccttgaggtatggacaaacggagttattaccgcacaagaggcggtgtcgctcgctgccaagatccttacagaccagctgaacctcttcgttgacctttccgaaaagggtaaggcgatggataccatcgtagagaagagcggcagcgatgatgcacaggtgctcaagatgacgattgaagagctggacctttccgtccgttccttcaactgcttaaagcgcgccggcatcaacacggtggaagaccttgtttcaaagtccgaagaagacatgatgaaggtcagaaacctgggccgcaagtcgcttgaagaagtcatctggaagcttgcgcagctcggctacagcctccgcaaggacgatgaataatttaattaccattaccaaacgataggagtgacaatcatgccgggaacaagaaaactcggaagagacactgcacatagactggctatgctgcgcggcctcgttacgttcttcttcgagaacggaaagatcgagacaactgcaacaagagcacaggaagtccgcgctcttgctgaaaagatgatcacaatcgcgaaggaagatacccttgcaaacagaagaaacgtcatggctttcatcaccaaggaaagcgtcacgaacaagctgttcaaggaaatcgctccgaagtatgctgaccgtaacggcggctacacccgcatcacgaagctcgggccgcgccgcggcgacgcagctgagatggcgatcattgagctgatctgatctcaatataatcagtgaaattggctgtcggcttttgccggcagcctttttgcgttttgcggggagcgtaaattcttcattactccgcaaaaggagaagaagggnaaattttcggttataaaatgtgagaattccgatattttgtgtattttctgcggatttccttgtattttggggcactatccgttataataaagcaggtcaacaaagagaagataaggcgtatgtctttagaaaggataggataccatgggttatgtatatgctgccatgtggcttattgcaggactgatcttgattttccgtctgtcgaaagagaataagatattctacgttgcaggcggatttttccttgtgcttggcgtgtggtggcttttggattcgcttttcccggattggaaagtgtttcagggcacaccgggcgccgtattaaaagtgctcacgttcatcgttctcgttgtgctggcaatcgtgttctttattctgaaccgcagaggctggaaagcggaagccgccatgaataaaatgcaggaaaaggacgacgaaaaagataacttttaaccgcaaaatccgtaaatttcttctcgtagaaagaagtggtaaaaatgaaaattgcaccttctatgctcgcaagcgactttacccgcatgggcgagtgcgcaaagtccgtcancgcggccgattggctgcacctcgatattatggacggtcatttcgtgccgaacatcagctttggcccggatgtcgtcaaggcactgcgtccgttaagcgaccttacgtttgacgtgcacctcatgatctcgcacccgaagcagtatatccgccagtttgcggaggccggcgcggagatcatcacgttccangtggagtgcgacgacgacattgatgaaaccatcaccgaaattgaaaagtacggcgtaaagccggcgttgtctttaaagccgggcacgcccgttgagtgcctgtacccgtacctcgaccgcctttatatggtgctcgtcatgacggtggagccgggcttcggcggccagaagttcatggctgatcaaatggaaaagctgcgcgcgctgcgtgcaaagcgnccggagctcatcttagaggtggacggcggcgtgaaccgtgaaaccgcgcccatctgccgcgaaaacggtgcagacgttgccgtggcaggcacagccgtgttccgcgcggagaacatccccgccgagatcgcattgctgcgcggcgaatgattttttgaaataccgcgtgtgtacagacagtgtacggtttgtgaagagttcacattttgttcatanttgcaaattgttttttcacatagccgtcacagaaagccgctataatgcggataactaaagttatcgtttgttttgttaagtcaacactgcgcaaagcacgttctttatgcagtgttgacttaattttttgcccgaaatacggcatggctattgcaaaacggcgaaaactgcggtatgataatttgtgcgcttccgctgccctgcataggggcgcggaaacccaaaacagaggatctaaacggttccggangcggtctccctttttccacaaaaggttcaccgcatgttcaaaaccgtttcgagcgacgcgcagctgcgcgggcgccattggggaggactttgcacgggaatttcccgggtacatatttccgtcccgcagagaaaggatggtcatcaaacatgatcgaggtcaaaaacctcacgaagcgctacggtacaaataccgcgctgaacaatgtcagcttcacggttgaagagggcaccatcgtcggcttcctcgggccgaacggtgcaggtaaatccacaaccatgaatatcatcaccgggtacctttccgccacgagcggttcggtcacggtacagggcaaaaataccctggaaaacccgaacgaagtgaaaaagctcatcggctacctgccggagctgccgccgctttacatggatatgacggtcaaagagtacctcaacttcatgtatgagctgaagggcgtcaagctcgaccgcaagcagcanatcggcgagatctgccgcctgacgaagatngacaacgtctacactcgtctcatcggcaacctgtctaagggctacaagcagcgtg

SEQ ID NO: 602 - DNA, 4000 bp, Escherichia coli
  misc_feature (1289)..(1289): n is a, c, g, or t
  misc_feature (1306)..(1306): n is a, c, g, or t
  misc_feature (1348)..(1348): n is a, c, g, or t
  misc_feature (1360)..(1360): n is a, c, g, or t
  misc_feature (1378)..(1378): n is a, c, g, or t
  misc_feature (1393)..(1393): n is a, c, g, or t
  misc_feature (1396)..(1396): n is a, c, g, or t
  misc_feature (1413)..(1413): n is a, c, g, or t
  misc_feature (1436)..(1436): n is a, c, g, or t
  misc_feature (1504)..(1504): n is a, c, g, or t
  misc_feature (1555)..(1556): n is a, c, g, or t
  misc_feature (1564)..(1564): n is a, c, g, or t
  misc_feature (1567)..(1567): n is a, c, g, or t
  misc_feature (1582)..(1582): n is a, c, g, or t
  misc_feature (1619)..(1619): n is a, c, g, or t
  misc_feature (1622)..(1622): n is a, c, g, or t
  misc_feature (1624)..(1624): n is a, c, g, or t
  misc_feature (1627)..(1627): n is a, c, g, or t
  misc_feature (1642)..(1642): n is a, c, g, or t
  misc_feature (1650)..(1650): n is a, c, g, or t
  misc_feature (1672)..(1672): n is a, c, g, or t
  misc_feature (1674)..(1676): n is a, c, g, or t
  misc_feature (1679)..(1680): n is a, c, g, or t
  misc_feature (1687)..(1687): n is a, c, g, or t
  misc_feature (1753)..(1753): n is a, c, g, or t
  misc_feature (1765)..(1765): n is a, c, g, or t
  misc_feature (1767)..(1768): n is a, c, g, or t
  misc_feature (1772)..(1773): n is a, c, g, or t
  misc_feature (1775)..(1775): n is a, c, g, or t
  misc_feature (1777)..(1777): n is a, c, g, or t
  misc_feature (1779)..(1780): n is a, c, g, or t
  misc_feature (1783)..(1789): n is a, c, g, or t
  misc_feature (1817)..(1817): n is a, c, g, or t
  misc_feature (1819)..(1820): n is a, c, g, or t
  misc_feature (1835)..(1835): n is a, c, g, or t
  misc_feature (1952)..(1953): n is a, c, g, or t
  misc_feature (1958)..(1959): n is a, c, g, or t
  misc_feature (1961)..(1962): n is a, c, g, or t
  misc_feature (1991)..(1992): n is a, c, g, or t
  misc_feature (1997)..(1998): n is a, c, g, or t
  misc_feature (2000)..(2001): n is a, c, g, or t
  misc_feature (2018)..(2018): n is a, c, g, or t
  misc_feature (2025)..(2025): n is a, c, g, or t
  misc_feature (2027)..(2027): n is a, c, g, or t
  misc_feature (3227)..(3227): n is a, c, g, or t
  misc_feature (3275)..(3275): n is a, c, g, or t
  misc_feature (3417)..(3417): n is a, c, g, or t
  misc_feature (3422)..(3422): n is a, c, g, or t
gacggaccataacaccacagctggctatcctgagttctataccgcctgtaacaggctaggaataaaagtagtatcggggatagaaatttataccagattgaataatcaacaaataaatatcttgtggtataatttgcccttggatagtcaagagtttaatgaattgatggaaaacactcaaaggcattggctggcccgtttaaggtggcatcttcttaaattggttgaagctaaagtattagtggccggcagcgaagcagtgcttgatcaatttagtaattatgtgccaaccaatggcttgctagacgctattttaagtttgccaggtaatcgagaaattattgctaaagaattaaacagtccattttttagagaagaagacgccatcgccttgctttttaataataaaaaggtaggcaagttaaggccaagcactattaatttagagaaagttgttaatttaaagaaaaaattaggcggacaattagtattttgtcaccctgctaaggggagggtagtaacagctaagttagtagctcaattaaaatctttaggagtagaaggtctagaggtattatcgccgcaccatagcctgggagctattttttatctccaagatttagctgaaagaaatgatatgattattactgctggctctgattttcatcgttttgaagggggcagccatggcctaactagcgtctatgactattggcaggcagatagttcccatctccgccgtattgaagaaattattggttaacaattttacttgtcccccccccttatatttgttataatatcccataaggttaattattatgttatactattagtagtctatataaatagttaataattcatgattagttattcttcccaatctaatatctctcagcaacaattacctcatcatcctaataaggcctttactttaattgaacttctcgtagttattgccattgttggtatactatctactctttctgttgtggcttttaatagtgctcgttctaaagctcgtgactctcgtcgtttaagtgatatccacaatctctctttagctctagagatgtattataatgattttggtgcctatcccccagctcccacctctactggaataattggtggtctttgtcttagtgatctaggtattacttctacctgtggccttaatacctatattgctaaaatacctgatgatcctaaaaataataaacattatctttactctactgtagttaatcctcaacactatgaactaatctatgaggaagaaaccaatnctgatgattgtccctcnaactgggttaaagtaccaggcaatactttatataatacccgnaccttttgtgtnatgcagtatgaagctaanataaaaggtcaaganaanggcaaccaaacatatantgctagttatgaaccagaatctngacctggtggcaccccctgggttaatattacccaacctaatgctaaaaatgaatgtcaatctattggngctcaccttgtaactgaagatgaatggctaaccatagtccgtaatattganntgcaaccnacnaattggtcttcaggncagataggttctggctatatccctcgaggtaatagtnatngnagngcagctatggatggnactgatcntcttactggtattaaccagcgnannntgnntctttcnaatggcgccattatctgggatatagctggcaatgtctgggaatggactgatgctactatcttaggnagagatcagccnannggtnngncnannccnnnnnnntttggctggtatgaatattctaatcttntnncttatggcgctcttnctcctgaacgtctgttacctttaaatccttcctggaatgcaaaccaaggttatggccgaatctattctagcggcgctcctaataactcgaatacttatgtttttctccgtggcggcnnctggnncnntgggacgtacgctggtgtcctagctttgnntttgnncnntgggacgtctgacacgnattcggncnttgggtttcgctgcgcgcggtagccaggggtcagcggcgcgaatttccgcgccgcttctttaatctaaaatctggatttaaaaatttttaaaaatgagatattatggtagaagaattagtagtttatcaaaaaacttatgattggttgctttggcttaagtccgcggtggagagatttagtcgagcccataaatatagtttaggtcagcagttacaacaggaatcaatgttattgcttcgtaatattatagtggctaattacagaacagataaaagtacaacaattaatgattgtttagtccaacaggaaattattaaagttttagttcgtttgtccaaggattacagtttatttactgggtctcaatatgaatttgctgcaaggcaaatgacagaaattggccgcttgttagttggatggcggcgtaaattttcttagccgttctttttttagaatggaggggtaatagatagatttgtttttctccgtggcggcaactggaacaatgggacgaacgctggtgtcctagctttgaatttgaacaatgggacgtctaacacgaattcgaacattgggtttcgctgcgcgcggtagccagtggtctgagtcagagtaattatcctatagataattagcgaactccaagaccccagtctatttccccagcctactttaaggcaaaataaagctttgaccttctcggcatcgttctcctctatgaaccctgccgagaagggttgagcggttatctatgcatttaaatagccatctttattctcaagtgattgcttgggataatttatatttagcttataaagaagcagctaagggtcggcgttatcggccagagatattgcaatttacagccaatctggaggaaaatttgtatcatcttcaggcctccttggctaaaagtgaatattctttcggaccttaccgccagaaaatgatttatgaaccaaagcagcgccttataagcattgctccttttactgatcgaattgtccatcatgctatttgtcaggtaattgaacctatctttgatcggcgttttatctatgatagttatgcctgccgtcgcggacacggcaataagatggcggtacaacgtttagatagctggttatttcattttcgtccaacctggatcttacaaggagatatctatcattattttgccatgattgaccatgatattntattaactgagataaagcgagttattggtgatcagcagcttcttgatntattgagcctagttattagctcttattgggcggacaatctaaacaaaggccgtggtttacccatcgggaatttgactagtcagttatttgccaatatctatctaaatagatttgaccattttattaaaagagagcttggccnaaaantatatcttcgttatatggatgattttattatattaagtaatgataaacataatttacgccaagtttggttggcagctgctgattttttatctcaaaatttttgtttaactttccatccaaataaaactcatattattaaatcccaaaatggtttaacttttcttggttatcgccatttttttgattatcatcggcctaaaaataagacatatcatagattctctcgtcgttttaagtctttgacccagcagtcattaggagctgttaactattttagttggcatcaattaattttggcttggcgtaattatgctcgtggcgctaattgttatgtaatgactgggcatttgttaaattattttgagtaagtataatttaggtttgatgttatttaaccaaaattttattttgtgctacaataatttaataattcccccgtttattttttaattttttctatgactaatgacaaaaaaattaagaaagacaaagatccagtagaagtaaacagcggagatttgtctgacaaagaaaaagctgctgaagcagctattcatcaaattcgccaaatgtatggc

SEQ ID NO: 603 - DNA, 4000 bp, Escherichia coli
  misc_feature (99)..(99): n is a, c, g, or t
  misc_feature (111)..(111): n is a, c, g, or t
  misc_feature (150)..(150): n is a, c, g, or t
  misc_feature (162)..(163): n is a, c, g, or t
  misc_feature (168)..(171): n is a, c, g, or t
  misc_feature (173)..(173): n is a, c, g, or t
  misc_feature (178)..(179): n is a, c, g, or t
  misc_feature (181)..(181): n is a, c, g, or t
  misc_feature (183)..(183): n is a, c, g, or t
  misc_feature (185)..(185): n is a, c, g, or t
  misc_feature (188)..(191): n is a, c, g, or t
  misc_feature (193)..(195): n is a, c, g, or t
  misc_feature (198)..(201): n is a, c, g, or t
  misc_feature (203)..(203): n is a, c, g, or t
  misc_feature (207)..(207): n is a, c, g, or t
  misc_feature (213)..(216): n is a, c, g, or t
  misc_feature (219)..(220): n is a, c, g, or t
  misc_feature (222)..(223): n is a, c, g, or t
  misc_feature (226)..(226): n is a, c, g, or t
  misc_feature (232)..(233): n is a, c, g, or t
  misc_feature (235)..(235): n is a, c, g, or t
  misc_feature (1989)..(1989): n is a, c, g, or t
  misc_feature (2022)..(2022): n is a, c, g, or t
  misc_feature (2115)..(2115): n is a, c, g, or t
  misc_feature (2117)..(2118): n is a, c, g, or t
  misc_feature (2157)..(2157): n is a, c, g, or t
  misc_feature (2364)..(2364): n is a, c, g, or t
  misc_feature (2454)..(2454): n is a, c, g, or t
  misc_feature (2457)..(2457): n is a, c, g, or t
  misc_feature (2472)..(2472): n is a, c, g, or t
  misc_feature (2483)..(2483): n is a, c, g, or t
  misc_feature (2499)..(2499): n is a, c, g, or t
  misc_feature (2565)..(2565): n is a, c, g, or t
  misc_feature (2577)..(2577): n is a, c, g, or t
  misc_feature (2580)..(2580): n is a, c, g, or t
  misc_feature (2588)..(2588): n is a, c, g, or t
  misc_feature (2592)..(2592): n is a, c, g, or t
  misc_feature (2607)..(2607): n is a, c, g, or t
  misc_feature (2610)..(2610): n is a, c, g, or t
  misc_feature (2616)..(2616): n is a, c, g, or t
  misc_feature (2625)..(2625): n is a, c, g, or t
  misc_feature (2628)..(2628): n is a, c, g, or t
  misc_feature (2655)..(2655): n is a, c, g, or t
  misc_feature (2673)..(2673): n is a, c, g, or t
  misc_feature (2703)..(2703): n is a, c, g, or t
  misc_feature (2934)..(2934): n is a, c, g, or t
  misc_feature (2958)..(2958): n is a, c, g, or t
  misc_feature (2961)..(2961): n is a, c, g, or t
  misc_feature (2964)..(2964): n is a, c, g, or t
  misc_feature (2973)..(2973): n is a, c, g, or t
  misc_feature (3162)..(3162): n is a, c, g, or t
  misc_feature (3165)..(3170): n is a, c, g, or t
  misc_feature (3172)..(3172): n is a, c, g, or t
  misc_feature (3178)..(3181): n is a, c, g, or t
  misc_feature (3183)..(3183): n is a, c, g, or t
  misc_feature (3185)..(3190): n is a, c, g, or t
  misc_feature (3192)..(3195): n is a, c, g, or t
  misc_feature (3197)..(3199): n is a, c, g, or t
  misc_feature (3201)..(3209): n is a, c, g, or t
  misc_feature (3215)..(3215): n is a, c, g, or t
  misc_feature (3217)..(3217): n is a, c, g, or t
  misc_feature (3219)..(3224): n is a, c, g, or t
  misc_feature (3226)..(3228): n is a, c, g, or t
  misc_feature (3230)..(3232): n is a, c, g, or t
  misc_feature (3234)..(3236): n is a, c, g, or t
  misc_feature (3238)..(3239): n is a, c, g, or t
  misc_feature (3242)..(3243): n is a, c, g, or t
  misc_feature (3246)..(3253): n is a, c, g, or t
  misc_feature (3255)..(3258): n is a, c, g, or t
  misc_feature (3260)..(3261): n is a, c, g, or t
  misc_feature (3265)..(3269): n is a, c, g, or t
  misc_feature (3271)..(3271): n is a, c, g, or t
  misc_feature (3273)..(3277): n is a, c, g, or t
  misc_feature (3279)..(3280): n is a, c, g, or t
  misc_feature (3282)..(3284): n is a, c, g, or t
  misc_feature (3286)..(3293): n is a, c, g, or t
  misc_feature (3296)..(3309): n is a, c, g, or t
  misc_feature (3312)..(3314): n is a, c, g, or t
  misc_feature (3316)..(3316): n is a, c, g, or t
  misc_feature (3318)..(3361): n is a, c, g, or t
  misc_feature (3363)..(3364): n is a, c, g, or t
  misc_feature (3366)..(3369): n is a, c, g, or t
  misc_feature (3373)..(3382): n is a, c, g, or t
  misc_feature (3384)..(3385): n is a, c, g, or t
  misc_feature (3387)..(3407): n is a, c, g, or t
  misc_feature (3409)..(3418): n is a, c, g, or t
  misc_feature (3421)..(3422): n is a, c, g, or t
  misc_feature (3424)..(3429): n is a, c, g, or t
  misc_feature (3431)..(3440): n is a, c, g, or t
  misc_feature (3442)..(3442): n is a, c, g, or t
  misc_feature (3446)..(3448): n is a, c, g, or t
  misc_feature (3450)..(3459): n is a, c, g, or t
  misc_feature (3461)..(3464): n is a, c, g, or t
  misc_feature (3466)..(3467): n is a, c, g, or t
  misc_feature (3469)..(3476): n is a, c, g, or t
  misc_feature (3479)..(3480): n is a, c, g, or t
  misc_feature (3482)..(3483): n is a, c, g, or t
  misc_feature (3485)..(3489): n is a, c, g, or t
  misc_feature (3491)..(3498): n is a, c, g, or t
  misc_feature (3501)..(3505): n is a, c, g, or t
  misc_feature (3509)..(3511): n is a, c, g, or t
  misc_feature (3514)..(3515): n is a, c, g, or t
  misc_feature (3517)..(3525): n is a, c, g, or t
  misc_feature (3527)..(3529): n is a, c, g, or t
  misc_feature (3531)..(3537): n is a, c, g, or t
  misc_feature (3539)..(3543): n is a, c, g, or t
  misc_feature (3546)..(3548): n is a, c, g, or t
  misc_feature (3550)..(3551): n is a, c, g, or t
  misc_feature (3553)..(3553): n is a, c, g, or t
  misc_feature (3555)..(3557): n is a, c, g, or t
  misc_feature (3559)..(3567): n is a, c, g, or t
  misc_feature (3572)..(3573): n is a, c, g, or t
  misc_feature (3576)..(3578): n is a, c, g, or t
  misc_feature (3580)..(3580): n is a, c, g, or t
  misc_feature (3582)..(3586): n is a, c, g, or t
  misc_feature (3588)..(3590): n is a, c, g, or t
  misc_feature (3592)..(3593): n is a, c, g, or t
  misc_feature (3595)..(3596): n is a, c, g, or t
  misc_feature (3599)..(3599): n is a, c, g, or t
  misc_feature (3601)..(3605): n is a, c, g, or t
  misc_feature (3607)..(3608): n is a, c, g, or t
  misc_feature (3611)..(3613): n is a, c, g, or t
  misc_feature (3615)..(3617): n is a, c, g, or t
  misc_feature (3619)..(3622): n is a, c, g, or t
  misc_feature (3624)..(3625): n is a, c, g, or t
  misc_feature (3628)..(3633): n is a, c, g, or t
  misc_feature (3636)..(3637): n is a, c, g, or t
  misc_feature (3639)..(3639): n is a, c, g, or t
  misc_feature (3641)..(3641): n is a, c, g, or t
  misc_feature (3643)..(3644): n is a, c, g, or t
  misc_feature (3647)..(3654): n is a, c, g, or t
  misc_feature (3656)..(3656): n is a, c, g, or t
  misc_feature (3658)..(3663): n is a, c, g, or t
  misc_feature (3666)..(3671): n is a, c, g, or t
  misc_feature (3673)..(3677): n is a, c, g, or t
  misc_feature (3679)..(3681): n is a, c, g, or t
  misc_feature (3683)..(3683): n is a, c, g, or t
  misc_feature (3686)..(3687): n is a, c, g, or t
  misc_feature (3689)..(3696): n is a, c, g, or t
  misc_feature (3698)..(3700): n is a, c, g, or t
  misc_feature (3702)..(3702): n is a, c, g, or t
  misc_feature (3704)..(3705): n is a, c, g, or t
  misc_feature (3707)..(3707): n is a, c, g, or t
  misc_feature (3709)..(3712): n is a, c, g, or t
  misc_feature (3714)..(3716): n is a, c, g, or t
  misc_feature (3720)..(3720): n is a, c, g, or t
  misc_feature (3722)..(3725): n is a, c, g, or t
  misc_feature (3727)..(3727): n is a, c, g, or t
  misc_feature (3729)..(3731): n is a, c, g, or t
  misc_feature (3733)..(3739): n is a, c, g, or t
  misc_feature (3745)..(3747): n is a, c, g, or t
  misc_feature (3749)..(3751): n is a, c, g, or t
  misc_feature (3754)..(3754): n is a, c, g, or t
  misc_feature (3756)..(3760): n is a, c, g, or t
  misc_feature (3763)..(3763): n is a, c, g, or t
  misc_feature (3765)..(3765): n is a, c, g, or t
  misc_feature (3768)..(3771): n is a, c, g, or t
  misc_feature (3773)..(3776): n is a, c, g, or t
  misc_feature (3778)..(3779): n is a, c, g, or t
  misc_feature (3781)..(3790): n is a, c, g, or t
  misc_feature (3792)..(3794): n is a, c, g, or t
  misc_feature (3796)..(3800): n is a, c, g, or t
  misc_feature (3802)..(3804): n is a, c, g, or t
  misc_feature (3807)..(3807): n is a, c, g, or t
  misc_feature (3809)..(3810): n is a, c, g, or t
  misc_feature (3812)..(3816): n is a, c, g, or t
  misc_feature (3818)..(3819): n is a, c, g, or t
  misc_feature (3821)..(3823): n is a, c, g, or t
  misc_feature (3825)..(3826): n is a, c, g, or t
  misc_feature (3829)..(3830): n is a, c, g, or t
  misc_feature (3832)..(3832): n is a, c, g, or t
  misc_feature (3839)..(3844): n is a, c, g, or t
  misc_feature (3847)..(3852): n is a, c, g, or t
  misc_feature (3854)..(3856): n is a, c, g, or t
  misc_feature (3858)..(3859): n is a, c, g, or t
  misc_feature (3863)..(3864): n is a, c, g, or t
  misc_feature (3866)..(3866): n is a, c, g, or t
  misc_feature (3868)..(3870): n is a, c, g, or t
  misc_feature (3874)..(3875): n is a, c, g, or t
  misc_feature (3879)..(3879): n is a, c, g, or t
  misc_feature (3881)..(3882): n is a, c, g, or t
  misc_feature (3886)..(3886): n is a, c, g, or t
  misc_feature (3888)..(3888): n is a, c, g, or t
  misc_feature (3890)..(3890): n is a, c, g, or t
  misc_feature (3892)..(3892): n is a, c, g, or t
  misc_feature (3894)..(3896): n is a, c, g, or t
  misc_feature (3898)..(3899): n is a, c, g, or t
  misc_feature (3901)..(3903): n is a, c, g, or t
  misc_feature (3905)..(3906): n is a, c, g, or t
  misc_feature (3908)..(3916): n is a, c, g, or t
  misc_feature (3918)..(3918): n is a, c, g, or t
  misc_feature (3920)..(3922): n is a, c, g, or t
  misc_feature (3925)..(3926): n is a, c, g, or t
  misc_feature (3928)..(3928): n is a, c, g, or t
  misc_feature (3930)..(3932): n is a, c, g, or t
  misc_feature (3934)..(3934): n is a, c, g, or t
  misc_feature (3936)..(3938): n is a, c, g, or t
  misc_feature (3941)..(3942): n is a, c, g, or t
  misc_feature (3945)..(3946): n is a, c, g, or t
  misc_feature (3948)..(3955): n is a, c, g, or t
  misc_feature (3957)..(3957): n is a, c, g, or t
  misc_feature (3960)..(3960): n is a, c, g, or t
  misc_feature (3962)..(3962): n is a, c, g, or t
  misc_feature (3965)..(3965): n is a, c, g, or t
  misc_feature (3967)..(3968): n is a, c, g, or t
  misc_feature (3970)..(3972): n is a, c, g, or t
  misc_feature (3975)..(3975): n is a, c, g, or t
  misc_feature (3977)..(3978): n is a, c, g, or t
  misc_feature (3980)..(3981): n is a, c, g, or t
  misc_feature (3983)..(3984): n is a, c, g, or t
  misc_feature (3987)..(3987): n is a, c, g, or t
  misc_feature (3991)..(3991): n is a, c, g, or t
  misc_feature (3994)..(3995): n is a, c, g, or t
  misc_feature (3997)..(3997): n is a, c, g, or t
  misc_feature (3999)..(4000): n is a, c, g, or t
gaaagtagcgatagcttgagccgtgcgactgtcaccatctctgaaggaaaattccatcaagtgaagaagatgtttctatgcgtgggtgtgaaagtgacntatcttaaacgnattcgctttggagaatttgtgttagacgaggctttggcncccggagaatanngagannnnancgaannanancnccnnnntnnnaannnntntttntaaaannnnaanntnnaanataaanntnacgtaacttatatgttacattttgtttgttcaactataaaaataagctcgcctgcactacgcaagcgagcttttctactatattttactcttcaataccatcatgagaagaataccatgctcctactgccatcaacattagtgcaataaaataagtaacttctggcatctgaccaaagattagaatagacaggaaagctgctatgaatggagaaacagcgtaataagcgctagttcttgccgccccaagaagccgttgagcatgaacataaaaataaatacttagtccataagacacaatgcctaaagccataaccgcaatgacgctccaaagattcatcaatctctcaccaagcactaaaccaattacgatagagccaattccagaaaatattccctttaacaagacaatctctaacggatcacaggaagaaagttttctggtgcaattattttccaatccccagaaaacagcagccaataatacaaataaagaaccataggaaaactctagactcgaaaaatcttcaaaagacaagataacactagaaaaggttacgaaaagaattcccatccataaccgtttactgatacgttctttaaaaactactaacgcaatcagcgcagtcgcaacaatctcaaaattatttaacaaagaggcattcgcagcagttgttgcgcttagccctatcaacatacagattggcgctgctatatctaacaagaccatagcaaccgtatacggcaattccgctttactgagatgaatctcagtgatttcagcttgtctcactcttcttaaaactgcaatcaagctcattccaatacctgcacctaaatataaaaatcctgccattaatgtgggcggcatttcatttaataatacttttgaaaaaggagaactcaccgcatatagtactgcagcaagtatcgccatgattatccccttccgcatctcttgtttcatatactcaccccttgaaatctaataataaatactgtatattttgtacactatcgaacactttgtatcgtaattatatagaattataatttttcaaaacaacagtcattttagtatttctgtaagataacgaacatttttaataaattgtacggaggattcttcctatggatcgacgacaacaaaaatcacgaaaagctatttttgaagcttttagtcttcttttagaaaagaagcgttacagtaaaattactgtgcaagacattatcgataccgctaatgttggacggagcactttttacgcacacttcgagacaaaagacgaattattaaacgctatttgcgaagagatttttgaccatatcttcgaaagtcttcacactgacgattcatgcactttaaaggatcgaaacagcgcattatccagtaaactctctcatctattatggcatctacgagagcaaaaaaataagattagcgcatttctgattgatgaaaacagtgaactctttttaagatactttaagcaacacttaaccattctttttgctgatttttctaacagcgcaaataaatccatccctaaggcgttcgtcactaatcattatgtgacgagttttgcggaaactgtcaaatggtggtcgagtaacggaatgtctcttcctccagaagtggttgttgagtattatatgcaattaattcgttaatcctttcgctatttctttcgacaaataagctcgcctgcactacgcaagcgagcttttctactatataaatgaaattattggatnggtcctaagagaatattcgcccacgcatcatgnaatgactcttggtcacttggttggaacaagccagccaacacgtcgcggtataagcgagataattctgtacggttgaagtatgaacttccgccncnngcacgaacgatttcttccacggctttcttcgatacttcnactgaacggttcttaatagaagataaacgaggcaaccagatgaagctgtattctgtgcttgcttctagcgtgtcgctcaactcgttaatttgtggttgaatgccgtctagcataatcgccgcttccgcaattctccagcgaatgtttttatcgttggcataaggcgcatcattggatacagagtgacgtttcttcactgtctctacnccgatttctagcgcacgtttcccgataccgaagtacgttgccgctagtaaaatttcgaagtacgcgaaaataccgaataccactggatcnaancttggtccaggagcnactttcgttangatttgctcttctgcngcgaagatacctttcaactcaacgctgtttgattgcgtcgcacgcatgcccattgtatcccagtcntcttttacgatnaangtttcttngtcnggtgttaaatacgcnaanactganagtggtgantcncctgtattatcttgcccaaatgaaacnaacttgtcgcaatatttncccattgataagaagactttcttgccgtanaaacgatacgcgccgccctcttccggacgagcctcagaaatcgaaccgaataacacgcggtcgttcgaaggttcagaaatcccaaacgccaacaacttgccttctgcagcatcgcgaaggatttgttctcccttcttgttgccaaaacgaaccatgtgcttgccaaggccgacaataatttggtgcatgttcaccccaagcgcagtccctggagccgccatcgcaagacgngtttgttcttgcgcaatctctttnagnganagaccgaanccgccgtactcttttggcacgaacgccttcaagtatcccgcctcttttaacgctgcatagtcttccgcaggccacgcattctctttgtcataacgcggtgcacgctcatgaatttcttgtaataactcttccgataaaaacataaaaagcctccttaatggttgtacatcgttagtatacgattagggnggnnnnnntngcaaannnnangnnnnnnannnnannnannnnnnnnnatttantntnnnnnntnnntnnntnnntnnttnntannnnnnnntnnnntnnttcnnnnntnannnnntnntnnntnnnnnnnnttnnnnnnnnnnnnnnatnnntnannnnnnnnnnnnnnnnnnnnnnnnnnnnnnnnnnnnnnnnnnnntnnannnntaannnnnnnnnntnntnnnnnnnnnnnnnnnnnnnnnannnnnnnnnnaannannnnnnannnnnnnnnntntaannntnnnnnnnnnntnnnntnncnnnnnnnnttnnanntnnnnntnnnnnnnnttnnnnncttnnnaanntnnnnnnnnncnnntnnnnnnntnnnnnttnnnanntntnnntnnnnnnnnntcttnnttnnntnannnnntnnnanngnntcnannnnntnnagnnntnnnannnnannaannnnnnttnncnantnnttnnnnnnnntntnnnnnnttnnnnnnannnnntnnntnttnnannnnnnnnannntnanntncnnnnannnaatntnnnntntnnnannnnnnnatttcnnntnnnaanannnnnacntnttnnnntnnnntnntnnnnnnnnnntnnntnnnnntnnnatntnntnnnnnanntnnntnnacnntncaaatannnnnngtnnnnnntnnncnngaannanannnaatnntttncnntaantnancntnnntnntnnntnntnnnnnnnnntnannnatnntntnnncncnnntannttnntnnnnnnnnantanancananntnnntgnannannannaanttcnttnntnann

SEQ ID NO: 604 - DNA, 4000 bp, Escherichia coli
  misc_feature (111)..(111): n is a, c, g, or t
  misc_feature (1988)..(1988): n is a, c, g, or t
  misc_feature (2790)..(2790): n is a, c, g, or t
  misc_feature (3329)..(3329): n is a, c, g, or t
ggggctttgctggctactgcattcaagccgccaaactcaacgaccccagccaaccgaatgcgcccatccatgggtgttacaacaaatttaccagatgctaccataatgggngcttttggcatgatagatggattgactaactcaatgtgatatccacgttcactttcgaatggaatagataaaccaagtttctttgcaatatcaccagaccacggccctaaagtaaaaataacatgatctgcaaaaacatcttcaccatccgtttttaaaccaattagactttttcctttttcaattaagtctgtgacattcgacttaataaaaattccaccattgtcttcaaaatgctgtgctaatttctttatataagcgcctggatcacttattttgccatgatttttgttagcaactattacctcaaatttatttttgtaaatattatcaagtgattcaaattcattcttattaagaacttcaaacgaaattccgttttgtttacgcacgtcccaagcaaaggcgtctgcatcaaaagcagctttagtttcgtaaccaaaataataatcatcatttgaaatatacttttctgcgcctgtgccttttgctaatgcacgatgctgttcaactgagtcataaagtaattttgacattaccttggcataaagctttacatgatttgaatttgcataggacagatactttgtcaaaaaagggaaagcttttggtaaatatttccatcttacaaaaagtggagcatttggtgccaaaagcatttttggaattttagccaataaaccaggagttgtaattggaataatagatcctgctgctaagacaccggcattaccatatgatgttccagaagcaggcccttcgcggtcaattaaaacaacttcatgccctgcccgttgcaaccatatagcacttgaaactccatttatacctgcacctgcaacaataaccctagccattaattttctttcaaattagtagcttatatttttgcttaaagttgccaataatacaacattcgattacaaatttctttgtttataataagtgtctttatgcacaatcaagccatctttgaatgttaagatatcaacacttaaatatccttcactgctaccatctttatgttttgcagttcggcggtattcacaataagccttgttacccacaataccacatgccaaagtttcccaatgtacattttcaactttttcaaataaacctgaaaaaacagtacgtatcacatctgctccttcaaatctaacaccgtgttcatctgcaccaacagcatgatcaaatattgcattaggagcaaaatattgcattaccgcatcaatatcatttgcattaaatgcatttccaactgcatcaaccaatttccgtgttagctctgtcatttatctatcctttccacaccaatcatggcacatacctttttaaaaaatgtactttcttgatcagcaagcacatttaattcgtcaaaatgatcaacatctggaacaacatacatatctatcattctttgctgagttctaaaactgttaacatacatttctgattggcggtgaaactcatctgtttcagcaccacccacaacaactaactgaggtgcattagtcagtggaggatgatttgtcatcggactttcaaggttagcttctttagcatccatttgtaggtttgcgttaagagccaaagttaaacgaactggctccaaataactaagtggtgagacaggaatgccagctttgataatatctaatggaaatgctgagtcccgagccggccagtcagttgccatcatcatttgtgtcaaatgacctcctgcagaatggcccataacacatatcttatcacgatttataccaagtatttttccattattccaaataaagctcactgcttctcgaagctcttccgatatccgggtcatacttacatttgggcaaagatcatatcctactatgattacattgacnccagcttcgacaaatggtgatgccaaaaaactgtaaatcgacttatcgccacgctgccaataaccaccatggatccaaattaaagtcggtgccttcttgtcaccacatagaaatacgtccagtttttggttatcgccatctgcataacgcacatctaaagtgcaattcaaattttctcgagctttcttgctatcttttatccagtttgggataacagtttcttcataatcaggtcgcccagcacgtaaattgtattgagcatcaaaccaactggacgtattcccttcatgagcttttagataatttgtcatattttaccctcagaagccgaagctttttcaagtgcggcccattgttcaggattttctccaaaatgcctcattacatgttttcggtaagcaggtctttctgacaatctttgataccaagcctcaacattaggaagttttggtcgtttaacatttatattgaaataccgataagcaacacatcccagcgggatatcacccattgtgaactcattgccacaaacataagtctgatttgacaaatgtttatcaagaataattaacgcttcatgtgcttcatctcttaattttgaaatctttgcttcatctcgctctgctggtttggttcgcacagttgcgaagaacaaatatataacaggaccaaatgccttacttgccgaccattccatccattgatctgcaattgcttttgattgaggatcagatggtagtagtgtcccttttccatactcttcagataaatatcgaataatagataggctttcccatagagnaaattcaccatcttgaatggctggaatcatacgattagggttaatttctgcatattgatctgtgtctaacttgccaaaactcccacctgccagcattaagtcatatttcagccccaattcatttactgtccaaataactggtatgacatttgaagaatatggccgcccccatactttaagcattaatcacctcccgtttttgagctagagactgagttccaaagcgtggcaccactttttcaaataaacggttccaactagcaagaattttttcataaggcacaccagtatattgctgcataagcattaaatgatctaaaccaatagtttcttgcttttcagaaaatctatctgcaacatattctgcatctcccaccacaataattccccgcttattcaaaaaatcaaaccagtccattgcatcatctacaggtgtcatttcctcaccaatgtctaaatagcctcgttttgtccattcgcctgcaggtcgagatccaccaagaaattcatagtatgcattaatagcaggccgaatagtntcaatggcttcttgcattgtttcaccaacataaaatgcagtacatacacccacaccttcacctaattcgacttctctatttgagctcttggaaagtgcagcacgataagtttcccagcaagccagagtagccttaggccctgcagacatagagataacaccccaacctttttcaccggcaagtttaaatgttggtggtgcattagacataagccacactggaggatgtttttctgtgtaaggacgtggatgaatatacatagctttatattctccactttcatcgtgatatttaggatctaaaggttcgaaaaatcggtttttttcttgccaacctggcacggggaattcccagaattcacccttatgagtaaaaacttcattagtccaagcctttaaaataatctctaaattttcttggtaaagccgcataactttattattatctctgcgatcagcatcacgattaaattgtatagtagaacgttcatttatacctttagcaacgccaaaatctactctccctaatgtcatattatccaacattgcaacatcttcagccacacggataggatgccaatctggcaaaactattggcgctgtccctactcgtaacttttgacaatgagctgcaatatgagttgccatttgtattggatttggcggtgcatt

SEQ ID NO: 605 - DNA, 4000 bp, Escherichia coli
  misc_feature (1626)..(1626): n is a, c, g, or t
  misc_feature (2987)..(2987): n is a, c, g, or t
  misc_feature (2992)..(2992): n is a, c, g, or t
  misc_feature (2994)..(2999): n is a, c, g, or t
  misc_feature (3002)..(3004): n is a, c, g, or t
  misc_feature (3007)..(3007): n is a, c, g, or t
  misc_feature (3009)..(3011): n is a, c, g, or t
  misc_feature (3014)..(3016): n is a, c, g, or t
  misc_feature (3020)..(3020): n is a, c, g, or t
  misc_feature (3025)..(3027): n is a, c, g, or t
  misc_feature (3031)..(3032): n is a, c, g, or t
  misc_feature (3038)..(3039): n is a, c, g, or t
  misc_feature (3041)..(3043): n is a, c, g, or t
  misc_feature (3046)..(3047): n is a, c, g, or t
  misc_feature (3055)..(3055): n is a, c, g, or t
  misc_feature (3057)..(3060): n is a, c, g, or t
  misc_feature (3067)..(3067): n is a, c, g, or t
  misc_feature (3069)..(3072): n is a, c, g, or t
  misc_feature (3074)..(3077): n is a, c, g, or t
  misc_feature (3079)..(3079): n is a, c, g, or t
  misc_feature (3081)..(3082): n is a, c, g, or t
  misc_feature (3086)..(3088): n is a, c, g, or t
  misc_feature (3090)..(3090): n is a, c, g, or t
  misc_feature (3096)..(3098): n is a, c, g, or t
  misc_feature (3100)..(3103): n is a, c, g, or t
  misc_feature (3106)..(3108): n is a, c, g, or t
  misc_feature (3113)..(3114): n is a, c, g, or t
  misc_feature (3123)..(3123): n is a, c, g, or t
  misc_feature (3128)..(3129): n is a, c, g, or t
  misc_feature (3133)..(3133): n is a, c, g, or t
  misc_feature (3139)..(3139): n is a, c, g, or t
  misc_feature (3141)..(3141): n is a, c, g, or t
  misc_feature (3143)..(3143): n is a, c, g, or t
  misc_feature (3145)..(3146): n is a, c, g, or t
  misc_feature (3148)..(3148): n is a, c, g, or t
  misc_feature (3150)..(3152): n is a, c, g, or t
  misc_feature (3154)..(3154): n is a, c, g, or t
  misc_feature (3157)..(3157): n is a, c, g, or t
  misc_feature (3159)..(3160): n is a, c, g, or t
  misc_feature (3163)..(3163): n is a, c, g, or t
  misc_feature (3166)..(3166): n is a, c, g, or t
  misc_feature (3169)..(3171): n is a, c, g, or t
  misc_feature (3173)..(3173): n is a, c, g, or t
  misc_feature (3175)..(3178): n is a, c, g, or t
  misc_feature (3183)..(3184): n is a, c, g, or t
  misc_feature (3187)..(3188): n is a, c, g, or t
  misc_feature (3190)..(3191): n is a, c, g, or t
  misc_feature (3193)..(3193): n is a, c, g, or t
  misc_feature (3195)..(3197): n is a, c, g, or t
  misc_feature (3201)..(3202): n is a, c, g, or t
  misc_feature (3205)..(3206): n is a, c, g, or t
  misc_feature (3208)..(3209): n is a, c, g, or t
  misc_feature (3211)..(3214): n is a, c, g, or t
  misc_feature (3218)..(3218): n is a, c, g, or t
  misc_feature (3220)..(3221): n is a, c, g, or t
  misc_feature (3223)..(3228): n is a, c, g, or t
  misc_feature (3230)..(3230): n is a, c, g, or t
  misc_feature (3232)..(3234): n is a, c, g, or t
  misc_feature (3236)..(3236): n is a, c, g, or t
  misc_feature (3241)..(3242): n is a, c, g, or t
  misc_feature (3244)..(3245): n is a, c, g, or t
  misc_feature (3247)..(3248): n is a, c, g, or t
  misc_feature (3252)..(3252): n is a, c, g, or t
  misc_feature (3255)..(3256): n is a, c, g, or t
  misc_feature (3261)..(3262): n is a, c, g, or t
  misc_feature (3264)..(3266): n is a, c, g, or t
  misc_feature (3269)..(3271): n is a, c, g, or t
  misc_feature (3273)..(3278): n is a, c, g, or t
  misc_feature (3280)..(3280): n is a, c, g, or t
  misc_feature (3282)..(3282): n is a, c, g, or t
  misc_feature (3284)..(3284): n is a, c, g, or t
  misc_feature (3286)..(3286): n is a, c, g, or t
  misc_feature (3292)..(3297): n is a, c, g, or t
  misc_feature (3300)..(3301): n is a, c, g, or t
  misc_feature (3307)..(3307): n is a, c, g, or t
  misc_feature (3311)..(3313): n is a, c, g, or t
  misc_feature (3315)..(3316): n is a, c, g, or t
  misc_feature (3319)..(3319): n is a, c, g, or t
  misc_feature (3325)..(3328): n is a, c, g, or t
  misc_feature (3330)..(3332): n is a, c, g, or t
  misc_feature (3334)..(3336): n is a, c, g, or t
  misc_feature (3338)..(3338): n is a, c, g, or t
  misc_feature (3341)..(3341): n is a, c, g, or t
  misc_feature (3344)..(3344): n is a, c, g, or t
  misc_feature (3346)..(3346): n is a, c, g, or t
  misc_feature (3348)..(3351): n is a, c, g, or t
  misc_feature (3358)..(3358): n is a, c, g, or t
  misc_feature (3360)..(3360): n is a, c, g, or t
  misc_feature (3362)..(3362): n is a, c, g, or t
  misc_feature (3365)..(3365): n is a, c, g, or t
  misc_feature (3367)..(3368): n is a, c, g, or t
  misc_feature (3370)..(3370): n is a, c, g, or t
  misc_feature (3377)..(3377): n is a, c, g, or t
  misc_feature (3388)..(3388): n is a, c, g, or t
  misc_feature (3395)..(3395): n is a, c, g, or t
  misc_feature (3397)..(3397): n is a, c, g, or t
  misc_feature (3399)..(3399): n is a, c, g, or t
  misc_feature (3402)..(3402): n is a, c, g, or t
  misc_feature (3405)..(3407): n is a, c, g, or t
  misc_feature (3409)..(3409): n is a, c, g, or t
  misc_feature (3411)..(3411): n is a, c, g, or t
  misc_feature (3413)..(3413): n is a, c, g, or t
  misc_feature (3415)..(3416): n is a, c, g, or t
  misc_feature (3419)..(3420): n is a, c, g, or t
  misc_feature (3422)..(3424): n is a, c, g, or t
  misc_feature (3427)..(3427): n is a, c, g, or t
  misc_feature (3431)..(3432): n is a, c, g, or t
  misc_feature (3434)..(3434): n is a, c, g, or t
  misc_feature (3436)..(3436): n is a, c, g, or t
  misc_feature (3438)..(3444): n is a, c, g, or t
  misc_feature (3446)..(3449): n is a, c, g, or t
  misc_feature (3451)..(3451): n is a, c, g, or t
  misc_feature (3453)..(3456): n is a, c, g, or t
  misc_feature (3458)..(3459): n is a, c, g, or t
  misc_feature (3464)..(3464): n is a, c, g, or t
  misc_feature (3468)..(3468): n is a, c, g, or t
  misc_feature (3470)..(3475): n is a, c, g, or t
  misc_feature (3479)..(3480): n is a, c, g, or t
  misc_feature (3482)..(3482): n is a, c, g, or t
  misc_feature (3484)..(3484): n is a, c, g, or t
  misc_feature (3488)..(3490): n is a, c, g, or t
  misc_feature (3492)..(3492): n is a, c, g, or t
  misc_feature (3494)..(3496): n is a, c, g, or t
  misc_feature (3498)..(3502): n is a, c, g, or t
  misc_feature (3505)..(3506): n is a, c, g, or t
  misc_feature (3510)..(3513): n is a, c, g, or t
  misc_feature (3517)..(3518): n is a, c, g, or t
  misc_feature (3523)..(3523): n is a, c, g, or t
  misc_feature (3528)..(3533): n is a, c, g, or t
  misc_feature (3535)..(3535): n is a, c, g, or t
  misc_feature (3538)..(3538): n is a, c, g, or t
  misc_feature (3540)..(3540): n is a, c, g, or t
  misc_feature (3544)..(3546): n is a, c, g, or t
  misc_feature (3550)..(3552): n is a, c, g, or t
  misc_feature (3554)..(3555): n is a, c, g, or t
  misc_feature (3557)..(3559): n is a, c, g, or t
  misc_feature (3566)..(3568): n is a, c, g, or t
  misc_feature (3570)..(3570): n is a, c, g, or t
  misc_feature (3573)..(3573): n is a, c, g, or t
  misc_feature (3575)..(3576): n is a, c, g, or t
  misc_feature (3579)..(3581): n is a, c, g, or t
  misc_feature (3590)..(3590): n is a, c, g, or t
  misc_feature (3592)..(3592): n is a, c, g, or t
  misc_feature (3594)..(3595): n is a, c, g, or t
  misc_feature (3597)..(3597): n is a, c, g, or t
  misc_feature (3599)..(3600): n is a, c, g, or t
  misc_feature (3602)..(3602): n is a, c, g, or t
  misc_feature (3605)..(3607): n is a, c, g, or t
  misc_feature (3611)..(3613): n is a, c, g, or t
  misc_feature (3615)..(3615): n is a, c, g, or t
  misc_feature (3617)..(3619): n is a, c, g, or t
  misc_feature (3621)..(3621): n is a, c, g, or t
  misc_feature (3623)..(3625): n is a, c, g, or t
  misc_feature (3627)..(3627): n is a, c, g, or t
  misc_feature (3629)..(3632): n is a, c, g, or t
  misc_feature (3636)..(3637): n is a, c, g, or t
  misc_feature (3639)..(3639): n is a, c, g, or t
  misc_feature (3643)..(3643): n is a, c, g, or t
  misc_feature (3646)..(3646): n is a, c, g, or t
  misc_feature (3648)..(3648): n is a, c, g, or t
  misc_feature (3650)..(3652): n is a, c, g, or t
  misc_feature (3655)..(3656): n is a, c, g, or t
  misc_feature (3658)..(3659): n is a, c, g, or t
  misc_feature (3661)..(3662): n is a, c, g, or t
  misc_feature (3664)..(3664): n is a, c, g, or t
  misc_feature (3668)..(3668): n is a, c, g, or t
  misc_feature (3671)..(3671): n is a, c, g, or t
  misc_feature (3673)..(3675): n is a, c, g, or t
  misc_feature (3682)..(3682): n is a, c, g, or t
  misc_feature (3685)..(3686): n is a, c, g, or t
  misc_feature (3688)..(3688): n is a, c, g, or t
  misc_feature (3691)..(3693): n is a, c, g, or t
  misc_feature (3696)..(3696): n is a, c, g, or t
  misc_feature (3699)..(3699): n is a, c, g, or t
  misc_feature (3701)..(3702): n is a, c, g, or t
  misc_feature (3704)..(3708): n is a, c, g, or t
  misc_feature (3710)..(3710): n is a, c, g, or t
  misc_feature (3715)..(3717): n is a, c, g, or t
  misc_feature (3719)..(3720): n is a, c, g, or t
  misc_feature (3723)..(3723): n is a, c, g, or t
  misc_feature (3725)..(3725): n is a, c, g, or t
  misc_feature (3728)..(3728): n is a, c, g, or t
  misc_feature (3732)..(3735): n is a, c, g, or t
  misc_feature (3738)..(3739): n is a, c, g, or t
  misc_feature (3741)..(3741): n is a, c, g, or t
  misc_feature (3743)..(3743): n is a, c, g, or t
  misc_feature (3746)..(3746): n is a, c, g, or t
  misc_feature (3752)..(3756): n is a, c, g, or t
  misc_feature (3758)..(3760): n is a, c, g, or t
  misc_feature (3766)..(3767): n is a, c, g, or t
  misc_feature (3772)..(3772): n is a, c, g, or t
  misc_feature (3775)..(3775): n is a, c, g, or t
  misc_feature (3777)..(3777): n is a, c, g, or t
  misc_feature (3780)..(3780): n is a, c, g, or t
  misc_feature (3783)..(3783): n is a, c, g, or t
  misc_feature (3785)..(3785): n is a, c, g, or t
  misc_feature (3788)..(3790): n is a, c, g, or t
  misc_feature (3795)..(3795): n is a, c, g, or t
  misc_feature (3801)..(3802): n is a, c, g, or t
  misc_feature (3804)..(3804): n is a, c, g, or t
  misc_feature (3806)..(3808): n is a, c, g, or t
  misc_feature (3810)..(3810): n is a, c, g, or t
  misc_feature (3812)..(3813): n is a, c, g, or t
  misc_feature (3817)..(3817): n is a, c, g, or t
  misc_feature (3819)..(3822): n is a, c, g, or t
  misc_feature (3824)..(3826): n is a, c, g, or t
  misc_feature (3828)..(3829): n is a, c, g, or t
  misc_feature (3831)..(3835): n is a, c, g, or t
  misc_feature (3838)..(3841): n is a, c, g, or t
  misc_feature (3845)..(3845): n is a, c, g, or t
  misc_feature (3847)..(3849): n is a, c, g, or t
  misc_feature (3852)..(3852): n is a, c, g, or t
  misc_feature (3855)..(3855): n is a, c, g, or t
  misc_feature (3859)..(3862): n is a, c, g, or t
  misc_feature (3864)..(3866): n is a, c, g, or t
  misc_feature (3868)..(3871): n is a, c, g, or t
  misc_feature (3873)..(3876): n is a, c, g, or t
  misc_feature (3879)..(3880): n is a, c, g, or t
  misc_feature (3883)..(3884): n is a, c, g, or t
  misc_feature (3887)..(3887): n is a, c, g, or t
  misc_feature (3889)..(3889): n is a, c, g, or t
  misc_feature (3891)..(3891): n is a, c, g, or t
  misc_feature (3893)..(3893): n is a, c, g, or t
  misc_feature (3896)..(3897): n is a, c, g, or t
  misc_feature (3904)..(3905): n is a, c, g, or t
  misc_feature (3909)..(3910): n is a, c, g, or t
  misc_feature (3914)..(3915): n is a, c, g, or t
  misc_feature (3921)..(3922): n is a, c, g, or t
  misc_feature (3927)..(3928): n is a, c, g, or t
  misc_feature (3930)..(3930): n is a, c, g, or t
  misc_feature (3934)..(3935): n is a, c, g, or t
  misc_feature (3941)..(3943): n is a, c, g, or t
  misc_feature (3945)..(3945): n is a, c, g, or t
  misc_feature (3947)..(3947): n is a, c, g, or t
  misc_feature (3950)..(3951): n is a, c, g, or t
  misc_feature (3955)..(3956): n is a, c, g, or t
  misc_feature (3962)..(3965): n is a, c, g, or t
  misc_feature (3967)..(3967): n is a, c, g, or t
  misc_feature (3970)..(3970): n is a, c, g, or t
  misc_feature (3973)..(3974): n is a, c, g, or t
  misc_feature (3977)..(3978): n is a, c, g, or t
  misc_feature (3980)..(3983): n is a, c, g, or t
  misc_feature (3986)..(3987): n is a, c, g, or t
  misc_feature (3990)..(3994): n is a, c, g, or t
  misc_feature (3996)..(3996): n is a, c, g, or t
  misc_feature (3999)..(4000): n is a, c, g, or t
gaacaacatggacttgtaaaccttggtaaagcaggacgtagccgttggaaaggtatccgcccaacagttcgtggttctgtaatgaaccctaacgatcacccacacggtggtggtgaaggtaaagcaccagttggtcgtaaagcaccatctactccatggggcaaacctgctcttggtcttaaaactcgtaacaagaaagcgaaatctgacaaacttatcgttcgtcgtcgcaacgagaaataatattaaactagtcgcttaagcaactagtaaatccgccagctcggtagcgctccatgtgagcgcaagccgctgtggtacaacatttaaaggagaaaatataaaaatgggacgcagtcttaaaaaaggacctttcgtcgatgagcatttgatgaaaaaagttgaagctcaagctaacgacgaaaagaaaaaagttattaaaacttggtcacgtcgttcaacgatcttcccaagtttcattggttacactattgcagtttatgacggacgtaaacacgtacctgtttacatccaagaagacatggtaggtcacaaacttggtgaatttgcaccaactcgtacttacaaaggtcacgctgcagacgacaagaaaacacgtagaaaataaggagaacataaatggcagaaattacttcagctaaagcaatggctcgtacagtacgtgtttcacctcgtaaatcacgtcttgttcttgataacatccgtggtaaaagcgtagccgatgcaatcgcaatcttgacattcactccaaacaaagctgctgaaatcatcttgaaagttttgaactcagctgtagctaacgctgaaaacaactttggtttggataaagctaacttggtagtatctgaagcattcgcaaacgaaggaccaactatgaaacgtttccgtccacgtgcgaaaggttcagcttcaccaatcaacaaacgtacagctcacatcactgtagctgttgcagaaaaataaggaggtaaaatcgtgggtcaaaaagtacatccaattggtatgcgtgtcggcatcatccgtgattgggatgccaaatggtatgctgaaaaagaatacgcggattaccttcatgaagatcttgcaatccgtaaattcgttcaaaaagaacttgctgacgcagcagtttcaactatcgaaatcgaacgcgcagtaaacaaagttaacgtttcacttcacactgctaaaccaggtatggttatcggtaaaggtggtgctaacgttgatgcactccgtgcaaaacttaacaaattgactggaaaacaagtacacatcaacatcatcgaaatcaaacaacctgatttggatgctcaccttgtaggtgaaggaattgctcgtcaattggagcaacgtgttgctttccgtcgtgcacaaaaacaagcaatccaacgtgcaatgcgtgctggagctaaaggaatcaaaactcaagtatcaggtcgtttgaacggtgcagatatcgcccgtgctgaaggatactctgaaggaactgttccacttcacacacttcgtgcagatatcgattacgcttgggaagaagcagatactacatacggtaaacttggtgttaaagtatggatctaccgtggtgaagttcttccagctcgnaaaaacactaaaggaggtaaataaccaatgttagtacctaaacgtgttaaacaccgtcgtgaattccgtggaaaaatgcgcggtgaagcaaaaggtggaaaagaagtagcattcggtgaatacggtcttcaagctacaactagccactggatcactaaccgccaaatcgaagctgctcgtatcgccatgactcgttacatgaaacgtggtggtaaagtttggattaaaatcttcccacacaaatcatacactgctaaagctatcggtgtgcgtatgggatctggtaaaggggcacctgaaggttgggtagcaccagttaaacgtggtaaagtgatgttcgaaatcgctggtgtatctgaagagatcgctcgcgaagcgcttcgtcttgctagccacaaattgccagttaaatgtaaattcgtaaaacgtgaagcagaataaggagaaggcatgaaacttaatgaagtaaaagaatttgttaaagaacttcgtggtctttctcaagaagaactcgcgaagcgcgaaaacgaattgaaaaaagaattgtttgaacttcgtttccaagctgctactggtcaattggaacaaacagctcgcttgaaagaagttaaaaaacaaatcgctcgtatcaaaacagttcaatctgaagcgaaataatagactagggaaggagaaatttcaatggaacgcaataatcgtaaagttcttgttggacgtgttgtatctgacaaaatggacaagacaatcacagttgtagttgaaacaaaacgtaaccacccagtctatggtaaacgtattaactactctaaaaaatacaaagctcatgatgaaaacaatgttgccaaagaaggcgatatcgtacgtatcatggaaactcgtccgctttcagctacaaaacgtttccgtcttgtagaagttgttgaagaagcggtcatcatctaatcaaacctgaaaggagaaaactgaaatgattcaaacagaaactcgtttgaaagtcgcagacaacagcggtgctcgcgaaatcttgactatcaaagttcttggtggttcaggacgtaaatttgcaaacatcggtgatgttatcgtggcatctgtaaaacaagctactcctggtggtgcggttaaaaaaggtgacgttgttaaagcagttatcgttcgtactaaatcaggtgctcgtcgtgctgatggttcatacatcaaatttgacgaaaacgcagcagttatcatccgtgaagacaaaactcctcgcggaacacgtatctttggcccagttgcacgtgaattgcgtgaaggtggcttcatgaagatcgtgtcacttgctccagaagtactttaatttttagaaacaaactagtcccctngattnannnnnnggnnnccntnnnggnnntaanaaaannnaagnngaaacnnannnttnntaaaaaangnnnncaaagtncnnnnannnncngnnaaannnangggaannnannnngtnnnccttnntgcccttcnaaaannaaanaaagtnancntnnangnnntnaananngtnaanaannncnannnnccaannaannanntncnnnaagnnggnntnntnnnnaaananncnnnnnncnannnancaaanntnnanntttnggnnaaaanngnnntannngnnnnnntngntnanaaattnnnnnncgnnaaaaangttnnntnnaanaaaaannnngnnnannngnttnatnantnnnnaaggaangnanaantnnantggcaantcgtttaaaanaaaaatntntnaangannnantncntnnttnnannnaanaatnnancnannnnnnngnnnngncnnnncnnaaagnaganannnnnntttnnancntggnnntngnnnannnnntannaaannnnaaannccttnaaaannnnnntnaananttgnnncttnnntnngnnnaaaaacnnntnatnannaannntaaaaaatnantnncngnntnccnnnttcnnnangnnntngnnntngnnnnaaanntnaccnttngngnnnaanntnngnncnaatnctngnnnaaattgnttnnanttnnnctnccncnngnnnnngncttcnnngnngtncnaanaaannnnttnnangnacncggaannnnnannnttggtnngaaanaananttnatntnccnnnaaatnaacttnnangnnntngnnaaancnnnngnnntnnannnnnttnnnntaanannngcnaanactnnnnannngnnnngnnnnttnnttnnagncntngnaannccttttnnaaannaatnnaggagnnaaatnnantggnnaaaaannnantnatnnctannaacaannnncnagngannttnncnnnncannctnnnnntngtnn

SEQ ID NO: 606 - DNA, 4000 bp, Escherichia coli
  misc_feature (1989)..(1989): n is a, c, g, or t
  misc_feature (2943)..(2943): n is a, c, g, or t
aacgaagtttacatacttttaaactttaaatctcctttagactatcaagtcgcaggatcattaatggattttccggtgttagttccacagtttagtggattgtatcgagtaattagcgcacaatcaaattttgcaggaggacaatttaaacaaacgcttaaaatgatacgtatgaaaggacaaaacgacgaaagcacaactggaaataaaacaccaattattctagcttctaaagaaaaacgtttagacagcggcggagcagcagcaagcgcacctagcgatttggcagcagctcaagcatctcaagcagctcaatctgctgtatcggaaattaaatctatagtaactaatacagttaatgcagttacgtctggaccagatgtagttcgaacgcaagaattgctaataacaggaaaaattgaagaaggtgtaaaagaattagtagctggaaaagtttcaaatgtatcagattttatacaagcaaatcctgaattaagacaatttgtagcacaaagcactaaaggtgacagaacaagtcttgtaagagatacagttcagggagtgtttccgttaaaattagggtttgaagcagggcaagttgatcctgcacttgctgccgcagcgaacgctagttcacaagcagcacaagcagcagctcaagcaagttttagagcaagagaagcagcaattgctggagtttcagcggccacaagtcaagccgctggcacccgtcctcctgtaaatagaacagaaggtcgtcaatatagtgaagcgtatctaagaagacaggctagacgagcagcacaaagcggaggagctggttaataaatgtcatatgagataactgatcaagataaagcacttctgcgtcttgttgcgaaacacgaagcaggaacttatgacatgatatatggcggagaaacacacccattaactcaaatgcttattggtgaagttttacagttccagaattcgtacatgaaaacctggcgctcgtcggcagttggcaaatatcaaatgcttaaagcagttgtagaagaaagttgccgtcgttcaggatttgatcctacacaagttcgttatacagcagaagttcaagatattatgatgcttgataaaatcaaagcacaacgcaaatataacgaatggaaagccggagagctttcgacaaatccagatcctgcacaaaaggaaattgaaaacagccaaaagtttatggaatatcttgcagcagaatgggcaagctgtccagttccgtatgatatgcctgcaggttcatctattgtttctagtagtcatcctaagcgtaacttaacaaaaggtcaaagtttttatgcaggtgacggactaaacaagtcgcaccacgatgcagatcaatttttatctgcactaattgatatctatcgtggaggacctggagaaattgaaacaattccaactgcacaaggcaacgcagccgctgaaggtagaactgaaactccaattcctactgcacctgttggtagcgacgggtatcgccaagaaggaaatactcctgaagctagaatgagaaattttggaagcggaggttcgagagttacaggcggatcaggaaatcgacctgcattacctaataatttaccggatgcaacagatgtttacaaatacgaaataattgacccattagatgatcgttatgattttagaacaggtaaaaaagttgctagattattagaaaacggcacaatgtcagtacaagaaaatgcacctggaagcacaagtactcctggaggtgatttaggtgtagcaggtaacgaaggtgttgatccagaaacatttacaatgcagcaagttaatgaaatactcgacagcagagatgcttcctctacacaagcaggtcgatatagcgacacaccggggttaccgacttcaactaatactgtaacaggatcaactagtggcacaggaggttctgccggcggaggagcaggcggaggagcaggcggtggnggtggcggcggaggcggtggcggcgccgacggactgtcaggaaaattatcacctattaagaaaatacctaatcctttagattttgattcaaaaggagtacctacagggttaggtaagtcagggttaggaagtttaaaaccaccagcaacaatatctgcaccggcaccggcaaaatctggattaagtactgctccgcaaaataatgatcttgcaagtgatgttaatgatttattaaagtcacgcacaatagagttacaagatagtttagacacaaagaaagaaagtgttgataatttatcagcaacattaaaacaaattgttgatgacgaaccgttagtgtacaagcaagaactagatgatcggttattagaattaactaacgaaggagttgtattgtacgacagaattgaagaacttaaaatctctgatccgggaagtgacgaaattgtacagttagaaagacagttatttacaaatgaatcagcaaaacaagttatagaaagtaaaattgatatgggatatccatatggacttacaattaactcggttagtaatagagtaaaaaataaaacaagttatacacaatcagtaaatcagttgaaatctaaactaaatgaaattgacgaaaccaaagctacagcaaagcaatctggtgtagatttaaaaggcggaacttatacaacaaactatcaaacagtaccaccggtggttacgtttaaaaataattaatgtaaagtagaaacatagatggcaaaccaatatacaagaacaagagttaaagaatctaaaataagagaccgtggtccttatgaggcaatcattgtaagtcatcttgacccattgtacatgggtacgttagaagttgaaatattgaagtacgacggtgcttcaggcacacctgaacgtagcggtcaacttgttaatgttagatacctaagtcctttttacggtgtnacaccaaataaaggattaacacctaatgacggatacgaatttacccagaaaagttacggcatgtgggctgttcctccagatgtcggaacaagagtacttgtaatatttgcagaaggtagcgcagcatacggttattggataggttgtatccaagacgttggtatgaactttatgttaccggatggtcgtgccgttacagaaaatactacgcccggtacacctgataatttaaaaggtacaaaactaccagtaggtgaatataataagttaatagaatcaggatctaaaatagatcctacactatttgaaaaaccctacaacaaagactttacagaaatactagaagtacaaggtttaatactcgacgaagcaagaggtacaactactactagtgctagacgagaaactccaagtatggtatttggtatttcaacaccaggacctttagataaacgtaacggcaatccaaaagcaaaatatggtactagcacaggtgctgctaatgttccgtttaatagactaggcggttctagttttgttatggacgacggtgatgataaatttattagaaatacacatgctgccgacggcccgccaatttatattaaccgagaagcaggcgaaactggcggtgacgaaactgttccgcaaaacgaattaacacgcattcgtactagaacaggtcaccaaattctactacacaattctgaagatttaatttatattggaaatagtcgaggcactgcttggttagaaatgaccagtgatggtaaaattgacatttatgctaaagatagtgtaagtgtattttcagacaatgatcttaatttatctgctagtagagatattaatcttgatgcaggccgcaatattaatatgagggctacggcgcgatattcagataaaaaacaaactgataacggtaaagattctggtagagtaacaattgaaagtgcatttaatactcatatgcacgttggcaaagactaccatttaactgtagaagattatagtcataccgttgttcataaagacatgagaacaacagttgatagag

SEQ ID NO: 607 - DNA, 4000 bp, Escherichia coli
  misc_feature (1618)..(1618): n is a, c, g, or t
  misc_feature (1625)..(1625): n is a, c, g, or t
  misc_feature (1698)..(1698): n is a, c, g, or t
  misc_feature (1817)..(1817): n is a, c, g, or t
  misc_feature (1826)..(1826): n is a, c, g, or t
  misc_feature (1943)..(1943): n is a, c, g, or t
  misc_feature (1991)..(1992): n is a, c, g, or t
  misc_feature (1997)..(1997): n is a, c, g, or t
  misc_feature (2015)..(2015): n is a, c, g, or t
gaaattcatatctgtacttatgttgtttgtataagttagtgtgacgtttcttgttgatgcggatgatgtgattgcatacgcacctccatccataagatcccaatcagtcgggaaagttgccgatccacccgatgcctcaatttgaattgtgcatggggtttgttggcataatgctgtgtaggtgcttgatgtgtgtaacacttctccgttttgtgttataataaaataataaataacatcttcctctactaaatgtacaattgtatctccgttctgatcctcccttgctctttcaacttctctaaaagttccttccccaatatattttctcataacatgaataatcgcctcatctaccggtaatccatctttatcaaaataattaaataaaaacgacgtactatcaactgttaagagatcgaaaagatctattgtataatctgtttgggtatcaaatatttttgttgagtttaatgttccatcttctaaataataaaattcccaaacgtgatgtgtgctatcaaacccaattgtaaaataaatccaaaattgcgaattatttaaaacgcttgttggaatacaaacttgtgggttattttcattcacccatgtattgttgtatgttaaataaatagaagaattggtttttgatgttaataataaattaatttcaacatttgttccattgctttcatttattgctgttgttgtttcttcgtcttttaaataaaaatccaaaataatttctccataagttgaacaattatcaatggctaattcataaaccgtaatgttttctgtgtcggttattttatctgtggttattccattaattgtataattccaaaaccaatcttgtacaatccccgttgtgtttccccatccattagggatctctattattacttcaaaataatattcatttgtttctgctgttgttgttgttggtgaataaatagtattatttaaaaccaaagttgctgttgttgttggtatatttgttaaattaattgtgagattaaaggttgcatcaaatccttctgcaataggatcgggattgtctgcctgtgtttcttgaatataccaaacccaaatataatctgtgttgcacacctcatttccaaaagtatcatttgcgcaataagttattgtttgatttcctcccgttgtccatgttgttgtaattgtagaattacaagttactattgtttgtgttgcatttgccgttgagttgtaataacattcgtcaatatggctatctgttacattataataccatgaactatttgtttgcaaatcaaaaattataagatctgttaagtttgatgcacttgtaattattggagatgtgccgtcaattataattgtaattgatgatgtgtttgtttcttggcttttgttgtctgttgcccttccataaataatataatttccatctcctaaacttaaatcaaaaatataatttgtgttattaatccctgttgcatttgtttggtttaggccaccattaacataaagtttaacatcttctaaatttatatcatcccacgccgtaaaattaatttctaaattttgaggagaagaataatttgttgatggtggtgagtttaaggttatntttggtngattgtctgttatattaatataacttattccggtgcttaaatctaaaatttcatccgaacttaaatctctgtnccaaattcctatttcgtctatagttccttcaaattggtcaaaaatctgtgtagaacgagtcatagctcctacgctaatatgattataacctgaaatatctgcattccattgtccagtantagaaccanatatttcatctaatatttcatcattaccatcaagataaagatgagtagttgagccattagaagtcacaacaagatgatgccaatctgtatcatcccacgtgttctgcggtgaaagtntctctacagttgacccacgaatcaaccattcaataactccagtatcannaatangtattccaccataaccantatcattataagtatcttcattgaaagtaaaaggtcttccgaaactattagtatcagttctcttataccaaaaactaatagaaccagattgagaacctgttggtcctgtgctatccgcccaatccgtagaactatcaaaaagaatcgctgtatttatttttcccgtagaggaataagtcacggcattagtaaccatatccaaactgcctactgaatcaatcaaattccctgaactttcatctaatttgtaataagaagttaaaccaacgtttaaatcctctgtccaacttgcccattctgttaatttttctccaaaaaacgttggtatccattcaacataatctccttttaaaacttctgtaaaaattccaatagtaactctgtctttgtttggtggcaattcattaatatcactaaatttaatccaaaccggcactaaaacattttctttatcaacttcttcttgtttgcaatcttgatattctgtttggtttgtttgattaaatttagttgtgcaaattgtttcataaattattttttcttcccatttgtaatctaaatatttatagtcaaaatttctttcaattttttcatttaaattatttgcttgataaaaattcatatccttaaaagcattattataatcttttttgtaattatataaatcaaattctgcaacttgtcggtatcctcttgggagaataacatttaagtttgtgtttaatcttatttctgccaacgtttcaccaaacccaaaccaattctcaataatatatattcttgttaccggatcataagtttgtatattatcaatttctaatgctgaaatagagggtatcaatagcatggacaacaccaataaaatgcaggagaatgctttaaaacaagagtttttgtcaatatccataaatagtttcctcctttcttcccattcttgaaaacatgataattccgccggtgatcccaatgattgttatccaaacggggagattaagcataatccaatttgctcctgtaaatcccgtgaatgtactgcttaaagttggattactcatcaaagtttcataactattgcttattggtactgacacaataattgatattattacaataaagatataaggtataaagaaaattggttttgttgttattaaataagatcctataaatatactcaaaatcattccgccaattaaaaacacagtgatccaatataatgctgtgaatgttgtgtttgtcactcccattgtattgtcaataactaccgatgcattgttgccgatggtatcatgtaaatccatttttcccaaactctcttgcaattgatcttctgtttgtattccaatataaatcatcacaacagaaattaaaataataacaaaagcaaatatcataaataagaatagatctgtaaatcctcccctcttgtttttaatcaatggttttatcatttttatcttttatctaaatttaatttaatatcttcgttccctatttctaataattttttttctaatgcgtcaaaatcaatattgattgaaatttcttttgttaaatctctcatacttcttttttctccttgtttctgcattatttttttttgtagttcttttatctttatttcaaattcggatgcaacttgcattggtactctttttttagttaccaaaaatccaccccttctttttctttgttattgcaaaggccgtttcgggatcttcccctttgtcaattaacttttgaaaatgctcattgtaggcgtgaatataaacaatccacgcaatgcttaaatatatcattgggaaaattgtaattgtgaatatccaaaacaatgttttgaaaattcctgttaatgctactcctcctaataatccctcaactcctatttgccaactaacaaaagttattaaaacaaacagaatatggctaatccaataagagatgaattttgccatgtaattctcgatgctgaataacacaaacaa

SEQ ID NO: 608 - DNA, 4000 bp, Escherichia coli
  misc_feature (31)..(31): n is a, c, g, or t
  misc_feature (813)..(813): n is a, c, g, or t
  misc_feature (1994)..(1994): n is a, c, g, or t
  misc_feature (3748)..(3748): n is a, c, g, or t
  misc_feature (3771)..(3771): n is a, c, g, or t
  misc_feature (3777)..(3777): n is a, c, g, or t
  misc_feature (3807)..(3807): n is a, c, g, or t
  misc_feature (3868)..(3868): n is a, c, g, or t
  misc_feature (3896)..(3896): n is a, c, g, or t
  misc_feature (3949)..(3949): n is a, c, g, or t
  misc_feature (3958)..(3958): n is a, c, g, or t
attggttgaattgctgacgtgacagagggtnggtctctgttaggaagcgggaggggactgcaccaccacacagcttcagtgtcacgtcaacgttacaactataggctgaaaatagccatgtgtaaactttgatgattatttagatggatcgctgaatggagacaacagttctcgcctcaggaagtatgttcagcacagtcatagaagccgcggttgagtcacgagcaaagatcagctgtccgtcaatcttgttgccctgatcatcaagataatccactagatatggctttagcttggattcattcgttaccttatctccgttttttctatacgggacacgattatcagaacctaacagatcaattttatcgcaatcacggcaatatcgggtgaatcttagttaataaagcttcgagctactgcctaaagcgccgaagctagtttcactcaattaagagttgatgaacgccctcatcgcttcggcctcgtcctgatacttctcaagcgtgcggttcatcacatctttatttgaaactacacccaccagcttcccatcctctaaaattggcaggtggcgacaattatgatcagccatcacttgcatcatctctgacgacagagccttggtggtaaccgtggccactttcttagtcatgatatcctgagcaatccaaccactgaggtcttgctcagttgcaaggtgtctcacaatgtcacgctcagatatgatgccgtgaacttcgccagagccattttcgacaacgacggcaccaatattatgctctgccaataacgtgatgatttccgaaagcntagccttaggccgcactgtgtagcatggacgtgcgataaggcttttcataaacggcgtcatgtcatccctcccaagaactacaatcgactcgccttaaaattgtatctcggatacttgagaacacaagagtcatgacaaaactattggaatagcgccatagctgccccttattcgcaatggggccgcaattatggaacaaaagaccttgaacagcctaaaaaactaaaattttatcgacgcaaacgcaacaggccttccaagtcgctcagcgctcggcgtgcgtcgtggaacaccagatcaatatcgacaatctttgtcagatttgtgtttcccatatcgagtgcaggtgcaacgccgataatcgtttcgggcaaagcgatgcgtagtgcaaacaccaaacggatgacatctccgatggctgattttgtactcagagaaaggccgattacagtaggttttgtggatacggcatgttctaaaatatcctcatgtgtgtcaccaatccgtagatcaatgcaccatcctgcttcacgaaacgtatccgaggccaggcttacaccaagcgtgtgcgtttctcttggaacagaagcaaacagtgcgtgacgttcatttgcctctttgccattgtaggtaataatatcggcccttaacgacctgattaatgcataaagcttgccagtggcaattgtgacatcaacgaacttagcctcgctgcgatcccaacgtgccccaagatcctgtgcagcacgtgctattaattcatatcggataatgtcaggcgacactccatctcgtttaaggcaattgataaaacgccatggcgcatcagagtctgtttgcagcaatagatcacaaaaatctgataaagtgtcagaagaaagcagcatcacatcaactgggcgttccgatggcgcgagctccgcaagatagttgatcacttcttctgctaacgcgttgacccggtctgtaggaagaattgcatgtttgtttgagaaaatctcaaaagaccgctgataaagtgcgccatcaggtgacgatgttttacttaccattttatcgcctcagaaacctaattgccttttgcagattagactttctgacaccattttaaactgcaagctttggtcggatgtagagcaaccagcgtatttgaaaatgtaaggacgaaggctaaccacgntactgttacataacgtttttgtaaaccatttgatcgttccaagcccaacataacaaaaaacaacacataaaaattaaccaatcctaagtcaaatgagcagacaccgataaatcaagtatcaagagtttgttggtgtactacacgcaaccacgtttggttatcttggacataggacgaagtgcacattgcctcataaattggtatatctgcgcgctccgcagaaacgtgataggccagcacagcgatgtcattcgctcgcttgaaataacgctgagtcattgacacagttcgccatctttgagctacagatttctcttgccaaagagcctcgccttgaagcatgccaacagggtacggaaatacaaaaacagcgccttttgctgtcatgtgccgtgcactgtctaggccttctagccaaaacttttcttcgagtgaccataagtgatcttcgtcattcattgttggtttccttatatttcttaaacgcgcaggccactcatgccgttgtacagtaggttgatcaccactgattagcctgtcaaaatttattaattgaactttaacaaggtgagtgaaggttgcgcacttcggcttcactatatccatctgcttgcatcatcagatgtataagtggatcggccatcatctcttcaagaaatggatcctctcggtttcttgaagccatcttatcttttagaagcacggcttcaaggtccaccagtggcacctgcaaagtgcgcttgagacctggatttgacacacatggatgaagatgcagaatgacagaatagacgtatttctcttgattaccactactatctgaactgtagccatcaatttctatatcgtactggcccgctggtaaggcctcatcaaaactttttagtttaaatgattttcgcaaggttgcagttttattttcaaagtcaatcaaaatattttaccttttatattgtatttcattttttcttaggcaattttaggggttatatttcttaaatattaaaatatcatgtgatgggtgattatgaatataactaatttgatgtgctttatcttcccattacacatgcaccattaagcagctgaaagctgcgatcgcacctccaagaattacccgaacggtttagatgtgcattttcaggcacatttattaaaacacacttgttgtctacaggctcgaaacctctttcgcacgtccagccagaaccagttgtatctgctgacaaatatgcgttatcaggcactaccactagcacacaattatcacgggtctgtctatacccacgctcgcactcccagccgtacccagaaggtttcagaaacgcattttctggaatgggaatagcttcacatgttactccattgacttcttcgtatccgcgtttgcaagcccagccattaccgtaggatctaccattggcgtacgcattagcaggaagctcaataagttcacactccccgtcgctcaaacgatatccaagactacagttccagccgtcaccataattttgtgcttctgcattttctggaacagggccattaccatcttgcgcaacggcagaaacaccaaaaatagaagcagtagagaccaagactaaaatcttgatcgtattttgcataataaatctcatttctctaaaacatttcacaacatattccctcattaccttaccaatccttgctttatattaataaaaatttacatatattagttttatttcactatgtggaaatcaaaaataagcctatcntagaattggataaacattacggnccactnggcctcgattaaatgtaatctctattagtnagtttgctagtagtgtatataatatatatactgtaactagagcacagttagtggctttaantcggacctaaaaccacaaaatttacttntagtgaagcaaggtggcatcaagtatgagacgctttcgcagtatagcctgtcnaatgttacntgggaacgctcaagtcgattgtcaatgcgcaggacaatacac

SEQ ID NO: 609 - DNA, 4000 bp, Escherichia coli
  misc_feature (1)..(1): n is a, c, g, or t
  misc_feature (5)..(5): n is a, c, g, or t
  misc_feature (9)..(10): n is a, c, g, or t
  misc_feature (13)..(13): n is a, c, g, or t
  misc_feature (19)..(21): n is a, c, g, or t
  misc_feature (24)..(25): n is a, c, g, or t
  misc_feature (27)..(27): n is a, c, g, or t
  misc_feature (29)..(30): n is a, c, g, or t
  misc_feature (42)..(42): n is a, c, g, or t
  misc_feature (49)..(50): n is a, c, g, or t
  misc_feature (52)..(52): n is a, c, g, or t
  misc_feature (55)..(55): n is a, c, g, or t
  misc_feature (62)..(63): n is a, c, g, or t
  misc_feature (71)..(72): n is a, c, g, or t
  misc_feature (79)..(79): n is a, c, g, or t
  misc_feature (82)..(82): n is a, c, g, or t
  misc_feature (84)..(84): n is a, c, g, or t
  misc_feature (91)..(91): n is a, c, g, or t
  misc_feature (94)..(94): n is a, c, g, or t
  misc_feature (124)..(124): n is a, c, g, or t
  misc_feature (127)..(127): n is a, c, g, or t
  misc_feature (133)..(133): n is a, c, g, or t
  misc_feature (136)..(136): n is a, c, g, or t
  misc_feature (169)..(169): n is a, c, g, or t
  misc_feature (175)..(175): n is a, c, g, or t
  misc_feature (187)..(187): n is a, c, g, or t
  misc_feature (265)..(265): n is a, c, g, or t
  misc_feature (1986)..(1986): n is a, c, g, or t
  misc_feature (2538)..(2538): n is a, c, g, or t
  misc_feature (2880)..(2880): n is a, c, g, or t
  misc_feature (3399)..(3399): n is a, c, g, or t
  misc_feature (3409)..(3409): n is a, c, g, or t
  misc_feature (3426)..(3426): n is a, c, g, or t
  misc_feature (3434)..(3434): n is a, c, g, or t
  misc_feature (3465)..(3465): n is a, c, g, or t
  misc_feature (3481)..(3483): n is a, c, g, or t
  misc_feature (3487)..(3492): n is a, c, g, or t
  misc_feature (3494)..(3494): n is a, c, g, or t
  misc_feature (3497)..(3500): n is a, c, g, or t
  misc_feature (3503)..(3504): n is a, c, g, or t
  misc_feature (3506)..(3506): n is a, c, g, or t
  misc_feature (3508)..(3508): n is a, c, g, or t
  misc_feature (3510)..(3514): n is a, c, g, or t
  misc_feature (3516)..(3520): n is a, c, g, or t
  misc_feature (3530)..(3530): n is a, c, g, or t
ngtantaanngangatgannnagnngnanntgaagatgagcntgtagtnncngangatgaannagtagtanntgaagangancntgtagtnacngaagatgaaccagtagtaactgaagatganccngtagtnacngaagatgaaccagtagtaactgaagatgagccngtagtnaccgaggatganccagtagtaactgaagatgagcctgtagtgaccgaagatgaaccagtagtaaccgaagaagaggttgaagatgtgatngaagatgttgaagaaacgattgaagatgcagaagaaacagccgcagaaactgaaaaagtaatcgaaataataatttcacgttgtgatgaccttaacgtcatttgtccctaagcggaaggacctctataatttagtgaggcattgtgttttcacagaattatctgcaagcaaattataatgtctgcatttactaaagaatttaattgactgatctataacttcaggctagaattggggtttaacttttttcatacaaaccatccactagatggaaaataacgacatgtcagaaaatcaattagcagcgagtattcgtagcaacaaaggaaaaacagccaatcaaaaattgcggcaatcaggtaatatcccagcagtgctttacggccctcgtggaaatatcatgctgcagatggaagaagaatcaactcggcatcttctcgaaaaaatgtccggtttgcatgaactcgtaccaatcacagtcacggattctaccagcggagatagctggacagcgcaggttgtgctcagggaagttcagaagcacccttacaagcatttactcacacaccttgatttttgggaacttccagcagccaaggagcagcttgtccgtataccaattgaggtaacaggcgagtcaccaggtgttaaaggtggaggtgttctgcagatggtagtcagggaaattcctgtttattgtcttcctgcagatataccagcatccattgaattagacacttctgaattggaaataggtgattcaattagaattctggatattgaactgcctgcaaaagtttctcatagtactgaggaaaattatgcagtaatttcaattgttggacgtgcaaaagaagaagaagaagaaattgctgaaggagaagaaggtgctgaagaaacagcagcagattctgcagatgaagagtcttcaaaagaagagtaaatccgagtaagtactgatacaggaaagggcgggcatgaagctagtggccggcttgggaaatccgggcaaagagtatgaaggaacgcctcacaatgttggttttcaggcagtagatatactactggaacagttgggtctcagtggatttcagcagaagtttcaaagccagttgctacggacgtctttaaaaggagaagcttgcatttttctcaagcctcagacttatatgaacagaagtggtcatgcggttgcagaatgcgctaattttttcaagattcctgttgaggatatagtcgttatttcagatgatcttgacctgccgccaggtaaagcacgttttcgtgatggaggcgggcatggcggacacaacggtttgcgttccattatagactcattagctaacaggcagttccgcagagtcaggataggcattggccggccttccggaaaacgggacgttgttggacatgttttgggtcgttggtctaaagccgaagaaaaattagctttgagtgcgattgatctggtgttgaatgagctaatcagctttttggaaacttcaaaatttgagaacacttcatttactgcttcgtaactggtttgagtacattcagtaaaaattaattaaaacgagtaaagtttccggaagagaatggcattagaagttggaattgttggtttgccaaatatagggaagtccaccctgtttagtgcgttaaccaaggtacaggcagaagcggcgaactatccgttttgtacgattgatccaaatataggnatagttcaactgcgtgatccaaggatgaagcgtttgactgaattggtaactccggacagtattgtacctgcgacccttcaggttgttgatatcgcggggcttgtcaaaggtgccagtcagggtgaaggcttgggtaacaaatttttaagccatattcgacaggtacatgcagtggcacatgtggtacgttgttttgaagatccaaatgtagtgcatgttgacggaaagatagatcctgtcggtgacgtagaggttattcagactgaattgattttgtctgatctggagcagacggaacgtaaaatagaacggctttcacgtcagcttaaaagtgaccgttctttggcgtcacaattgccggtttttgaacgtctgcgggattatttgggtgaaggtaaattagcactcagaatggaaatcagcgaagatgataagtctctggtagctgaattaaatctgctgactatgaaaccatatctctatattgcaaatatttctgaagacgcactcaataatccagaaattcatcaacaaaagttgaatgagttagcngcagaagaaggtgtggaagttattcccatttgcgcgcaggtggaagcggaactggcggaaatggaagatgaggaagctgatttattcatggaagagctcgggatagatagttccggacttaaccgacttacgcattccggttacaggatgctcgaacaaattacttatttcactgcaggaaaacaggaagtacgtgcctgggaaatccgaaaaggtactactgctccgggagctgctggaaaaatacatactgattttgagaaaggctttatccgtgccgaagtctttcattttgatgacattgaccgcttaggttctgagtcatcagtcaaggaagccggnaaatggcgacttgaaggccgggattacgtggtgcaggatggtgacataatgcactttcgttttaatgtttagcatttgtttttgaacaaattgctctaaagcaaaggaatgtacttttgctttttccttgttcactcaggtggacttattgacatttcaataatccgaaaggaagttaaatgacaggatatgaactagtgttcatcacagccccgactcttagtgaagatgatctggccgttgtgttgaaaaaatttaaaaaaagcctcactgaatttgatggaaaactcattcatgaatatgtttggggacgtcgaagattagcatacgaaattgctggtaatgatttcggtgtatatcacgcttggtactttacaggtagtggaaaaacagtagacgaattacagcgtcaattcggttactcagatgatgttttgcgtaatcaaatcgtgaaaacagatgaccttgatgcagatgcagcatttttacataacttaatacctcctaaagaggaaactncagaaaaagnggaagttcaggaaaaanctgccganaatgcaacaaaagttgtagaacaggctgagncaaaaactgaaactgnnnctgnnnnnnanaannnnganncngnannnnnannnnnaactgaatcngaagataaagcagaagataaagcagaagagcttacggatgatactgggaaagataagactgaagcagtagatgcttaatgtcctctgactttcataaaatattcagtactacacaaaacttttaggaaaaattaattatgttaaaaaaacgaaaaagatctcatttacgtcgtaaacgtataccaacaagtattttattacgcagtaaacagaaagtctgtccatttaaagaagccggaattgatcggattgattataaggacgttgagttgctcaaaagttatgtgactgaaggcggaaagataattccaagccggatttcaggagtctgcgctcagaatcagaggaagttaaaaactgctattcgacgtgctcgcaacttggcgttgctctcacctttgaagggttatgtgccccaacaggttattgtcgatcgaagattttcaggacgcacaaatactaatcgagct

SEQ ID NO: 610 - DNA, 4000 bp, Escherichia coli
  misc_feature (127)..(127): n is a, c, g, or t
  misc_feature (1404)..(1404): n is a, c, g, or t
  misc_feature (3533)..(3533): n is a, c, g, or t
gtcctcgcagatgctgtcgttggccttggagaggccggtggcgctgcgcacgccggccgggtcgggcttgcggaccacgttggccgcaccgaccgcggacggatgcccgttgtggcaggtgatgcantcctggcccatcttgccgacgttgtcagacgcgggcgtgaagttcttcgcgatcgccgcgtccttgctcttgagatagccctcgccggtgtggcacttgtagcagccgctgaggcttgggtccatgctgttcgagtagtgaccgttgcccgcggcctggaaggtcatggcgtcgggcgacgtgctggtgagagctccgcgataggagtgcgccgaggcggaccactcgtcgtagtagtagtggccgcccttggcattgctgccgttggggaacatccagaacgccgcgggggtggccatgaactcggccaccgtggggatcttggtgtacgactgaccgccggacgcgccgttgacgtcgacgaagttgcgcagcggctggttggtcgtgtagccgtagatgcccaccgtgccggcgacgtccgtgaagctaccgtgacactggccgcacacctgcgactgaccgagggtctccagcgaggtagagacttgcgtgcccgatcccatatgaccgccgcccgcggtcacggcgtcgacgccggtgccatggcagttctcgcactggatgccgagaccggcatacgacacggccgggtcggccatgaattgttccttcgttgtgtcgtccggacgagcccactgcctcgccgtcgtcgcggtgacggcgacgatggccgcggggttgggcaccgtagcgctcgccttcggcaccgtggagcccagctggtggcaccgctggcagctgtaactgacgtcgtagaggcccttgggctctccgtccgccaagagccatgcgccgctgggctccgaggcgagaccctcgacgaggttccacggcatcacggtcggatccgtggtgcccttccagaacaggtactcgccgccggagttgcccacgccggagttgcccagcgtgtcaccgagcgtgacccaggtgtcgccggcgatgttgtactcgccgccgccggagaacagcgcgggggccgggccgaggacctgcagcggattgccgggtcccttgaacttcgtccactctaccggagttttgggcaacaggccccgcgtggcgaagcgcccgtggacctggttggcgtactcggcgccgtggcacccagtgcacgtgggctgaccggcgtaatgcatgccgtactcgtttttgagaccagcgccgaacgccgtggccggcaggatcaccacagccatgacggcgacggccaagaatagtactgctcgtttccccatgtttgctccctcagcttgccgcttgaatgttgcagntggcttctgcatcccccctcgcgccaaccatgtgggtcgtcacgtgcatacgcgaacgcgacccggtacggttccgtgccgtgagtgagacacgacgcgccaggggagccacacactcccgtcggcacgtatcacacacggccggcaccggcgagacaggtgaaaaaagaccggttccacacgcgctgcctgtgcgggatcggcttctcgccggaaacccttgtgagcgagtctagacctaagtacctagggtttcaactgtacagcgagaccaaggtgaacacccgagtcacgtctgcgcgtcggcgatccgatccgcatgggcgccttcgactgcgccgctgccgatatgcgccacggcaagtagctggggtgacgagcggagtctacggttccgcgcacgctgtgaggcgatggcgtccggtgggcagcggcggcggagattccatccggttgtggaacgacggcaccgacacggtccacaaacgcggcgggcggcgccggccgtggccgcggtgacccgccgcgcaagaacccgcgctggcgttagcgcaccgtcagctgggtcacggcgggcgtctgctattaatgtagatcgcgcgcgcgaagtaacgacagccatcaggatggcgcctggacgatcagcttgccgcgccattccttccggtgctcttgagggcgatggcctgctcgcgcagaccaagggcccttgcgcaagcgatatctattcgggcgaccccgtcgcgcagcacatcaccccgccttgacggactcccatcgcgccactagactgcccggcaagcaagggggccacctggagcacgcttcggtggcgacagaagtcccgggctctcaggtggaatcatctaggagggactatgagcatcactcgcaagaagctgttgatcatctctatcgccgtgctggcactggcgctcgcgctcgtcacggtcgcgggttgcggcggcgacagtgggtcggggggcgcctccggatccgcagcgaccccgttcaagatcggcgtcgccggctccatgaccggtcagtacgccacgtacggcgtgtcccaaaaggcaggcgccgagatcgccatggccgagctcaacgcggcgggcggcgtcaacggtggcgaggtctcgatcgccatcggcgacgacctcggcgacccgcaacaggccgtgctcgtggcccagaagtacatcgacgacaccgacgtcgtcgtcgtcgacggccacctgttctccggcgccaccatcgccgccgcggggaagtacgaatccgccggcctgcccatgatctcgccgtccgccaccaacccggacatcagcacgctgggcgcctacatttggcgcatctgcatgaccgacgccgtgcagggcgtagggctggccaactacagcgtcaacacgctgggcaagcagaagatcgccatcatgtacgacaacaacgactacggccgcggcctcgccgacgcctacgaagcggccgtcaaggccgccaagggcaccgtcgtgggcaaagagcagtacgccgccggtgacaccgacttcaaggcccagctcaccaagctgaagggagccggccccgacctgctgttcctctccggctactaccccgagggctcgaagatcgcgcagcaggccagggagctcggcatggacgtgcagctcctcggctccgacgggtatgcgtccgacgagctgcccaagcttggcggcgccgccgtcgaaggtatgctggtctccaccttcttcgactactccagcaacgatccggccgtccagaagttcgtcaaggcctatcaggacaagtacaagggcgccaaccccgactggttcgcggccaactcctacgacgtgatcatgctggcggccaaggcggccgagaaggccggcaagaacgaccgcaccgccatcaacgacgccctcgcccagatcggcacctacgagggcatctccggcaccatcaagttcgacgagaacggcgacgtcgtcaagccgctcaccatcgtcgtggtgcagcacggcggcctggccacggctcctcagcagccggaacagtaaggatctgcgcgacggccggggaggggcgagaggcgctacgcctctcgcccctccccgcaccgactnagaaaaccgacgccgcggacccgaggacctcgtgagcgaactcgcccagcaactcgtcaacggcctcatgatcgggtgcctgtatgccctcatcgccgtgggctacaccatggtgtacggcatcatcgagctcatcaacttcgccttcggcgagctcttcatgttcggggccttcatcaccatcatgatgatggcccccgagattaccctcttcggcaacacggtcagcatgccggggttgaacttcttcctcgcgatcctcatcgcgatggcggtcgtcggcatcatgggagtggtcatcgagcgcctcgcgtaccggccgctgcgcaacgctccccgactcgcggcgctcatctccgcgatcggcgtgtccgtgctgctgcagaacgtggcccaagccatcttcggatcgcagcaggtcccgttccccggcatcccgctgttcaccacggcggccgggtcaccca

SEQ ID NO: 611 - DNA, 4000 bp, Escherichia coli
  misc_feature (1655)..(1655): n is a, c, g, or t
  misc_feature (1996)..(1996): n is a, c, g, or t
  misc_feature (2009)..(2009): n is a, c, g, or t
  misc_feature (2206)..(2206): n is a, c, g, or t
  misc_feature (2208)..(2209): n is a, c, g, or t
  misc_feature (2211)..(2211): n is a, c, g, or t
  misc_feature (2214)..(2215): n is a, c, g, or t
  misc_feature (2218)..(2220): n is a, c, g, or t
  misc_feature (2222)..(2222): n is a, c, g, or t
  misc_feature (2224)..(2224): n is a, c, g, or t
  misc_feature (2226)..(2226): n is a, c, g, or t
  misc_feature (2230)..(2231): n is a, c, g, or t
  misc_feature (2240)..(2242): n is a, c, g, or t
  misc_feature (2244)..(2244): n is a, c, g, or t
  misc_feature (2247)..(2250): n is a, c, g, or t
  misc_feature (2252)..(2252): n is a, c, g, or t
  misc_feature (2259)..(2260): n is a, c, g, or t
  misc_feature (2263)..(2263): n is a, c, g, or t
  misc_feature (2267)..(2270): n is a, c, g, or t
  misc_feature (2279)..(2282): n is a, c, g, or t
  misc_feature (2284)..(2287): n is a, c, g, or t
  misc_feature (2290)..(2290): n is a, c, g, or t
  misc_feature (2292)..(2293): n is a, c, g, or t
  misc_feature (2296)..(2296): n is a, c, g, or t
  misc_feature (2300)..(2300): n is a, c, g, or t
  misc_feature (2302)..(2302): n is a, c, g, or t
  misc_feature (2304)..(2306): n is a, c, g, or t
  misc_feature (2309)..(2310): n is a, c, g, or t
  misc_feature (2314)..(2315): n is a, c, g, or t
  misc_feature (2318)..(2319): n is a, c, g, or t
  misc_feature (2322)..(2325): n is a, c, g, or t
  misc_feature (2327)..(2328): n is a, c, g, or t
  misc_feature (2332)..(2332): n is a, c, g, or t
  misc_feature (2335)..(2335): n is a, c, g, or t
  misc_feature (2337)..(2338): n is a, c, g, or t
  misc_feature (2340)..(2340): n is a, c, g, or t
  misc_feature (2342)..(2343): n is a, c, g, or t
  misc_feature (2345)..(2349): n is a, c, g, or t
  misc_feature (2351)..(2351): n is a, c, g, or t
  misc_feature (2353)..(2353): n is a, c, g, or t
  misc_feature (2355)..(2356): n is a, c, g, or t
  misc_feature (2358)..(2358): n is a, c, g, or t
  misc_feature (2361)..(2361): n is a, c, g, or t
  misc_feature (2364)..(2365): n is a, c, g, or t
  misc_feature (2367)..(2368): n is a, c, g, or t
  misc_feature (2372)..(2372): n is a, c, g, or t
  misc_feature (2374)..(2375): n is a, c, g, or t
  misc_feature (2377)..(2379): n is a, c, g, or t
  misc_feature (2383)..(2383): n is a, c, g, or t
  misc_feature (2385)..(2385): n is a, c, g, or t
  misc_feature (2387)..(2387): n is a, c, g, or t
  misc_feature (2390)..(2390): n is a, c, g, or t
  misc_feature (2393)..(2394): n is a, c, g, or t
  misc_feature (2396)..(2398): n is a, c, g, or t
  misc_feature (2400)..(2400): n is a, c, g, or t
  misc_feature (2402)..(2402): n is a, c, g, or t
  misc_feature (2405)..(2405): n is a, c, g, or t
  misc_feature (2408)..(2408): n is a, c, g, or t
  misc_feature (2411)..(2413): n is a, c, g, or t
  misc_feature (2415)..(2415): n is a, c, g, or t
  misc_feature (2417)..(2418): n is a, c, g, or t
  misc_feature (2421)..(2423): n is a, c, g, or t
  misc_feature (2425)..(2428): n is a, c, g, or t
  misc_feature (2430)..(2430): n is a, c, g, or t
  misc_feature (2437)..(2437): n is a, c, g, or t
  misc_feature (2440)..(2440): n is a, c, g, or t
  misc_feature (2443)..(2444): n is a, c, g, or t
  misc_feature (2447)..(2450): n is a, c, g, or t
  misc_feature (2454)..(2455): n is a, c, g, or t
  misc_feature (2459)..(2462): n is a, c, g, or t
  misc_feature (2465)..(2466): n is a, c, g, or t
  misc_feature (2469)..(2470): n is a, c, g, or t
  misc_feature (2473)..(2473): n is a, c, g, or t
  misc_feature (2477)..(2478): n is a, c, g, or t
  misc_feature (2480)..(2480): n is a, c, g, or t
  misc_feature (2482)..(2482): n is a, c, g, or t
  misc_feature (2484)..(2484): n is a, c, g, or t
  misc_feature (2486)..(2486): n is a, c, g, or t
  misc_feature (2488)..(2488): n is a, c, g, or t
  misc_feature (2491)..(2492): n is a, c, g, or t
  misc_feature (2494)..(2494): n is a, c, g, or t
  misc_feature (2497)..(2497): n is a, c, g, or t
  misc_feature (2503)..(2508): n is a, c, g, or t
  misc_feature (2510)..(2516): n is a, c, g, or t
  misc_feature (2519)..(2519): n is a, c, g, or t
  misc_feature (2521)..(2527): n is a, c, g, or t
  misc_feature (2531)..(2533): n is a, c, g, or t
  misc_feature (2536)..(2536): n is a, c, g, or t
  misc_feature (2538)..(2538): n is a, c, g, or t
  misc_feature (2540)..(2540): n is a, c, g, or t
  misc_feature (2545)..(2547): n is a, c, g, or t
  misc_feature (2550)..(2550): n is a, c, g, or t
  misc_feature (2552)..(2552): n is a, c, g, or t
  misc_feature (2563)..(2564): n is a, c, g, or t
  misc_feature (2567)..(2567): n is a, c, g, or t
  misc_feature (2572)..(2574): n is a, c, g, or t
  misc_feature (2576)..(2581): n is a, c, g, or t
  misc_feature (2586)..(2586): n is a, c, g, or t
  misc_feature (2589)..(2593): n is a, c, g, or t
  misc_feature (2596)..(2597): n is a, c, g, or t
  misc_feature (2599)..(2599): n is a, c, g, or t
  misc_feature (2603)..(2603): n is a, c, g, or t
  misc_feature (2606)..(2607): n is a, c, g, or t
  misc_feature (2609)..(2609): n is a, c, g, or t
  misc_feature (2611)..(2611): n is a, c, g, or t
  misc_feature (2614)..(2615): n is a, c, g, or t
  misc_feature (2618)..(2624): n is a, c, g, or t
  misc_feature (2626)..(2626): n is a, c, g, or t
  misc_feature (2628)..(2628): n is a, c, g, or t
  misc_feature (2630)..(2631): n is a, c, g, or t
  misc_feature (2635)..(2637): n is a, c, g, or t
  misc_feature (2641)..(2643): n is a, c, g, or t
  misc_feature (2650)..(2651): n is a, c, g, or t
  misc_feature (2654)..(2655): n is a, c, g, or t
  misc_feature (2657)..(2659): n is a, c, g, or t
  misc_feature (2663)..(2663): n is a, c, g, or t
  misc_feature (2665)..(2667): n is a, c, g, or t
  misc_feature (2669)..(2670): n is a, c, g, or t
  misc_feature (2672)..(2674): n is a, c, g, or t
  misc_feature (2676)..(2678): n is a, c, g, or t
  misc_feature (2681)..(2681): n is a, c, g, or t
  misc_feature (2684)..(2684): n is a, c, g, or t
  misc_feature (2687)..(2687): n is a, c, g, or t
  misc_feature (2692)..(2696): n is a, c, g, or t
  misc_feature (2698)..(2698): n is a, c, g, or t
  misc_feature (2700)..(2703): n is a, c, g, or t
  misc_feature (2706)..(2706): n is a, c, g, or t
  misc_feature (2711)..(2711): n is a, c, g, or t
  misc_feature (2715)..(2715): n is a, c, g, or t
  misc_feature (2719)..(2719): n is a, c, g, or t
  misc_feature (2721)..(2724): n is a, c, g, or t
  misc_feature (2726)..(2726): n is a, c, g, or t
  misc_feature (2729)..(2731): n is a, c, g, or t
  misc_feature (2734)..(2736): n is a, c, g, or t
  misc_feature (2738)..(2738): n is a, c, g, or t
  misc_feature (2742)..(2742): n is a, c, g, or t
  misc_feature (2745)..(2745): n is a, c, g, or t
  misc_feature (2750)..(2750): n is a, c, g, or t
  misc_feature (2754)..(2754): n is a, c, g, or t
  misc_feature (2757)..(2757): n is a, c, g, or t
  misc_feature (2762)..(2762): n is a, c, g, or t
  misc_feature (2764)..(2767): n is a, c, g, or t
  misc_feature (2769)..(2769): n is a, c, g, or t
  misc_feature (2776)..(2777): n is a, c, g, or t
  misc_feature (2779)..(2781): n is a, c, g, or t
  misc_feature (2789)..(2790): n is a, c, g, or t
  misc_feature (2792)..(2792): n is a, c, g, or t
  misc_feature (2795)..(2795): n is a, c, g, or t
  misc_feature (2797)..(2798): n is a, c, g, or t
  misc_feature (2803)..(2807): n is a, c, g, or t
  misc_feature (2809)..(2810): n is a, c, g, or t
  misc_feature (2812)..(2813): n is a, c, g, or t
  misc_feature (2815)..(2815): n is a, c, g, or t
  misc_feature (2817)..(2818): n is a, c, g, or t
  misc_feature (2820)..(2821): n is a, c, g, or t
  misc_feature (2823)..(2823): n is a, c, g, or t
  misc_feature (2829)..(2830): n is a, c, g, or t
  misc_feature (2836)..(2837): n is a, c, g, or t
  misc_feature (2844)..(2846): n is a, c, g, or t
  misc_feature (2849)..(2849): n is a, c, g, or t
  misc_feature (2852)..(2853): n is a, c, g, or t
  misc_feature (2855)..(2855): n is a, c, g, or t
  misc_feature (2858)..(2859): n is a, c, g, or t
  misc_feature (2867)..(2867): n is a, c, g, or t
  misc_feature (2870)..(2870): n is a, c, g, or t
  misc_feature (2874)..(2876): n is a, c, g, or t
  misc_feature (2883)..(2883): n is a, c, g, or t
  misc_feature (2890)..(2890): n is a, c, g, or t
  misc_feature (2892)..(2892): n is a, c, g, or t
  misc_feature (2894)..(2894): n is a, c, g, or t
  misc_feature (2898)..(2899): n is a, c, g, or t
  misc_feature (2903)..(2906): n is a, c, g, or t
  misc_feature (2908)..(2908): n is a, c, g, or t
  misc_feature (2910)..(2910): n is a, c, g, or t
  misc_feature (2913)..(2913): n is a, c, g, or t
  misc_feature (2915)..(2917): n is a, c, g, or t
  misc_feature (2921)..(2921): n is a, c, g, or t
  misc_feature (2923)..(2923): n is a, c, g, or t
  misc_feature (2925)..(2926): n is a, c, g, or t
  misc_feature (2930)..(2930): n is a, c, g, or t
  misc_feature (2932)..(2932): n is a, c, g, or t
  misc_feature (2934)..(2935): n is a, c, g, or t
  misc_feature (2937)..(2937): n is a, c, g, or t
  misc_feature (2939)..(2941): n is a, c, g, or t
  misc_feature (2943)..(2943): n is a, c, g, or t
  misc_feature (2945)..(2945): n is a, c, g, or t
  misc_feature (2949)..(2949): n is a, c, g, or t
  misc_feature (2951)..(2951): n is a, c, g, or t
  misc_feature (2958)..(2959): n is a, c, g, or t
  misc_feature (2961)..(2961): n is a, c, g, or t
  misc_feature (2973)..(2973): n is a, c, g, or t
  misc_feature (2978)..(2978): n is a, c, g, or t
  misc_feature (2982)..(2985): n is a, c, g, or t
  misc_feature (2987)..(2987): n is a, c, g, or t
  misc_feature (2989)..(2989): n is a, c, g, or t
  misc_feature (2992)..(2992): n is a, c, g, or t
  misc_feature (2994)..(2994): n is a, c, g, or t
  misc_feature (2998)..(2998): n is a, c, g, or t
  misc_feature (3000)..(3000): n is a, c, g, or t
  misc_feature (3004)..(3004): n is a, c, g, or t
  misc_feature (3007)..(3007): n is a, c, g, or t
  misc_feature (3010)..(3013): n is a, c, g, or t
  misc_feature (3016)..(3016): n is a, c, g, or t
  misc_feature (3018)..(3020): n is a, c, g, or t
  misc_feature (3023)..(3023): n is a, c, g, or t
  misc_feature (3025)..(3026): n is a, c, g, or t
  misc_feature (3034)..(3034): n is a, c, g, or t
  misc_feature (3037)..(3037): n is a, c, g, or t
  misc_feature (3042)..(3042): n is a, c, g, or t
  misc_feature (3047)..(3047): n is a, c, g, or t
  misc_feature (3049)..(3049): n is a, c, g, or t
  misc_feature (3053)..(3053): n is a, c, g, or t
  misc_feature (3056)..(3056): n is a, c, g, or t
  misc_feature (3062)..(3064): n is a, c, g, or t
  misc_feature (3066)..(3067): n is a, c, g, or t
  misc_feature (3069)..(3069): n is a, c, g, or t
  misc_feature (3076)..(3076): n is a, c, g, or t
  misc_feature (3078)..(3078): n is a, c, g, or t
  misc_feature (3081)..(3082): n is a, c, g, or t
  misc_feature (3085)..(3085): n is a, c, g, or t
  misc_feature (3088)..(3088): n is a, c, g, or t
  misc_feature (3090)..(3093): n is a, c, g, or t
  misc_feature (3096)..(3096): n is a, c, g, or t
  misc_feature (3099)..(3100): n is a, c, g, or t
  misc_feature (3102)..(3102): n is a, c, g, or t
  misc_feature (3105)..(3105): n is a, c, g, or t
  misc_feature (3107)..(3107): n is a, c, g, or t
  misc_feature (3110)..(3111): n is a, c, g, or t
  misc_feature (3114)..(3116): n is a, c, g, or t
  misc_feature (3119)..(3120): n is a, c, g, or t
  misc_feature (3125)..(3125): n is a, c, g, or t
  misc_feature (3131)..(3131): n is a, c, g, or t
  misc_feature (3135)..(3135): n is a, c, g, or t
  misc_feature (3137)..(3137): n is a, c, g, or t
  misc_feature (3141)..(3142): n is a, c, g, or t
  misc_feature (3144)..(3144): n is a, c, g, or t
  misc_feature (3147)..(3147): n is a, c, g, or t
  misc_feature (3150)..(3150): n is a, c, g, or t
  misc_feature (3154)..(3154): n is a, c, g, or t
  misc_feature (3160)..(3164): n is a, c, g, or t
  misc_feature (3166)..(3166): n is a, c, g, or t
  misc_feature (3169)..(3169): n is a, c, g, or t
  misc_feature (3177)..(3180): n is a, c, g, or t
  misc_feature (3184)..(3186): n is a, c, g, or t
  misc_feature (3189)..(3190): n is a, c, g, or t
  misc_feature (3194)..(3196): n is a, c, g, or t
  misc_feature (3201)..(3202): n is a, c, g, or t
  misc_feature (3207)..(3210): n is a, c, g, or t
  misc_feature (3212)..(3215): n is a, c, g, or t
  misc_feature (3217)..(3220): n is a, c, g, or t
  misc_feature (3224)..(3224): n is a, c, g, or t
  misc_feature (3226)..(3226): n is a, c, g, or t
  misc_feature (3230)..(3230): n is a, c, g, or t
  misc_feature (3237)..(3237): n is a, c, g, or t
  misc_feature (3244)..(3244): n is a, c, g, or t
  misc_feature (3247)..(3247): n is a, c, g, or t
  misc_feature (3250)..(3250): n is a, c, g, or t
  misc_feature (3253)..(3253): n is a, c, g, or t
  misc_feature (3255)..(3255): n is a, c, g, or t
  misc_feature (3258)..(3258): n is a, c, g, or t
  misc_feature (3260)..(3260): n is a, c, g, or t
  misc_feature (3262)..(3262): n is a, c, g, or t
  misc_feature (3270)..(3270): n is a, c, g, or t
  misc_feature (3273)..(3274): n is a, c, g, or t
  misc_feature (3276)..(3277): n is a, c, g, or t
  misc_feature (3281)..(3283): n is a, c, g, or t
  misc_feature (3286)..(3286): n is a, c, g, or t
  misc_feature (3289)..(3289): n is a, c, g, or t
  misc_feature (3292)..(3293): n is a, c, g, or t
  misc_feature (3296)..(3296): n is a, c, g, or t
  misc_feature (3299)..(3299): n is a, c, g, or t
  misc_feature (3301)..(3302): n is a, c, g, or t
  misc_feature (3304)..(3304): n is a, c, g, or t
  misc_feature (3306)..(3306): n is a, c, g, or t
  misc_feature (3308)..(3309): n is a, c, g, or t
  misc_feature (3314)..(3317): n is a, c, g, or t
  misc_feature (3322)..(3322): n is a, c, g, or t
  misc_feature (3327)..(3327): n is a, c, g, or t
  misc_feature (3332)..(3333): n is a, c, g, or t
  misc_feature (3337)..(3339): n is a, c, g, or t
  misc_feature (3342)..(3345): n is a, c, g, or t
  misc_feature (3348)..(3348): n is a, c, g, or t
  misc_feature (3350)..(3351): n is a, c, g, or t
  misc_feature (3354)..(3354): n is a, c, g, or t
  misc_feature (3359)..(3359): n is a, c, g, or t
  misc_feature (3361)..(3362): n is a, c, g, or t
  misc_feature (3364)..(3364): n is a, c, g, or t
  misc_feature (3367)..(3367): n is a, c, g, or t
  misc_feature (3370)..(3370): n is a, c, g, or t
  misc_feature (3373)..(3373): n is a, c, g, or t
  misc_feature (3381)..(3381): n is a, c, g, or t
  misc_feature (3387)..(3387): n is a, c, g, or t
  misc_feature (3390)..(3391): n is a, c, g, or t
  misc_feature (3393)..(3393): n is a, c, g, or t
  misc_feature (3395)..(3395): n is a, c, g, or t
  misc_feature (3397)..(3398): n is a, c, g, or t
  misc_feature (3404)..(3404): n is a, c, g, or t
  misc_feature (3406)..(3407): n is a, c, g, or t
  misc_feature (3409)..(3409): n is a, c, g, or t
  misc_feature (3416)..(3416): n is a, c, g, or t
  misc_feature (3418)..(3418): n is a, c, g, or t
  misc_feature (3421)..(3421): n is a, c, g, or t
  misc_feature (3424)..(3424): n is a, c, g, or t
  misc_feature (3427)..(3434): n is a, c, g, or t
  misc_feature (3437)..(3437): n is a, c, g, or t
  misc_feature (3449)..(3452): n is a, c, g, or t
  misc_feature (3455)..(3455): n is a, c, g, or t
  misc_feature (3458)..(3458): n is a, c, g, or t
  misc_feature (3460)..(3461): n is a, c, g, or t
  misc_feature (3466)..(3466): n is a, c, g, or t
  misc_feature (3474)..(3474): n is a, c, g, or t
  misc_feature (3483)..(3483): n is a, c, g, or t
  misc_feature (3493)..(3493): n is a, c, g, or t
  misc_feature (3499)..(3499): n is a, c, g, or t
  misc_feature (3515)..(3515): n is a, c, g, or t
  misc_feature (3522)..(3522): n is a, c, g, or t
  misc_feature (3528)..(3529): n is a, c, g, or t
  misc_feature (3533)..(3534): n is a, c, g, or t
  misc_feature (3536)..(3536): n is a, c, g, or t
  misc_feature (3540)..(3540): n is a, c, g, or t
  misc_feature (3545)..(3545): n is a, c, g, or t
  misc_feature (3549)..(3549): n is a, c, g, or t
  misc_feature (3552)..(3552): n is a, c, g, or t
  misc_feature (3555)..(3555): n is a, c, g, or t
  misc_feature (3567)..(3567): n is a, c, g, or t
  misc_feature (3572)..(3572): n is a, c, g, or t
  misc_feature (3580)..(3581): n is a, c, g, or t
  misc_feature (3584)..(3584): n is a, c, g, or t
  misc_feature (3586)..(3586): n is a, c, g, or t
  misc_feature (3590)..(3590): n is a, c, g, or t
  misc_feature (3592)..(3592): n is a, c, g, or t
  misc_feature (3598)..(3598): n is a, c, g, or t
  misc_feature (3603)..(3603): n is a, c, g, or t
  misc_feature (3606)..(3606): n is a, c, g, or t
  misc_feature (3608)..(3608): n is a, c, g, or t
  misc_feature (3610)..(3610): n is a, c, g, or t
  misc_feature (3616)..(3616): n is a, c, g, or t
  misc_feature (3618)..(3618): n is a, c, g, or t
  misc_feature (3629)..(3632): n is a, c, g, or t
  misc_feature (3639)..(3639): n is a, c, g, or t
  misc_feature (3646)..(3646): n is a, c, g, or t
  misc_feature (3651)..(3651): n is a, c, g, or t
  misc_feature (3656)..(3656): n is a, c, g, or t
  misc_feature (3660)..(3661): n is a, c, g, or t
  misc_feature (3675)..(3675): n is a, c, g, or t
  misc_feature (3678)..(3678): n is a, c, g, or t
  misc_feature (3684)..(3684): n is a, c, g, or t
  misc_feature (3686)..(3687): n is a, c, g, or t
  misc_feature (3692)..(3692): n is a, c, g, or t
  misc_feature (3696)..(3696): n is a, c, g, or t
  misc_feature (3698)..(3698): n is a, c, g, or t
  misc_feature (3703)..(3703): n is a, c, g, or t
  misc_feature (3707)..(3707): n is a, c, g, or t
  misc_feature (3715)..(3715): n is a, c, g, or t
  misc_feature (3720)..(3721): n is a, c, g, or t
  misc_feature (3723)..(3723): n is a, c, g, or t
  misc_feature (3730)..(3730): n is a, c, g, or t
  misc_feature (3740)..(3741): n is a, c, g, or t
  misc_feature (3748)..(3749): n is a, c, g, or t
  misc_feature (3761)..(3761): n is a, c, g, or t
  misc_feature (3768)..(3768): n is a, c, g, or t
  misc_feature (3773)..(3773): n is a, c, g, or t
  misc_feature (3775)..(3775): n is a, c, g, or t
  misc_feature (3785)..(3785): n is a, c, g, or t
  misc_feature (3789)..(3789): n is a, c, g, or t
  misc_feature (3793)..(3793): n is a, c, g, or t
  misc_feature (3797)..(3798): n is a, c, g, or t
  misc_feature (3800)..(3800): n is a, c, g, or t
  misc_feature (3806)..(3806): n is a, c, g, or t
  misc_feature (3808)..(3809): n is a, c, g, or t
  misc_feature (3813)..(3814): n is a, c, g, or t
  misc_feature (3816)..(3818): n is a, c, g, or t
  misc_feature (3823)..(3823): n is a, c, g, or t
  misc_feature (3825)..(3826): n is a, c, g, or t
  misc_feature (3833)..(3833): n is a, c, g, or t
  misc_feature (3837)..(3837): n is a, c, g, or t
  misc_feature (3840)..(3841): n is a, c, g, or t
  misc_feature (3858)..(3858): n is a, c, g, or t
  misc_feature (3861)..(3863): n is a, c, g, or t
  misc_feature (3870)..(3870): n is a, c, g, or t
  misc_feature (3873)..(3874): n is a, c, g, or t
  misc_feature (3879)..(3879): n is a, c, g, or t
  misc_feature (3883)..(3883): n is a, c, g, or t
  misc_feature (3889)..(3891): n is a, c, g, or t
  misc_feature (3895)..(3895): n is a, c, g, or t
  misc_feature (3902)..(3902): n is a, c, g, or t
  misc_feature (3905)..(3907): n is a, c, g, or t
  misc_feature (3910)..(3910): n is a, c, g, or t
  misc_feature (3912)..(3912): n is a, c, g, or t
  misc_feature (3917)..(3917): n is a, c, g, or t
  misc_feature (3931)..(3931): n is a, c, g, or t
  misc_feature (3933)..(3933): n is a, c, g, or t
  misc_feature (3938)..(3938): n is a, c, g, or t
  misc_feature (3941)..(3941): n is a, c, g, or t
  misc_feature (3943)..(3943): n is a, c, g, or t
  misc_feature (3945)..(3946): n is a, c, g, or t
  misc_feature (3951)..(3953): n is a, c, g, or t
  misc_feature (3955)..(3956): n is a, c, g, or t
  misc_feature (3960)..(3961): n is a, c, g, or t
  misc_feature (3963)..(3963): n is a, c, g, or t
  misc_feature (3968)..(3969): n is a, c, g, or t
  misc_feature (3972)..(3972): n is a, c, g, or t
  misc_feature (3974)..(3974): n is a, c, g, or t
  misc_feature (3976)..(3976): n is a, c, g, or t
  misc_feature (3979)..(3980): n is a, c, g, or t
  misc_feature (3982)..(3983): n is a, c, g, or t
  misc_feature (3986)..(3988): n is a, c, g, or t
  misc_feature (3991)..(3991): n is a, c, g, or t
  misc_feature (3997)..(3998): n is a, c, g, or t
gtaagaaagaggtgaaaatatcgcaagtgaaccaccgctttgtaacttgctacagagactttttatccaaaaatggggctacggaaaatacgatcggatactatttaaggaacttcagggcattgtataatctcgcggtaaaggacggcttggttcctccatgcgattatccgttcaaggaaatatgtaccaagccctgtaaaacagtaaaacgtgcattagatcgggaacagatggttaaattggcttgtctgtcattgcattccgatgcagagttaaaacgttcattggatctttttctttttggtttctatgcccagggaatggcttttgttgacattgcatatctgaagtggaaaaatataagtggtaatcggattatctatagaagacataaatcaaaacaattgatacaaatagtcattacaccccagatcaaatccattatagacgagcatgggaataatacgaacaatgcagaagagtatgtattctcggttatcaaaaataatgcaaatgaatatactcagtatcgtacagctttaggacgtaccaacaggcacttaaaaataatctctgcgaaactgaagattgatcctccgttgactacgtacaccgcgcgccatacatgggcaacactggccagagaatacggggccccggtttcggcaatcagtgcgggattagggcataccaaagaagaaatgacacttgtctatcttaaggaattggatttggctcctcttcaccggatcaataagatggtaaataatcttctggagagaaaatgagttcctctgtatttctctattctataatagagattaatacttcatatttttcatcaatctatctttctcgctacaaaagtacgacattgtcagtttgccattattgccaaaaagaacaataattttgatatttcgtacaaaacttcacaaagtagttaaaaactactgatttacaacctgatatttcataatcaactcccgtggtgtgcaattaaaatgctgcttgcaatagtgggtgaaatgagcttgtgactcaaatctaaactcctccatcaactctccgactgtagtctctgaggtcatcactttatttaatatatgtgtgttccgttgtttcagcaaccattgcttggccgtcattccgaatacttctttaaatttacagtaaaagctgcttttacacatattggagagggagatgagatcatttacattgcttactttaaaataattgccaatgacaaaatctttgaaagttaattctgctgagatgatcgggtggaacaataaggctaattcttctttcagataaaaaccccggagtaaaaaaaataattcctgttgcaacaaagtgtgaaaatgtccgcaatccatcttattggtcaggcaatacgtaacaatctccaaataaggaggaaggggataacggatagcgagtgactggaaattataatccagtttcctgcatagtcctgttaacgattgtaatatgaacttatcacatacgtttaagggaacatcaaaggataaggagagtaaccgggtaccggctatgactttaatttcaaccatagccgttttggggagtagcaccatacagttagcctgaaacaaacgttctctaaactgattacaattgatganacattctccttcgagaacaaataaaagatagttccatgaaatttctttttccagaataacttcttcatgtgagaattcaatatatttgaatccgttttctaccttttccaggtaatttctgcatgaacgatgctcttgtatatagagcaaattgttaagtgaagatttcttattcatatcatattgagtttggtggcttattcattttacttcagtattatttcagcatcttgttctgatagcttttcgtattgtactaaaatactgtgaattaaaccttagcttattatattaattgttcttttcataaggtattatgtcggttgtgtgatactaatttnttgataactaganttttatgatttgcttactctcctttcaatctctattatagaatagagatgcagtaaaaaacaatatttaagcttgaaacaaataaacattatcaattttattcattaaaaaaatcacagaatgaaagttaaaaaaatcttattatcaatgtgtgcgatagcggcattggcaagttgttcgcagaatgatgacgtggntnntnctnnggnnngngntnaagnngcaagggtnnncnttnnnntngaggganncgntgtnnnnacaagagcnnnngnnnnagntnntgnagangntnnnaannttanngannttnnnntnntctnttntnntncnncnnnnntnantnngngtnctnncnnatananngnnntcgngncnganatnncnnnancnatnacnacnnntncnnatnnntnnnnantggttgnaanagnnaannnngggnntgannnnacnnctnnagntaannantnancngntgnnancantattgnnnnnntnnnnnnnaangnnnnnnnttcnnntantncnaccannnatncnacaaccaaacnnacnattannnannnnnnggatngtnnnnntannantggnatnngnanagnnacnnnnnnntnanannggcnnnctgnnnctgcaanngtnnannngcantnnntnncnnntnnnatnaanaangtagnnnnntnannnnaanctganaatncaancnnnnantannnaannntntctnttnttaanacanatnagtcnannnngnttgccannannnaagtctanntnatnanntctcnnnnnanntnncntnntnnanctgcanntgccgnnatcgttnnngcnggnncngtnncatgggcnggngcgnnngctccanctacggntntngcgnntgcnnnngncntgncnnngggnantnntccntngnnancnnntncnacancnactcctnntnaaacagatactnacttngtannnncngntcngnctgntngttntgncgnnnntcnannngcnanngtcattgntgntaatncttgntntttnttngaaaannntnntncttctgntnaanngantgngnnnntanttnnantantntgnngannnaannacaangcagantacnanagtnntnatnttntaancaaatnnnnnanaanctattttnnnnaaannnaannaggnnnatctnnagctnnnnannnntnnnntgancntggnaaaactnatgatancanttnaantntgnangntgattttnaanngnncggnnntgntgncgnnggnagngnngntncnnctaannnnagtgnagatncaaannttannnttnnnntanannctncaaantnnanaangantgntgaaattncaaaanagnntnantnncttcananntngcttttncnttnaanatnnnnnnnnaanattcaataaaannnntangtncnngattntaaatctncattcgggngcacttccgnttttantcggtaacaagaaagnatatctnttatgnngatnngnaacnttaanttcnggnttnaaccggggatantatcntttatgtnngtncngctncngttgtngggangcntngntgagantnatgacgattgnnnnagaggtnttcctcntcaantgaanttannggcaggtattttanccnaaacantnnaaganatananatctntgtntttgatgntagcnncngcttgcnggacatactnncaatacnnagtttagagccngtcattntaagntntccgggcatncccngccntcanngnattgcntnnggcnncnnncaggntnntacaatntatntcnntcccctaaaaacgggcnatnnnctctctnccnntttcntttntttgannncctntgccgtnacnnnggnanagaanagcattttcatctntnccacngantnannctatnnngnncttnntntagannatncntnganntnnaannncantgaggnnaa

SEQ ID NO: 612 - DNA, 4000 bp, Escherichia coli
  misc_feature (1)..(1): n is a, c, g, or t
  misc_feature (3)..(8): n is a, c, g, or t
  misc_feature (12)..(18): n is a, c, g, or t
  misc_feature (20)..(21): n is a, c, g, or t
  misc_feature (23)..(27): n is a, c, g, or t
  misc_feature (30)..(36): n is a, c, g, or t
  misc_feature (38)..(38): n is a, c, g, or t
  misc_feature (40)..(60): n is a, c, g, or t
  misc_feature (62)..(70): n is a, c, g, or t
  misc_feature (72)..(75): n is a, c, g, or t
  misc_feature (77)..(78): n is a, c, g, or t
  misc_feature (80)..(86): n is a, c, g, or t
  misc_feature (88)..(93): n is a, c, g, or t
  misc_feature (95)..(95): n is a, c, g, or t
  misc_feature (98)..(105): n is a, c, g, or t
  misc_feature (107)..(111): n is a, c, g, or t
  misc_feature (113)..(117): n is a, c, g, or t
  misc_feature (119)..(119): n is a, c, g, or t
  misc_feature (122)..(123): n is a, c, g, or t
  misc_feature (126)..(130): n is a, c, g, or t
  misc_feature (134)..(136): n is a, c, g, or t
  misc_feature (138)..(139): n is a, c, g, or t
  misc_feature (141)..(143): n is a, c, g, or t
  misc_feature (147)..(158): n is a, c, g, or t
  misc_feature (160)..(162): n is a, c, g, or t
  misc_feature (164)..(170): n is a, c, g, or t
  misc_feature (172)..(179): n is a, c, g, or t
  misc_feature (182)..(182): n is a, c, g, or t
  misc_feature (184)..(186): n is a, c, g, or t
  misc_feature (188)..(188): n is a, c, g, or t
  misc_feature (192)..(193): n is a, c, g, or t
  misc_feature (195)..(197): n is a, c, g, or t
  misc_feature (199)..(199): n is a, c, g, or t
  misc_feature (202)..(213): n is a, c, g, or t
  misc_feature (215)..(216): n is a, c, g, or t
  misc_feature (218)..(222): n is a, c, g, or t
  misc_feature (224)..(231): n is a, c, g, or t
  misc_feature (233)..(238): n is a, c, g, or t
  misc_feature (241)..(241): n is a, c, g, or t
  misc_feature (243)..(249): n is a, c, g, or t
  misc_feature (251)..(251): n is a, c, g, or t
  misc_feature (255)..(257): n is a, c, g, or t
  misc_feature (260)..(262): n is a, c, g, or t
  misc_feature (266)..(270): n is a, c, g, or t
  misc_feature (272)..(279): n is a, c, g, or t
  misc_feature (281)..(285): n is a, c, g, or t
  misc_feature (287)..(288): n is a, c, g, or t
  misc_feature (291)..(294): n is a, c, g, or t
  misc_feature (296)..(317): n is a, c, g, or t
  misc_feature (320)..(324): n is a, c, g, or t
  misc_feature (326)..(333): n is a, c, g, or t
  misc_feature (335)..(337): n is a, c, g, or t
  misc_feature (339)..(339): n is a, c, g, or t
  misc_feature (342)..(345): n is a, c, g, or t
  misc_feature (347)..(365): n is a, c, g, or t
  misc_feature (367)..(369): n is a, c, g, or t
  misc_feature (371)..(382): n is a, c, g, or t
  misc_feature (384)..(384): n is a, c, g, or t
  misc_feature (387)..(394): n is a, c, g, or t
  misc_feature (396)..(403): n is a, c, g, or t
  misc_feature (405)..(409): n is a, c, g, or t
  misc_feature (412)..(417): n is a, c, g, or t
  misc_feature (421)..(425): n is a, c, g, or t
  misc_feature (429)..(429): n is a, c, g, or t
  misc_feature (431)..(431): n is a, c, g, or t
  misc_feature (435)..(437): n is a, c, g, or t
  misc_feature (439)..(444): n is a, c, g, or t
  misc_feature (447)..(447): n is a, c, g, or t
  misc_feature (450)..(450): n is a, c, g, or t
  misc_feature (452)..(453): n is a, c, g, or t
  misc_feature (455)..(455): n is a, c, g, or t
  misc_feature (460)..(462): n is a, c, g, or t
  misc_feature (466)..(466): n is a, c, g, or t
  misc_feature (469)..(469): n is a, c, g, or t
  misc_feature (471)..(472): n is a, c, g, or t
  misc_feature (478)..(478): n is a, c, g, or t
  misc_feature (485)..(486): n is a, c, g, or t
  misc_feature (488)..(489): n is a, c, g, or t
  misc_feature (492)..(492): n is a, c, g, or t
  misc_feature (495)..(497): n is a, c, g, or t
  misc_feature (499)..(503): n is a, c, g, or t
  misc_feature (506)..(506): n is a, c, g, or t
  misc_feature (509)..(510): n is a, c, g, or t
  misc_feature (513)..(518): n is a, c, g, or t
  misc_feature (520)..(520): n is a, c, g, or t
  misc_feature (523)..(525): n is a, c, g, or t
  misc_feature (530)..(534): n is a, c, g, or t
  misc_feature (537)..(537): n is a, c, g, or t
  misc_feature (539)..(541): n is a, c, g, or t
  misc_feature (543)..(546): n is a, c, g, or t
  misc_feature (548)..(549): n is a, c, g, or t
  misc_feature (552)..(552): n is a, c, g, or t
  misc_feature (555)..(555): n is a, c, g, or t
  misc_feature (557)..(558): n is a, c, g, or t
  misc_feature (560)..(565): n is a, c, g, or t
  misc_feature (568)..(572): n is a, c, g, or t
  misc_feature (578)..(579): n is a, c, g, or t
  misc_feature (581)..(581): n is a, c, g, or t
  misc_feature (585)..(591): n is a, c, g, or t
  misc_feature (594)..(595): n is a, c, g, or t
  misc_feature (597)..(598): n is a, c, g, or t
  misc_feature (600)..(601): n is a, c, g, or t
  misc_feature (605)..(608): n is a, c, g, or t
  misc_feature (610)..(610): n is a, c, g, or t
  misc_feature (612)..(614): n is a, c, g, or t
  misc_feature (617)..(617): n is a, c, g, or t
  misc_feature (619)..(622): n is a, c, g, or t
  misc_feature (624)..(628): n is a, c, g, or t
  misc_feature (630)..(633): n is a, c, g, or t
  misc_feature (635)..(636): n is a, c, g, or t
  misc_feature (640)..(643): n is a, c, g, or t
  misc_feature (645)..(649): n is a, c, g, or t
  misc_feature (655)..(655): n is a, c, g, or t
  misc_feature (659)..(668): n is a, c, g, or t
  misc_feature (670)..(670): n is a, c, g, or t
  misc_feature (672)..(676): n is a, c, g, or t
  misc_feature (678)..(681): n is a, c, g, or t
  misc_feature (683)..(684): n is a, c, g, or t
  misc_feature (686)..(688): n is a, c, g, or t
  misc_feature (690)..(696): n is a, c, g, or t
  misc_feature (702)..(702): n is a, c, g, or t
  misc_feature (704)..(705): n is a, c, g, or t
  misc_feature (707)..(710): n is a, c, g, or t
  misc_feature (713)..(718): n is a, c, g, or t
  misc_feature (721)..(723): n is a, c, g, or t
  misc_feature (726)..(726): n is a, c, g, or t
  misc_feature (728)..(729): n is a, c, g, or t
  misc_feature (731)..(732): n is a, c, g, or t
  misc_feature (734)..(734): n is a, c, g, or t
  misc_feature (740)..(740): n is a, c, g, or t
  misc_feature (754)..(755): n is a, c, g, or t
  misc_feature (761)..(761): n is a, c, g, or t
  misc_feature (766)..(766): n is a, c, g, or t
  misc_feature (769)..(771): n is a, c, g, or t
  misc_feature (773)..(773): n is a, c, g, or t
  misc_feature (775)..(775): n is a, c, g, or t
  misc_feature (777)..(777): n is a, c, g, or t
  misc_feature (781)..(783): n is a, c, g, or t
  misc_feature (786)..(786): n is a, c, g, or t
  misc_feature (788)..(788): n is a, c, g, or t
  misc_feature (795)..(796): n is a, c, g, or t
  misc_feature (799)..(802): n is a, c, g, or t
  misc_feature (804)..(805): n is a, c, g, or t
  misc_feature (807)..(812): n is a, c, g, or t
  misc_feature (815)..(817): n is a, c, g, or t
  misc_feature (819)..(829): n is a, c, g, or t
  misc_feature (838)..(838): n is a, c, g, or t
  misc_feature (840)..(840): n is a, c, g, or t
  misc_feature (842)..(843): n is a, c, g, or t
  misc_feature (845)..(846): n is a, c, g, or t
  misc_feature (848)..(849): n is a, c, g, or t
  misc_feature (852)..(854): n is a, c, g, or t
  misc_feature (857)..(858): n is a, c, g, or t
  misc_feature (860)..(864): n is a, c, g, or t
  misc_feature (866)..(867): n is a, c, g, or t
  misc_feature (870)..(871): n is a, c, g, or t
  misc_feature (873)..(876): n is a, c, g, or t
  misc_feature (880)..(880): n is a, c, g, or t
  misc_feature (882)..(882): n is a, c, g, or t
  misc_feature (884)..(889): n is a, c, g, or t
  misc_feature (895)..(895): n is a, c, g, or t
  misc_feature (899)..(899): n is a, c, g, or t
  misc_feature (902)..(906): n is a, c, g, or t
  misc_feature (909)..(909): n is a, c, g, or t
  misc_feature (911)..(912): n is a, c, g, or t
  misc_feature (914)..(917): n is a, c, g, or t
  misc_feature (919)..(934): n is a, c, g, or t
  misc_feature (936)..(936): n is a, c, g, or t
  misc_feature (938)..(940): n is a, c, g, or t
  misc_feature (944)..(945): n is a, c, g, or t
  misc_feature (947)..(949): n is a, c, g, or t
  misc_feature (951)..(951): n is a, c, g, or t
  misc_feature (953)..(953): n is a, c, g, or t
  misc_feature (955)..(956): n is a, c, g, or t
  misc_feature (958)..(959): n is a, c, g, or t
  misc_feature (961)..(962): n is a, c, g, or t
  misc_feature (964)..(965): n is a, c, g, or t
  misc_feature (970)..(971): n is a, c, g, or t
  misc_feature (973)..(979): n is a, c, g, or t
  misc_feature (983)..(983): n is a, c, g, or t
  misc_feature (985)..(985): n is a, c, g, or t
  misc_feature (987)..(990): n is a, c, g, or t
  misc_feature (992)..(992): n is a, c, g, or t
  misc_feature (994)..(994): n is a, c, g, or t
  misc_feature (996)..(997): n is a, c, g, or t
  misc_feature (999)..(999): n is a, c, g, or t
  misc_feature (1001)..(1002): n is a, c, g, or t
  misc_feature (1004)..(1007): n is a, c, g, or t
  misc_feature (1009)..(1010): n is a, c, g, or t
  misc_feature (1013)..(1014): n is a, c, g, or t
  misc_feature (1016)..(1017): n is a, c, g, or t
  misc_feature (1019)..(1023): n is a, c, g, or t
  misc_feature (1027)..(1031): n is a, c, g, or t
  misc_feature (1033)..(1034): n is a, c, g, or t
  misc_feature (1039)..(1039): n is a, c, g, or t
  misc_feature (1045)..(1047): n is a, c, g, or t
  misc_feature (1049)..(1050): n is a, c, g, or t
  misc_feature (1052)..(1052): n is a, c, g, or t
  misc_feature (1055)..(1055): n is a, c, g, or t
  misc_feature (1057)..(1057): n is a, c, g, or t
  misc_feature (1059)..(1059): n is a, c, g, or t
  misc_feature (1061)..(1061): n is a, c, g, or t
  misc_feature (1063)..(1066): n is a, c, g, or t
  misc_feature (1068)..(1072): n is a, c, g, or t
  misc_feature (1074)..(1076): n is a, c, g, or t
  misc_feature (1078)..(1080): n is a, c, g, or t
  misc_feature (1082)..(1084): n is a, c, g, or t
  misc_feature (1086)..(1086): n is a, c, g, or t
  misc_feature (1088)..(1088): n is a, c, g, or t
  misc_feature (1094)..(1096): n is a, c, g, or t
  misc_feature (1101)..(1102): n is a, c, g, or t
  misc_feature (1106)..(1106): n is a, c, g, or t
  misc_feature (1121)..(1121): n is a, c, g, or t
  misc_feature (1180)..(1180): n is a, c, g, or t
  misc_feature (1185)..(1185): n is a, c, g, or t
  misc_feature (1203)..(1204): n is a, c, g, or t
  misc_feature (1978)..(1978): n is a, c, g, or t
  misc_feature (3890)..(3890): n is a, c, g, or t
  misc_feature (3893)..(3894): n is a, c, g, or t
  misc_feature (3905)..(3906): n is a, c, g, or t
  misc_feature (3909)..(3910): n is a, c, g, or t
  misc_feature (3913)..(3913): n is a, c, g, or t
  misc_feature (3917)..(3918): n is a, c, g, or t
  misc_feature (3921)..(3923): n is a, c, g, or t
  misc_feature (3925)..(3931): n is a, c, g, or t
  misc_feature (3933)..(3934): n is a, c, g, or t
  misc_feature (3936)..(3936): n is a, c, g, or t
  misc_feature (3938)..(3938): n is a, c, g, or t
  misc_feature (3940)..(3944): n is a, c, g, or t
  misc_feature (3947)..(3948): n is a, c, g, or t
  misc_feature (3950)..(3952): n is a, c, g, or t
  misc_feature (3956)..(3959): n is a, c, g, or t
  misc_feature (3963)..(3963): n is a, c, g, or t
  misc_feature (3967)..(3968): n is a, c, g, or t
  misc_feature (3970)..(3973): n is a, c, g, or t
  misc_feature (3976)..(3976): n is a, c, g, or t
  misc_feature (3979)..(3983): n is a, c, g, or t
  misc_feature (3986)..(3989): n is a, c, g, or t
  misc_feature (3991)..(3991): n is a, c, g, or t
  misc_feature (3993)..(3993): n is a, c, g, or t
  misc_feature (3995)..(3995): n is a, c, g, or t
  misc_feature (3997)..(3998): n is a, c, g, or t
ngnnnnnnccgnnnnnnncnncnnnnngcnnnnnnngncnnnnnnnnnnnnnnnnnnnnncnnnnnnnnncnnnncnngnnnnnnngnnnnnngnggnnnnnnnngnnnnngnnnnngncgnngannnnntcgnnnanngnnncggnnnnnnnnnnnncnnngnnnnnnncnnnnnnnntcnannnanctcnnannngntcnnnnnnnnnnnntnngnnnnncnnnnnnnncnnnnnngcncnnnnnnncncgcnnncgnnngcgnnnnngnnnnnnnngnnnnngnncgnnnncnnnnnnnnnnnnnnnnnnnnnntcnnnnngnnnnnnnngnnncncgnnnngnnnnnnnnnnnnnnnnnnncnnngnnnnnnnnnnnngnacnnnnnnnngnnnnnnnnannnnncgnnnnnncgcnnnnnaggngncgcnnntnnnnnnggnggngnntncgcgnnngcgnggngnngccgcngccgcgnngnnccnccnnncnnnnngcnccnnggnnnnnngngcnnngcgcnnnnngcncnnngnnnngnngcnggngnngnnnnnnctnnnnnagatgnngngcgnnnnnnncgnngnngnngcgnnnntntnnncgncnnnntnnnnnannnngnntttnnnntnnnnnaaaaangccnnnnnnnnnnanannnnngnnnngnngnnngnnnnnnnagaagncnnannnnacnnnnnnggnnncgngnncnngncccggncgtgcgcgcgcgcnncggtgnccgtntcnnngntncncttnnngtngngcgcctnntcnnnnanntnnnnnncgnnncnnnnnnnnnnncgcgggggntntnncnngnnggnnntcnncnnnnngnnttnnannnngcgntngnnnnnncggggngcgncgnnnnngcngnngnnnncnnnnnnnnnnnnnnnntngnnntcgnngnnngncncnncnncnncnncgcgnncnnnnnnncccncncnnnncncnanngngnncnnnncnnggnncnngnnnnngagnnnnngnnggggngggggnnngnngngtntngntntnnnncnnnnncnnngnnncnnntngngttttnnntgatnntttnacgaaatgcttttcngatccgacgaaaacgccgagacgcacacgagtgttgttacctttccctcggactctacncgcgnccgcgcgcgtcgcgcgtnngggggtcgcgctcgcgatggggacgtccggggaggtgccctcatcagcgacatctccacagcaccgacggaggttccttctggaggcgcgcgacctcgagccgagctgggagcgcacgctcatcgcgctgttgctcgggctcgaccttttcgaagatgcggccgacgcgaacgacgtcgtggacacggggtccgtccccgacgtcccgccgccgccggccggccacgcgcgcgtgtggaaactgaaggactccaaatcggctgcggtggagtgcgcttccatgcgtgatttcctcggcgctttgcttgtcgacgggctcgaggtgccgtgcacccatggatacaaacatcgccgggtgacgcctctgggaaacgcgagagctgaaacgtttcccctccacacgttgagcccttctctggaaacgcagctcgcgccgttacccacgcccgagctcgaacggcgactcgccgcggcgtcgtgcgatactcgtaccctcacagaggatgacgcgcgagacgcgaaacgcgcgaagattggcggtgacgccggaccgaaaacaagccttttcccggcgaaaagagaaccgccgagatgcaaaatcacgcgccacctgcggctctgtcgacagctcgcttcgtcgatgaacggcgaacgaccgacgcgatcgatcgacggtcggcgtttggacgttcaaggcgagagtcatcacgcgtcgaggttactcgacgcgcttcgcgcgttcgacggttggcccgaagactcgaaaaaacgcanaggcgtcggcgccgccgcgtacgccgtcctcaaaaggaaggacgtcgacaaaatgatcgcgctcgaaaaccacgcggggacgagcgaacacggcagtcatttaaaaaaagtcgtcgagttgtggcgcctcgcgcaggcgaccctgaacgtcgcgtgtcgttcgacgacgggagacgaaccccccgctttcgacgccgtggcgctcacgcgagcgtttcgcgggtccccgcacgtagacgccagggacacgtcgcatcagtacgtgttggcgctcggggactttcctctttctgaaggtgcgttgtgcgtcgaggaagtcgccgaagaagtcgcggaagttgcccgtcccggggacgctcgcgacaccggggatgccggggacggggattccggcggggaccgcgccgcgcggggacgacgcgacggggaaaagaaagacgcggcggcgaaacgattcgtccccaccggccgggtccttcgcgtgaacgtgaaaaacagagtcgcgaggatcgacggtcgtaacgtgcactgggtcgagggttggagcggtgagcggttcagcgtggtgttcttctgcacgaaaaaagaaaacgccgcggagatgcaggcgacggcaacgcacgaggactggatggtcgcgaagtgcgaagaaaatcttccaggccactgagtgataatattcgtcgcggagcggagagtcgctgcagaccgagaactgagttgaaagacaagctttcccttcccgtccccgcccttccgcgcctcactcgagcccgagcccgccgacgtcagcgcaggcggttgggtcgcgccggggatgagcgcgcccggttcggggggctcaaattttctttccggtgcgtgcacgcgcgcgcagtgcacgacgaagcttcgcccggacgtcggatccggtcgaacctcgatcgcgatcgaacccgaacgtcccgcgtcccgcggtgagaaccgcgaagggctcgaacgcccggctgaccaccccgagccccgtcgcgcccgtcctcttttcagactggaagaacttctcccagaaggcgacgcaggacctgcccgacatggacggcctggcgagcttcgcgaagaccgcggggacgtccctgagcgattcgttcaagcaggccaccaaggacatcgacgtgcagggcatgcaagccaacctgagctccatggcgtctagcacgtcccacgagctcatcaatttcgggaaggagctctcgcgggacgcgggcgaggcgtccagctacgtcgctgcgggtgccggccaggcgggcgcgtacgcggcgtccgccacgagggagatcggccagagcatgaagagcctctctccggatcgcgtcgcgacgtttttcgcgctcggcgccgcgtccagcgtcatgtactcgctcgcgttcttctacgtgcccgtcttggtgctcttccccgcgaagttcgcggtgtgcttctccgtggcgagcgcgtgctcggtgtgcgccgtgggcgcgctcaggggcgcgcaggcgcaggcggcgcacatggtcgcgccggagcggctggtgctgagcctcgcctacgtgggcgcgctgctcgggacgctgtactgctcgctggtcctgcacagctacgtgctgaccatcctgtcgtccgtcgcgcaggcggccgcgctgctgtactaccaggtgagctacttcccgtacggcgcgcaggggctgaagaccgtgctcaccatgggcgtgcacatcgccaagcccctggtgttcgcgtgcggccgatcgctcggactcgtcaagcccaagtcgtacctgccgctctagcgccgccgagggaaagaaacgcgcgcgacgcacagtaggacgtttagaacgcgcgagcggcgtgctttgtcatcggaggaaaacacacatagcagaacccatcactntannctatactgtanntanntanttanntannnannnnnnnanntntntnnnnnganncnnngccnnnnctcncgcnncnnnnccncgnnnnngcnnnntngncntnncg

SEQ ID NO: 613 - DNA, 4000 bp, Escherichia coli
  misc_feature (474)..(474): n is a, c, g, or t
  misc_feature (762)..(762): n is a, c, g, or t
  misc_feature (776)..(776): n is a, c, g, or t
  misc_feature (778)..(784): n is a, c, g, or t
  misc_feature (786)..(786): n is a, c, g, or t
  misc_feature (788)..(788): n is a, c, g, or t
  misc_feature (790)..(794): n is a, c, g, or t
  misc_feature (796)..(798): n is a, c, g, or t
  misc_feature (800)..(801): n is a, c, g, or t
  misc_feature (803)..(804): n is a, c, g, or t
  misc_feature (806)..(808): n is a, c, g, or t
  misc_feature (810)..(812): n is a, c, g, or t
  misc_feature (815)..(815): n is a, c, g, or t
  misc_feature (819)..(820): n is a, c, g, or t
  misc_feature (822)..(822): n is a, c, g, or t
  misc_feature (824)..(824): n is a, c, g, or t
  misc_feature (826)..(826): n is a, c, g, or t
  misc_feature (828)..(828): n is a, c, g, or t
  misc_feature (830)..(831): n is a, c, g, or t
  misc_feature (833)..(834): n is a, c, g, or t
  misc_feature (836)..(851): n is a, c, g, or t
  misc_feature (853)..(862): n is a, c, g, or t
  misc_feature (864)..(864): n is a, c, g, or t
  misc_feature (868)..(870): n is a, c, g, or t
  misc_feature (872)..(873): n is a, c, g, or t
  misc_feature (878)..(878): n is a, c, g, or t
  misc_feature (880)..(886): n is a, c, g, or t
  misc_feature (888)..(888): n is a, c, g, or t
  misc_feature (890)..(891): n is a, c, g, or t
  misc_feature (894)..(904): n is a, c, g, or t
  misc_feature (906)..(906): n is a, c, g, or t
  misc_feature (908)..(914): n is a, c, g, or t
  misc_feature (930)..(930): n is a, c, g, or t
  misc_feature (952)..(952): n is a, c, g, or t
  misc_feature (1096)..(1096): n is a, c, g, or t
  misc_feature (1144)..(1144): n is a, c, g, or t
  misc_feature (1274)..(1274): n is a, c, g, or t
  misc_feature (1464)..(1464): n is a, c, g, or t
  misc_feature (1477)..(1477): n is a, c, g, or t
  misc_feature (1501)..(1501): n is a, c, g, or t
  misc_feature (1732)..(1732): n is a, c, g, or t
  misc_feature (1738)..(1738): n is a, c, g, or t
  misc_feature (1745)..(1745): n is a, c, g, or t
  misc_feature (1748)..(1749): n is a, c, g, or t
  misc_feature (1754)..(1754): n is a, c, g, or t
  misc_feature (1817)..(1817): n is a, c, g, or t
  misc_feature (1948)..(1948): n is a, c, g, or t
  misc_feature (2708)..(2708): n is a, c, g, or t
  misc_feature (3239)..(3239): n is a, c, g, or t
  misc_feature (3503)..(3503): n is a, c, g, or t
  misc_feature (3668)..(3668): n is a, c, g, or t
accatcgacaacgatcaatggagccttaccagagttgatagaggtcaaaccacgcaactggatcgtggtcgtaccattggcactaccattattttgcaagatcaaaccgctgatcttaccttgcaaagagctggtgatatcggcaccacccacacccttcatcatatcgccggcagacaatgaggtaacggagctggtcacttgcttcttctccatcgtaccgtaacctacgaccacgacctcttcaagagcctgggaatcttccgacaacgtaacatttataacactttgactgccaaccgggacttccttggtcgtgtaaccgatataagagatttccaaaacagcgtttgcgggcacatcttgcaacgtaaccgagccgttcatgtcggttacgttaccgatagtagttcccttgaccaacacgttcgcgccgatcaactcacccattgaatctgaaaccttaaccgtaanagtcttaccattttgcatgaccgattcaacattcggtccgtagttgtgcgagggttccacagccgccaatccttgaaaggaggccatacataggaatcccgtggtaagcatcataacacttggtttgaacaagcttaaacacaattgcttgctcttcttactacatttttccatctttattattaaatggttataattaattgagattaacaatattcaaacaccaaaaacctactttctgctatctctgagcgcagtccctaataaaaatgactagctaaaacgttngtttagactagtcntnnnnnnngntnannnnnannntnnannannnannnttnattnnantnantntnngnntnnnnnnnnnnnnnnnntnnnnnnnnnnanattnnntnnaatantnnnnnnntntnnaannnnnnnnnnnancnnnnnnnatgactagtctaaacnaacgtttaaaccagtcattttnacatttattatactattgagtatgataaaaaccatacctttactcccccaaagaaagaatgcagaaaccatgaaactacaaatcatcgataccggctacttctacgccgacggaggcgccatgttcggggccattcctaaaagngcttggagccgtcgctatccgagcgacgagacaaatggttgcgtgctngccatgcgtagccttgtcataaaaacagatgacggacgcatcgtcctagtagataacggagcgggaaataaacacttaaaacaactaagttattaccgcttcttcaacttggtagacctcggcacggaantacgaaaccggggaattcaaccggaggaaatcacggatgttgtcctcacccatctccatttcgatcattgcggttataccacgcaaaaggatgaatctaccggacatttatttctctcattcccaaatgcgaaccactgggttagccgcaagcaatgggagaatttccttcatccgaacgccttggaganagattcctatttnatcgagaatatgcaagccgtcgcngacgctaattccttacggctgctagatgccgacacatcgatttgccccactatagagctacgcctgtacgatgggcacactccgggacaaattgttccctatatccatacggaggaccggacttttgtctttgccggggatgttatcccccttgtagccagcgtatctccggaatggatctcggcttacgatacgtatccgatcacgtcatacaacgagaaactgcgcatncttgcngaagccnccnnaaaanggcaagcgctcatctactgccatgacgcttacatccgctgcacaaccgtaaaacgtgtgaatncttattataagaaagacaaggaaatacctctcaagaagacgtttcttttcccttagtccctagcccttttccctttagaccttaggtgtttcttccatattccttagacatttcttatagaagtattcatnatccaccagccgttgcatgatcgtccaccaactgttggatgatcatgcaacagctggtggacgatcatgcaccagttgataaatagtctatatatatagacaaaatccctaaggttatcgcatcaaaagtgtaaaagcattagataaaacggctaattctatttatctttgggcggtgatactgaatcaattattgttttacattctaaactctaaacacatgaacagcctaagcaaactagcgctcgtcctgacattttgcacgggaatgatcgcttgctccggtggtaaggccgtaaaaggagattacggagtagtgcctttgccacaagaagtaacattgacgaacggaaatcctttcgtcctaagtccatccacgaagatattttatccggagggcaatgataagatgaagaagaacgccgagttcctcgcttcttatatcaaggaaatcacgggctatgaattagcaaccgctaccggccagcccggtaaggggatcagcctcgttatcgaccaaagcatccagaatccggaaggatatcaactgaccgttagcgataacgggatacggatcgccggaagtacggatgccggcgtattttatggtatccagacattacgtaaatcgatcccggccacggcccaagggatgaacgtagaattaccggcagctaccatcaacgactatccccgttttgcctatagaggcatgatgctggatgtcagccgccatttcttccccgtggattcggtaaanacgtatctcgatatccttgccttgcacaaccaaaatacgttccactggcatctgtccgatgaccaaggttggcgtatcgagatcaagaaatatccggaattgacacagatcggatctaaacgcaaggaaaccgtgatcggccataactccggaacatatgacggaaaggaatacgggggcttctatacacaagaccagattcgcgatgtcatcaactatgccgccgaacgccatatcacgatcatcccggaaatcgatatgccgggacatcaattggcagccttggctacttacccggaactgggatgcaccgggggcccttatgacgtatggggccaatggggagtagccgacgacgtgatctgcgccggaaacgagaaatccatgcaattcctagaagacgtattgagcgaggtcatcgatcttttcccgtccgaatatatccatgtaggtggtgatgagtgcccgaaggtacgttgggagaaatgcccgaaatgccaagctcgcatcaaggcggaaggtatcaagggngataagaagcattccgccgaggaatatttgcaaagctacgtgatctcccgcatggagaaattcgtggagagcaaaggacgccatatcatcggctgggacgagatcctagaaggaggcttggccccgaatgccacggtaatgagctggagaggcatggatggaggtatcgaggccgccaagcaaaagcataacgtggtcatgacaccgaatacatatgtatatctggattactatcaatcagcggatacggatcttgagcccgangctatcggtggttacttgccgttagagaaagtatattcttttgagccgacagccggtatctctcctgaagaccagaagtacgtgatcggggcgcaagccaacctctggacggaatatatcccgaccttctcacaggtagaatacatgatcatgccccgtatcgangccgtagccgatatccagtggagcgatccgtccaagaaagattatcagacgttcctgccccgtgtggcccgcatgacacaactttacgatcgcttgggatataattacggaaagcatatcttcgatattaacgcctccctgaccaccaatacggagaacggaacactcgacatagccttgacgaagttgggtgaaggagatatctattatacggtagacggtagcgatcctacgatcgccagcatcaagtatgaaggcccggtacagatcaaccaagattgcgaattcaaggcgatcgttgtccgtccgaacggtacgagccgcatcttctc

SEQ ID NO: 614 - DNA, 4000 bp, Escherichia coli
  misc_feature (10)..(10): n is a, c, g, or t
  misc_feature (18)..(18): n is a, c, g, or t
  misc_feature (28)..(28): n is a, c, g, or t
  misc_feature (48)..(48): n is a, c, g, or t
  misc_feature (255)..(255): n is a, c, g, or t
  misc_feature (257)..(257): n is a, c, g, or t
  misc_feature (348)..(348): n is a, c, g, or t
  misc_feature (504)..(504): n is a, c, g, or t
  misc_feature (594)..(594): n is a, c, g, or t
  misc_feature (633)..(633): n is a, c, g, or t
  misc_feature (741)..(741): n is a, c, g, or t
  misc_feature (956)..(956): n is a, c, g, or t
  misc_feature (958)..(958): n is a, c, g, or t
  misc_feature (1078)..(1078): n is a, c, g, or t
  misc_feature (1601)..(1601): n is a, c, g, or t
  misc_feature (1813)..(1813): n is a, c, g, or t
  misc_feature (1964)..(1964): n is a, c, g, or t
  misc_feature (1985)..(1985): n is a, c, g, or t
  misc_feature (1989)..(1990): n is a, c, g, or t
  misc_feature (2499)..(2499): n is a, c, g, or t
  misc_feature (3099)..(3099): n is a, c, g, or t
  misc_feature (3122)..(3122): n is a, c, g, or t
  misc_feature (3157)..(3157): n is a, c, g, or t
  misc_feature (3166)..(3166): n is a, c, g, or t
  misc_feature (3172)..(3172): n is a, c, g, or t
  misc_feature (3184)..(3184): n is a, c, g, or t
  misc_feature (3488)..(3488): n is a, c, g, or t
  misc_feature (3497)..(3497): n is a, c, g, or t
  misc_feature (3500)..(3500): n is a, c, g, or t
  misc_feature (3605)..(3605): n is a, c, g, or t
  misc_feature (3641)..(3641): n is a, c, g, or t
  misc_feature (3647)..(3647): n is a, c, g, or t
  misc_feature (3656)..(3656): n is a, c, g, or t
  misc_feature (3658)..(3658): n is a, c, g, or t
  misc_feature (3665)..(3665): n is a, c, g, or t
  misc_feature (3667)..(3668): n is a, c, g, or t
  misc_feature (3812)..(3812): n is a, c, g, or t
  misc_feature (3818)..(3818): n is a, c, g, or t
  misc_feature (3869)..(3869): n is a, c, g, or t
tggtaatcanaatgatgnattttgaatnatgaattatgaattaagacngaaaaatgattctattttatgtgtaacaaacgactatttctactcttactcggcgttttctttgttctaatagcgcatgcgcaagagcagaaatacacccgtttaaaggggtattatcgtgtttatcaggcgacaaatagcatgctctcttattttgtagatggtatgatggagttttatatacctgtatctgactccatagcaggnanctctgacaataaaaagaagtcgccctttattgatagaaagttccttggtgaacgtcgtcgaaaggctccgaaagccaatggcgacgatacnttcgtgcggatgtcactgccaaatttagagcgacaaacgcttattgagagtataaacagcgaagagtattcaacgaggaacaatggagatgtgtatcgatgggcggataagtgcggtaaaataacgcatgacaaacagaagattaaagggcagacngaattgctgacaactatcgagatggatgagttagtggggcaacctaaccatgaaatagacatgagtcagttgcgtatgtatggtatcgtngctcgtatgacacaatttgatgagagcgaaacttacctntctaattatgctcttaacgccttccaaaagcatcaaaccttctttgctcgttatcgaggagaggatgttgacgatcgtattgatgtatggagtgagttctatgtatcngatagaatgacgataacagaggctgaactcaaacagataaagaaggagaaaaaccatgtatggacgttctctattcccgcttctgtccctcctttagataaggaagtagttgctgcttgggaaaagatgatagaatactaaggcaccagactaccaataattgaaatgtaaaatgaggaaaattctttatttattcatgcttcccttgcttattntnagttgttcgcaaggggcaaaaaaacgtagttttccaaaggagaagttcaccattgacctcttacttcctacttcccccgtgaagaatcaaggctccagttcactttgttgggtctatgcnatgcttgcaacgattgagtcagagcatatcatacaaggtgattctgtcaacctaagtgccgattatgtggctcgaatgtatctatatgagcaggctagaagacgccaatttctaccgaagagagtggctcgtttagagcgacccatcaccactcgcggtatgagtacaatgacacttgacctcatcaaaacctatggtttacagcattatgatgcctatcatagtgagccagatatggactataatgtcctttgtaggcgtcttgatcgttcgaagaaggttgacgaactcttggataagagtatcggaactttacctaaacaggtctttatgtttggtgtgcgatacactccttacgagtttgcacgcagtgtttgtatgccagatgagtacacagcggtaacgagtttcctacatcatccattacatgagagctttcctttagaagttccagataattatttccacgataccttcctaaatattccagcaaaagacatcatcccctgcattgtaaatagcntgaagaaagggcatcccgtgtgctgggaaggtgacgtctcagagcctctcttctcctttgaacatggatatgcaatgttggatgatgaggctaggaaatggacagaaaaggacaggcaggaagcgtttgagcactttcaaacaactgacgaccattgtatggagatcgttggaatagcccatgaccagcatggtaaacgcttctttctttgnaaaaatagctggggcacggacaatccttaccatggtttcatgttcttgagtgagccttatgtctatatgaagaccattgccttggtgggaactaacctatagttatctactgcgaaaagcctctttatcatggagaaaacttttccttganattaaaaatagattaaaaagnagannaaaataatctaataatagaataaaaatagattaaaaataacaacaaacgacgcttatcagtattattgatgagcgtcgtttgttggatagatgaggcttattacttagtaaagagttgctttgcaaactcccagataacgattcctgcggtcacactaacattcagagagtgcttcgttccgaactgtggtatctccaagcaagcatcactcatgtctacaacagattgttttacgcccttcacctcattgcccatgatgatggcataatggctgttgtttgtagtcgattcagcattgagattgagcgtatggagctttgttgaatgttcaacctgctctacgctataaacgaaaacacccttcttatgcaaatcttcaacggcatcttctgtccgttcaaagtatttccaatcaaccgaatcttcgcctcctaaagccgtcttatgtatctcggcattaggaggagtagccgttataccacatagatagatggcttctatacgaaangcatcggctgaacggaatacacttcctacattatataatgaccgcacatcgtccagaacgacgatgagaggcaacttctcggcttctttaaactcctcaatggagagccgactcatctctattgtacgtaacttgcgcatttatttcatactaaaagcaaccgcataggctttgatcttagtaaccattgacagcaaaccattgcttcttgtaggtgaaagatgctgtctcaagcctatcttatcaatgaagtataggtcggaatctataatctcttgtgcggtatgatgacttagaacgcgaatcaaaagagcgataatacctttcgtgataagcgcatctgaatcagctgtaaacaccagtttgccatcgacattatcgcattggagccatacacgactttgacatccgtctatgagattctgctcgtttttatactgttcagccaatggttcaaggtcattacctaggtcgattaacatctgatacttgtccatccaatcggagaagtcgctgaactcttctattactgcatcttgcgcttcgtttattgtcatagtttcttttatttaaaggagtggtaggagtgaaggagagaangggagttaagacaagtgtaaagnggcttgatgtgtttcaatctactataccaagaatnggtattgtngccttntatatccttaangtaccatcaagaacatttgtcttaacgccctttcattccttaattcttggcactcttgattagtttaaacagcttatcattcggtctaaccttatctggaacggggatagaaacacgccatccttgctctgcaacatccactggtttgaggtcataacgtatctcttcagcattgaggaacatagctccagtggtgttaccagtgatgagtagcttgtcaccctttgcgaaggtgttggcttcaacggctatttctgcaacgccaagacgcgagaagtacttcatcaccttaccgatgagaacnttcttttcngtngctttgttaccatattccttggtccattctcccatcttctgaccctgatagtagccatcccagaaaccgcgattgaagacggtagataagcgttcgtcccacttntctttcttctcttctgtgaaggttccatccaatacnctctgnattgcttcntnataacangnnaccacagtgtgtacatattcgggtccacgagcacgaccttctatcttgaagacacgtactccagcatccatcatcttatcaatgaatcgaacgctcttaaggtcttttggactcattatatacttattgtctatctccaactgnttgccngtttcgttatcagtcacagtataactacgacggcaaatctgcacacattcnccacgattagccgatctgttggcatcgtgaagactcatataacacttgccagagatagccatgcagaaggctccatgacagaacatctctatgcgaataggctgtcctttaggaccacaaatgttctgttt

SEQ ID NO: 615 - DNA, 4000 bp, Escherichia coli
  misc_feature (1)..(33): n is a, c, g, or t
  misc_feature (35)..(77): n is a, c, g, or t
  misc_feature (79)..(431): n is a, c, g, or t
  misc_feature (433)..(444): n is a, c, g, or t
  misc_feature (446)..(475): n is a, c, g, or t
  misc_feature (477)..(478): n is a, c, g, or t
  misc_feature (480)..(491): n is a, c, g, or t
  misc_feature (493)..(498): n is a, c, g, or t
  misc_feature (502)..(502): n is a, c, g, or t
  misc_feature (504)..(506): n is a, c, g, or t
  misc_feature (508)..(514): n is a, c, g, or t
  misc_feature (516)..(520): n is a, c, g, or t
  misc_feature (522)..(532): n is a, c, g, or t
  misc_feature (534)..(536): n is a, c, g, or t
  misc_feature (538)..(540): n is a, c, g, or t
  misc_feature (542)..(550): n is a, c, g, or t
  misc_feature (552)..(584): n is a, c, g, or t
  misc_feature (586)..(596): n is a, c, g, or t
  misc_feature (599)..(607): n is a, c, g, or t
  misc_feature (609)..(615): n is a, c, g, or t
  misc_feature (617)..(617): n is a, c, g, or t
  misc_feature (620)..(621): n is a, c, g, or t
  misc_feature (623)..(623): n is a, c, g, or t
  misc_feature (625)..(625): n is a, c, g, or t
  misc_feature (628)..(628): n is a, c, g, or t
  misc_feature (630)..(633): n is a, c, g, or t
  misc_feature (635)..(639): n is a, c, g, or t
  misc_feature (646)..(650): n is a, c, g, or t
  misc_feature (661)..(664): n is a, c, g, or t
  misc_feature (691)..(691): n is a, c, g, or t
  misc_feature (704)..(704): n is a, c, g, or t
  misc_feature (706)..(706): n is a, c, g, or t
  misc_feature (708)..(708): n is a, c, g, or t
  misc_feature (717)..(718): n is a, c, g, or t
  misc_feature (725)..(725): n is a, c, g, or t
  misc_feature (732)..(732): n is a, c, g, or t
  misc_feature (737)..(737): n is a, c, g, or t
  misc_feature (1838)..(1838): n is a, c, g, or t
  misc_feature (2002)..(2002): n is a, c, g, or t
  misc_feature (2027)..(2027): n is a, c, g, or t
  misc_feature (2038)..(2038): n is a, c, g, or t
  misc_feature (2289)..(2289): n is a, c, g, or t
  misc_feature (2292)..(2292): n is a, c, g, or t
  misc_feature (2296)..(2297): n is a, c, g, or t
  misc_feature (2299)..(2299): n is a, c, g, or t
  misc_feature (2301)..(2303): n is a, c, g, or t
  misc_feature (2305)..(2309): n is a, c, g, or t
  misc_feature (2311)..(2311): n is a, c, g, or t
  misc_feature (2313)..(2321): n is a, c, g, or t
  misc_feature (2323)..(2323): n is a, c, g, or t
  misc_feature (2327)..(2328): n is a, c, g, or t
  misc_feature (2330)..(2331): n is a, c, g, or t
  misc_feature (2334)..(2336): n is a, c, g, or t
  misc_feature (2338)..(2340): n is a, c, g, or t
  misc_feature (2343)..(2343): n is a, c, g, or t
  misc_feature (2350)..(2353): n is a, c, g, or t
  misc_feature (2357)..(2357): n is a, c, g, or t
  misc_feature (2360)..(2360): n is a, c, g, or t
  misc_feature (2364)..(2364): n is a, c, g, or t
  misc_feature (2370)..(2370): n is a, c, g, or t
  misc_feature (2372)..(2372): n is a, c, g, or t
  misc_feature (2377)..(2379): n is a, c, g, or t
  misc_feature (2384)..(2384): n is a, c, g, or t
  misc_feature (2389)..(2389): n is a, c, g, or t
  misc_feature (2391)..(2392): n is a, c, g, or t
  misc_feature (2395)..(2395): n is a, c, g, or t
  misc_feature (2399)..(2399): n is a, c, g, or t
  misc_feature (2401)..(2406): n is a, c, g, or t
  misc_feature (2410)..(2413): n is a, c, g, or t
  misc_feature (2416)..(2416): n is a, c, g, or t
  misc_feature (2420)..(2420): n is a, c, g, or t
  misc_feature (2422)..(2422): n is a, c, g, or t
  misc_feature (2425)..(2426): n is a, c, g, or t
  misc_feature (2428)..(2429): n is a, c, g, or t
  misc_feature (2431)..(2432): n is a, c, g, or t
  misc_feature (2434)..(2434): n is a, c, g, or t
  misc_feature (2437)..(2438): n is a, c, g, or t
  misc_feature (2440)..(2440): n is a, c, g, or t
  misc_feature (2442)..(2444): n is a, c, g, or t
  misc_feature (2446)..(2446): n is a, c, g, or t
  misc_feature (2449)..(2450): n is a, c, g, or t
  misc_feature (2453)..(2455): n is a, c, g, or t
  misc_feature (2459)..(2461): n is a, c, g, or t
  misc_feature (2464)..(2465): n is a, c, g, or t
  misc_feature (2473)..(2473): n is a, c, g, or t
  misc_feature (2481)..(2481): n is a, c, g, or t
  misc_feature (2485)..(2486): n is a, c, g, or t
  misc_feature (2492)..(2492): n is a, c, g, or t
  misc_feature (2498)..(2498): n is a, c, g, or t
  misc_feature (2502)..(2502): n is a, c, g, or t
  misc_feature (2504)..(2505): n is a, c, g, or t
  misc_feature (2509)..(2517): n is a, c, g, or t
  misc_feature (2521)..(2528): n is a, c, g, or t
  misc_feature (2530)..(2531): n is a, c, g, or t
  misc_feature (2533)..(2533): n is a, c, g, or t
  misc_feature (2535)..(2544): n is a, c, g, or t
  misc_feature (2547)..(2550): n is a, c, g, or t
  misc_feature (2552)..(2560): n is a, c, g, or t
  misc_feature (2565)..(2566): n is a, c, g, or t
  misc_feature (2569)..(2569): n is a, c, g, or t
  misc_feature (2571)..(2571): n is a, c, g, or t
  misc_feature (2574)..(2574): n is a, c, g, or t
  misc_feature (2576)..(2577): n is a, c, g, or t
  misc_feature (2581)..(2583): n is a, c, g, or t
  misc_feature (2585)..(2586): n is a, c, g, or t
  misc_feature (2590)..(2590): n is a, c, g, or t
  misc_feature (2592)..(2593): n is a, c, g, or t
  misc_feature (2596)..(2603): n is a, c, g, or t
  misc_feature (2606)..(2606): n is a, c, g, or t
  misc_feature (2610)..(2620): n is a, c, g, or t
  misc_feature (2622)..(2622): n is a, c, g, or t
  misc_feature (2624)..(2637): n is a, c, g, or t
  misc_feature (2639)..(2648): n is a, c, g, or t
  misc_feature (2650)..(2656): n is a, c, g, or t
  misc_feature (2658)..(2663): n is a, c, g, or t
  misc_feature (2665)..(2669): n is a, c, g, or t
  misc_feature (2671)..(2682): n is a, c, g, or t
  misc_feature (2684)..(2690): n is a, c, g, or t
  misc_feature (2692)..(2694): n is a, c, g, or t
  misc_feature (2696)..(2699): n is a, c, g, or t
  misc_feature (2701)..(2710): n is a, c, g, or t
  misc_feature (2713)..(2714): n is a, c, g, or t
  misc_feature (2716)..(2722): n is a, c, g, or t
  misc_feature (2724)..(2725): n is a, c, g, or t
  misc_feature (2727)..(2738): n is a, c, g, or t
  misc_feature (2740)..(2741): n is a, c, g, or t
  misc_feature (2743)..(2752): n is a, c, g, or t
  misc_feature (2754)..(2762): n is a, c, g, or t
  misc_feature (2764)..(2772): n is a, c, g, or t
  misc_feature (2774)..(2775): n is a, c, g, or t
  misc_feature (2777)..(2780): n is a, c, g, or t
  misc_feature (2782)..(2812): n is a, c, g, or t
  misc_feature (2814)..(2821): n is a, c, g, or t
  misc_feature (2823)..(2826): n is a, c, g, or t
  misc_feature (2828)..(2842): n is a, c, g, or t
  misc_feature (2844)..(2846): n is a, c, g, or t
  misc_feature (2848)..(2873): n is a, c, g, or t
  misc_feature (2875)..(2883): n is a, c, g, or t
  misc_feature (2885)..(2890): n is a, c, g, or t
  misc_feature (2892)..(2916): n is a, c, g, or t
  misc_feature (2919)..(2921): n is a, c, g, or t
  misc_feature (2923)..(2963): n is a, c, g, or t
  misc_feature (2965)..(2993): n is a, c, g, or t
  misc_feature (2996)..(3069): n is a, c, g, or t
  misc_feature (3071)..(3074): n is a, c, g, or t
  misc_feature (3076)..(3090): n is a, c, g, or t
  misc_feature (3092)..(3125): n is a, c, g, or t
  misc_feature (3127)..(3127): n is a, c, g, or t
  misc_feature (3129)..(3136): n is a, c, g, or t
  misc_feature (3139)..(3147): n is a, c, g, or t
  misc_feature (3149)..(3177): n is a, c, g, or t
  misc_feature (3179)..(3187): n is a, c, g, or t
  misc_feature (3189)..(3223): n is a, c, g, or t
  misc_feature (3225)..(3231): n is a, c, g, or t
  misc_feature (3233)..(3235): n is a, c, g, or t
  misc_feature (3237)..(3301): n is a, c, g, or t
  misc_feature (3303)..(3309): n is a, c, g, or t
  misc_feature (3311)..(3312): n is a, c, g, or t
  misc_feature (3314)..(3314): n is a, c, g, or t
  misc_feature (3316)..(3353): n is a, c, g, or t
  misc_feature (3355)..(3356): n is a, c, g, or t
  misc_feature (3358)..(3375): n is a, c, g, or t
  misc_feature (3377)..(3403): n is a, c, g, or t
  misc_feature (3405)..(3417): n is a, c, g, or t
  misc_feature (3420)..(3442): n is a, c, g, or t
  misc_feature (3445)..(3445): n is a, c, g, or t
  misc_feature (3447)..(3458): n is a, c, g, or t
  misc_feature (3461)..(3475): n is a, c, g, or t
  misc_feature (3477)..(3483): n is a, c, g, or t
  misc_feature (3485)..(3491): n is a, c, g, or t
  misc_feature (3493)..(3502): n is a, c, g, or t
  misc_feature (3504)..(3513): n is a, c, g, or t
  misc_feature (3515)..(3517): n is a, c, g, or t
  misc_feature (3520)..(3521): n is a, c, g, or t
  misc_feature (3523)..(3539): n is a, c, g, or t
  misc_feature (3541)..(3556): n is a, c, g, or t
  misc_feature (3558)..(3563): n is a, c, g, or t
  misc_feature (3565)..(3569): n is a, c, g, or t
  misc_feature (3571)..(3574): n is a, c, g, or t
  misc_feature (3576)..(3576): n is a, c, g, or t
  misc_feature (3578)..(3587): n is a, c, g, or t
  misc_feature (3589)..(3591): n is a, c, g, or t
  misc_feature (3593)..(3614): n is a, c, g, or t
  misc_feature (3617)..(3620): n is a, c, g, or t
  misc_feature (3622)..(3625): n is a, c, g, or t
  misc_feature (3627)..(3644): n is a, c, g, or t
  misc_feature (3646)..(3654): n is a, c, g, or t
  misc_feature (3656)..(3723): n is a, c, g, or t
  misc_feature (3725)..(3776): n is a, c, g, or t
  misc_feature (3778)..(3800): n is a, c, g, or t
  misc_feature (3802)..(3827): n is a, c, g, or t
  misc_feature (3829)..(3855): n is a, c, g, or t
  misc_feature (3857)..(3884): n is a, c, g, or t
  misc_feature (3886)..(3887): n is a, c, g, or t
  misc_feature (3889)..(3899): n is a, c, g, or t
  misc_feature (3901)..(3920): n is a, c, g, or t
  misc_feature (3922)..(3945): n is a, c, g, or t
  misc_feature (3948)..(3973): n is a, c, g, or t
  misc_feature (3975)..(3986): n is a, c, g, or t
  misc_feature (3988)..(4000): n is a, c, g, or t
nnnnnnnnnnnnnnnnnnnnnnnnnnnnnnnnntnnnnnnnnnnnnnnnnnnnnnnnnnnnnnnnnnnnnnnnnnnntnnnnnnnnnnnnnnnnnnnnnnnnnnnnnnnnnnnnnnnnnnnnnnnnnnnnnnnnnnnnnnnnnnnnnnnnnnnnnnnnnnnnnnnnnnnnnnnnnnnnnnnnnnnnnnnnnnnnnnnnnnnnnnnnnnnnnnnnnnnnnnnnnnnnnnnnnnnnnnnnnnnnnnnnnnnnnnnnnnnnnnnnnnnnnnnnnnnnnnnnnnnnnnnnnnnnnnnnnnnnnnnnnnnnnnnnnnnnnnnnnnnnnnnnnnnnnnnnnnnnnnnnnnnnnnnnnnnnnnnnnnnnnnnnnnnnnnnnnnnnnnnnnnnnnnnnnnnnnnnnnnnnnnnnnnnnnnnnnnnnnnnnnnnnnnnnncnnnnnnnnnnnncnnnnnnnnnnnnnnnnnnnnnnnnnnnnnntnntnnnnnnnnnnnntnnnnnnttantnnntnnnnnnncnnnnncnnnnnnnnnnnannntnnngnnnnnnnnngnnnnnnnnnnnnnnnnnnnnnnnnnnnnnnnnngnnnnnnnnnnnccnnnnnnnnnannnnnnntnttnntntnttnannnnannnnnttaaaannnnnccctcttgcgnnnntctttcctttaagcgtgtgataaaaanaaagaagatgaanananacaaacgtnnatatccnaaaaaantagcntctccagaaaggaggtgttccagccacaccttccggtacggctaccttgttacgacttagccccaattacctgttctaccctaactggcggtttaacggccagcttcaggtctaccagactttcatggcttgacgggcggtgtgtacaaggtccgggaacgtattcaccgcgtcattgctgatacgcgattactagcgattccagcttcatagggtcgagttgcagaccccaatccgaactgtgaacggttttcgagattggcatcctgttgccaggtagctaccctctgtaccgcccattgtagcacgtgtgtagccctaggcgtaagggccatgatgacttgacgtcgtcccctccttcctctctacttgcgtaggcagtccatttagagttcccaccattacgtgctggcaactaaatgcaggggttgcgctcgttgcgggacttaacccaacacctcacggcacgagctgacgacagccatgcagcaccttgtttcaggtcattgctgactgatccatttctgtatcattccttcacattctagcctaggtaaggttcctcgcgtatcatcgaattaaaccacatgctccaccgcttgtgcggacccccgtcaattcctttgagtttcaccgttgccggcgtactccccaggtggataacttaacgctttcgctgtggcaccgaccagattcggccgacacctagttatcatcgtttacagtgtggactaccagggtatctaatcctgtttgatacccacactttcgtgcatgagtgtcagtaaaagccaagtgagctgcctacgcaattggagttcttgataatatctatgcatttcaccgctacactatcaattccgcccacctctactttactcaagtctaccagtttcaatggcactgcaatcgttgagcgaccgtctttcaccactgacttaataaaccacctgcgcaccctttaaacccaataaatccggacaacgcttgcaccctccgtattaccgcggctgctggcacggagttagccggtgcttattcatacagtaccgtcaatgcctctcgcaagagtcgtttcttcctgtataaaagcagtttacnacgcataacgccttcatcctgcacgcggcatggctgggtcagacttgcgtccattgcccaatattccctactgctgcctcccgtaggagtctggcccgtatctcagtgccagtgtgggggattgacctctcagttcccctaccaatcatagtcttggtgagccnttacctcgccaactaactaattggncgcatgcccancttacatcgataaatctttaacagctgctggatgcccagctactgtcttatgcggtattaatctccctttcgaaaggctatcccccaatgtaaggtaggttgcatacgtgttacgcacccgtgcgccactatgtccgaagacaccgttcgacttgcatgtattaggcctgccgctagcgttcatcctgagccaggatcaaactctccattgtaaataatctttggatgtttgactgctcttattttaatanaanaaanntntnnntnnnnntntnnnnnnnnntnattnntnnatnnnannnttnaaacatnnnncctnttntttntttctntnaacannncaaanaactntnnaanctcnannnnnnattnnnntanttcnanccnntnnanncnctnntntnnnanctnnctnnntttnnntannaattgggngtgcaaanatgnnggattnaatttnaaanannaaannnnnnnnnaatnnnnnnnnannantnnnnnnnnnnttnnnntnnnnnnnnnctaannaantnaanannaaannntnnaaantnnaannnnnnnnaanaaannnnnnnnnnnantnnnnnnnnnnnnnntnnnnnnnnnntnnnnnnnannnnnnannnnnannnnnnnnnnnnannnnnnntnnntnnnntnnnnnnnnnnaanncnnnnnnnannannnnnnnnnnnncnncnnnnnnnnnntnnnnnnnnnannnnnnnnnanncnnnnannnnnnnnnnnnnnnnnnnnnnnnnnnnnnntnnnnnnnnannnntnnnnnnnnnnnnnnntnnntnnnnnnnnnnnnnnnnnnnnnnnnnnannnnnnnnncnnnnnnannnnnnnnnnnnnnnnnnnnnnnnngannncnnnnnnnnnnnnnnnnnnnnnnnnnnnnnnnnnnnnnnnnnannnnnnnnnnnnnnnnnnnnnnnnnnnnnaannnnnnnnnnnnnnnnnnnnnnnnnnnnnnnnnnnnnnnnnnnnnnnnnnnnnnnnnnnnnnnnnnnnnnnnnnannnnannnnnnnnnnnnnnnannnnnnnnnnnnnnnnnnnnnnnnnnnnnnnnnncntnnnnnnnnttnnnnnnnnnannnnnnnnnnnnnnnnnnnnnnnnnnnnntnnnnnnnnnannnnnnnnnnnnnnnnnnnnnnnnnnnnnnnnnnncnnnnnnntnnnannnnnnnnnnnnnnnnnnnnnnnnnnnnnnnnnnnnnnnnnnnnnnnnnnnnnnnnnnnnnnnnncnnnnnnntnnanannnnnnnnnnnnnnnnnnnnnnnnnnnnnnnnnnnnnnanncnnnnnnnnnnnnnnnnnnannnnnnnnnnnnnnnnnnnnnnnnnnntnnnnnnnnnnnnnttnnnnnnnnnnnnnnnnnnnnnnnttntnnnnnnnnnnnnttnnnnnnnnnnnnnnncnnnnnnnannnnnnncnnnnnnnnnncnnnnnnnnnnannnccnncnnnnnnnnnnnnnnnnnannnnnnnnnnnnnnnntnnnnnncnnnnncnnnnantnnnnnnnnnncnnnannnnnnnnnnnnnnnnnnnnnnaannnncnnnnannnnnnnnnnnnnnnnnncnnnnnnnnncnnnnnnnnnnnnnnnnnnnnnnnnnnnnnnnnnnnnnnnnnnnnnnnnnnnnnnnnnnnnnnnnnnnnannnnnnnnnnnnnnnnnnnnnnnnnnnnnnnnnnnnnnnnnnnnnnnnnnnnannnnnnnnnnnnnnnnnnnnnnnannnnnnnnnnnnnnnnnnnnnnnnnnannnnnnnnnnnnnnnnnnnnnnnnnnnannnnnnnnnnnnnnnnnnnnnnnnnnnncnncnnnnnnnnnnntnnnnnnnnnnnnnnnnnnnntnnnnnnnnnnnnnnnnnnnnnnnnttnnnnnnnnnnnnnnnnnnnnnnnnnnannnnnnnnnnnncnnnnnnnnnnnnn

SEQ ID NO: 616 - DNA, 4000 bp, Escherichia coli
  misc_feature (341)..(341): n is a, c, g, or t
  misc_feature (388)..(388): n is a, c, g, or t
  misc_feature (473)..(473): n is a, c, g, or t
  misc_feature (1116)..(1116): n is a, c, g, or t
  misc_feature (1132)..(1132): n is a, c, g, or t
  misc_feature (1557)..(1557): n is a, c, g, or t
  misc_feature (1560)..(1560): n is a, c, g, or t
  misc_feature (1659)..(1659): n is a, c, g, or t
  misc_feature (1764)..(1764): n is a, c, g, or t
  misc_feature (1990)..(1990): n is a, c, g, or t
  misc_feature (2841)..(2841): n is a, c, g, or t
  misc_feature (2856)..(2856): n is a, c, g, or t
  misc_feature (2899)..(2899): n is a, c, g, or t
  misc_feature (2908)..(2908): n is a, c, g, or t
  misc_feature (2951)..(2951): n is a, c, g, or t
  misc_feature (3231)..(3231): n is a, c, g, or t
  misc_feature (3470)..(3470): n is a, c, g, or t
  misc_feature (3705)..(3705): n is a, c, g, or t
  misc_feature (3733)..(3733): n is a, c, g, or t
  misc_feature (3933)..(3933): n is a, c, g, or t
atggatccggagaaatattccacgaccttctaaacttctgtacttttttttttcccaatttttttttcatttcatctttatttaatcctgttaaagatccataatgtcgttcatttaattgccaagctttaattatttgaacgtctttaattcttaaagtattaagtatcaattttagagtattaatcgctcttttttggtaagaagtaaaaaaatagtcgattttagttttttgttcttttattagttcaccagctttgcaagcttccagctttccttttggggcgaggtcaacatcaacccaaccagtaaatctattctctaagttccactcactttgnccgtgccttactaatattagattgttcattggtttttattataaatnttaatataagacatgaaaatgaataataatagcaagtttacaaaaaagagaattataagcattgcaaagtatttctttcatatangtaatatccttttaattattttttatttatatccaggaagcatttttggttgttttatttataatgattgtaaaatccaaccacaattaacaagtaattttatagtttcttccaaccacgtttatgtatttattattatttctttaacaggttttattgcttattcaaaaaaatcagcctttataagaatagtaatctatcttttttttatatcagtttttttagaacttgctcatatagcaattccagagagaggttttgaaataaaagatctagctggaaatatcgttggagtggttatatcattaattatattattaatatttaaatttaggaaaaaaaatgagcacttttgatgacagagaaaaaaattttgaaaaaaaatttgcatatgacgaagaattacaatttaaaattagtgcacgaagaaacaaatacctaggtcagtgggctgcgcaaattttaggtcacgatcaagaaaaagaaaaagaatatatactatctgttataaaagctgattttgctgaagttggagacgaggatgtttttaggaaaattaagtcagatttaaaagatcaaaatatttcagatgaagaaataaggaaaaaaatggatgagctgaatgaaaaagcaaaatctgagnttaagtagttttctantaattttttttttattgttatcttcatgttcttcgattccaaaaaataccgctgatagttgctcaattttttctgaaagatatttatggtacaagcatacaaaaaaagctgagcaaaagtggggaacaccaatttatattcaacttgcatttattaaaatggagtctggtttcgattggttagctaaaccagaaagacttaaaattttcaaagtaataccttatagaagaccctcgagttcttttggatattctcaggctgtaaaaggaacttgggaacagtataaaaaagaaacaaacaatcctttagccacaagaactagatttaaagacagtgttgattttattggatggtatacaaataaaactgcaaaactattaaagatttcaaagaaggatgcttacagacaatatttggcctatcanganggatggggtaattacaaaaattataaaaataatcaaaaggtaattattcttgcaaaaaaagttgcagagcaagctaacgagtatagaaaacagttaagnaaatgtcagaagagacttaacaaaaataaatatataattttttaacgtaactgtttttttagttctatatcaactgcatctattctttttgtattttttgccagngcaacatacattgttggtgttacgtataatgtaaagaatgttgaaattaacattcctcctaaaattgtagaaccaactgcaagtcgtgatccttcgcctgcgcctgggccaatattacctataactaaaggaatcattgcaatcatagtgctcagagatgtcatgataatgggcctaaatctaaggtcacaagcttctttaacagcgttttcaatactgttaccantagttcttagctgattagcgtattcgacaatcagaatactgtttttagttgaaattccaataagaatgacaagcgcaatttgagaaaaaatgtttatagaactgtttaaaaacaaaataaataccaatccaccaaaaacagccaacggaacagtaagaacaataataaatggatgtataaatgaattgaatgttgctgccattacgagataagcagttaaaagagctaaagcaaaaattatatacaattcattgctagtttcttttaattcttcagatttacctttccatgtaacttgattttcaggtgcaatttcagcaatggttttttctaaatatttgattgcctcggataatgtataattttcacttatatttgcagatatagtaaccgctctttgcctattatatcttgatagtttgttagcagaccctacttctttaaaactaaccaaatttgctaaagaaattaattttccagagttttctgatctaacaaaaattttacttaggctttcttgatcttttctatcagctaaatattgttgcagaataattggatattcttttccaagtttattaaattttgtgacagttttgccaccataaagagtttcaagagtttgaccaatagattgagtagatatgcccaagtcttttgctttgtttttatttatgaccaattttatttctggtttgtttcttgaataatcagattctattctagataaatttccatttcttcttaacattcttattactttggattggatgttttccaattcttcataagtacttcccaatataaccatttgaactggtttattataatttgatacccttattgcttgnggagatattggaaangccagtgtttgaggaactgtcactattcttccaattgcttgtntcataatantctgagaattttgttttctgtttttccaattatctaataaagnaataattataaagctattatcacctccaaagccaggaactatcataagaaatctatcgtaaggactatcctctgtttgtaaaagaggtataagtcttttttctacatcttcagcgcttttttgagtatactggaatgagctaccctcatctgtaaaaccaataactaaataagctcctctatcttccattggaagaagttcttttttaccaaagttatataataatccagaacctattatgattaatataataaaagttataattgttttttttttatcnaaccaatatttaagtgtttcctggtagaaatttgaaaaacctttaaaaaatttgtcaaattttactacaaaaaaatttgtctttgctttcctatctaaaaatttacttgcaagcattggagatagagttagagcaacaaatgatgaaacaacaatagcaaaagataatgcaattgcagtttctctaaataaagttccagctattccttctataaaaattagtggtaaaaaaacagcaantaaaattaatgttgtggcaatgatagcaaaagttatttgttttgaacctttatatgcagcaactaaaggattttctccattttctattcttctatatattgcatcagtcattataacagagtcatcggtaattattcctattgctaaaataaagcttaacaaaacgaaaatatttattgataaaccaaataaataaattcctaaaaaggttgcaatcaagcttacaggtaaagcnatagcaggtacaattactgctttaaagnttcctaggaataaataaataatgataactactaaaacgaaagcaataattagagttttataaacttcgttaattgctgccccaatgtatgttgccctattaaacgctatctctaaatttagtccttctggtaaggttttttttacttcatcaactttttttttaatttcttttgacagctcaaccgttgaagctccactnctcgcataaattccaataccaacagtttttaaatttaatgcatctttactttgagctctaaataaag

SEQ ID NO: 617 - DNA, 4000 bp, Escherichia coli
  misc_feature (1774)..(1774): n is a, c, g, or t
  misc_feature (2769)..(2769): n is a, c, g, or t
  misc_feature (3713)..(3713): n is a, c, g, or t
  misc_feature (3771)..(3771): n is a, c, g, or t
  misc_feature (3777)..(3778): n is a, c, g, or t
  misc_feature (3789)..(3789): n is a, c, g, or t
  misc_feature (3791)..(3791): n is a, c, g, or t
  misc_feature (3802)..(3802): n is a, c, g, or t
  misc_feature (3818)..(3818): n is a, c, g, or t
  misc_feature (3883)..(3883): n is a, c, g, or t
  misc_feature (3895)..(3895): n is a, c, g, or t
  misc_feature (3929)..(3929): n is a, c, g, or t
  misc_feature (3937)..(3937): n is a, c, g, or t
  misc_feature (3942)..(3942): n is a, c, g, or t
  misc_feature (3964)..(3964): n is a, c, g, or t
  misc_feature (3967)..(3967): n is a, c, g, or t
  misc_feature (3970)..(3970): n is a, c, g, or t
  misc_feature (3972)..(3972): n is a, c, g, or t
  misc_feature (3974)..(3975): n is a, c, g, or t
  misc_feature (3979)..(3979): n is a, c, g, or t
  misc_feature (3995)..(3996): n is a, c, g, or t
gaattgattccgatgaacaccgctgccaaacccacaaacgaatgcaaagcagcaaccagttgcggcatcccagtcatttcaactcgcattgcgacgattgcgccgatgacggcaccaatcacaatggctccaattagcatggaactcatcgagacctcggatccagcaaccgtcgcaaggacagcgatggccataccaatgatgccaaaccaaacggcacgcttggccttttcctgattcgacaggccaccgagcgccaagataaataagactgttgccgaaagataagcggctgtttgaagtccaattgtcatttcatgtccctccgcttatgactttttaaacatctggagcatacggcgcgtcaccataaagcccccgactatgttgatggtcgcgatcagaacagaaattcctgcaaggattgctacgatgggaatgctagagtccacttgcagtatcgcgccgacgataataattccggagatggcgttggtgatcgccatcaagggcgtatgcaaagaatgagcgactccccagatcacctggaatccaacaaacaccgcaagcacaaaaacgataaagtgttgcataaactctgttggcgcataaaggccaatcaaagccatcaatgccgcaccaatcaccaacaattgtgtctgctgacgacctgcttttgccatggcttgcgcttcttcagcggctttctcttctggagttttctcaggctgtttcggcgtcgccttcgaagcaatcgcctgaactttgagcggaggtggcgggaaggtaatctcgccttcaaaagtcacagtcgacgaccgaatcacgtcgtcttccatgttgtgaaccaattgaccgtccttctcaggagtcagatcggtcatcatatgacgcacgttggttgcgtaaagcgttgatgcctgcgcagccatacggcttgggaaatccgtgtaaccaataatggtcacaccgttatccgtgacgactttttggtccgccacagtcaacttacagttgccgcctttttccgccgccaaatccacaatgactgatccaggcttcatcgcctcgaccatgtcctgagtccacaactccggcgcttcgcggttcggaatcaaggcagtggtaatgacaatatcaatctcaggcgcctgttctaagaacaaagctaattgcttttctcggaattctgggcttgaaggtgcggcataaccgcctgtcgcagccccatcttgagcatcttcaaaatccaaaaacaggaattcagcacccatggattcgatttgctcggccacctcaggtcgcacgtcgaacgcccgaacaatcgcaccaagcgactgcgctgtgccaatcgccgccaaaccagcgaccccagcaccaatgaccaagactttcgcaggcggcactttacccgcggccgtcacttggcctgtaaagaatcgcccaaagtgattgcccgcttcgatcactgctcgatatccggcaatattcgccatcgacgacagtgcatccatcttctgcgctctcgagattcgcggcaccatttccatggcaatgacattggcttgccgcgatttggcgagctcaagaagcgtctcgttaccggctgggttgaagaatccgaccagggtttggcccttgctcaaacggctcacttcatcttcgagcggtgggcgaactttggcaatcacgtcgactgactgaaaaagcgcttcagcagagtcaacgaccgtgacaccggcagcctgataatctgcatctgaaaaacgagctnctaaacctgctccactttcaataaagcactcatagcccagtttctgtaactgtattgcggaatcaggcgtcatggcgacgcgtgcttctcccggcattacttcttttggggatccgattcgcatcgaccaactccctgttatatttgtccgttaaataatcgaatgttatatcattagaactagatgttataaaagttctttagactatcatccataaaggatcgcatatctcgacccaaggcaaaagcttaacaaccctcatctatggatgattctcatcggtggatcatccactgcagttcgtctctttcaatgatttgctaattgctcctagacgactgacgagcgaatccatcagtcgcgctattgaaacatgtcaggctgcgttgcctcgaggtgctgatacagggtctggaaatgaagccaaccaatgtaatcactgccaacgtgctcacgactgtaagccgccgtttgatcatctaaaagctgcggtttcactccagtggattcgatgaggatttgctgcttacaacagcgctccaaggcgataaaccaaaacgccgcgtcgtcaatactgtgctgactcgtggtcaacaacccgtgattttgatgcaagatgccgcggtgctgacccattgcttttgcgacgctcaatccactttcttgttcaacagccacggcaccactcgatgctcccacaacgacgtgactttgataaaacgcagcagcatcctgactgatcatatcgagtggccgtccagttgagcaccacgcagttccatacaccgtgtgtgcatgacacatcgccaacacttcagggtattcttcatgcaccgctgcatggagaacaaatccagctcgattaatggcgtaatcaccctcaacgacccgaccgtgatgatcagccaagatcaaatttgacaatcgtacctgtgaaaaatggacgcacattgggttggtccagtagagttctggaaactcaggatcacgaatngtgagatgccctgcaaagccatagtcaaagccatgcaaatcaaacgctcgacaggccgcaaccaagtgcttttttcgatactcacgctcttctgcaaaactctcaaagtgaggaatctctggaaacaccagaccgctttggtctggttgatataatgatattttttcagccttagcgtgcgtcttagacatctctttctccgaatattttcattatctgtccaaccgagactatacgagagttttcgatggttggaatcaaacaaataacgcttagcagccactcatcgaaccggagcgtccagccacagcgcgtcaatctcagccaaggcttccgcatcaaaccgatccacacattcccaatatcgcccagaatcgacgaagtagccgagggcatgctctcgggccttgatcgcctcaaatgtgtcttgatcaaactcaactggattcatctctgttaacgcctcaaggcgtgctcggggaaacaccaaacgactctcgtcttcagaaatgttgacgcatgcgcacccctgtgcggccgccaccagttgtaaacgtgccgatttcgcctccagcgactgcaaggtcacatcgtcacgtaacggatcaggcgtcccttgaccataaaaatgggtcggaccggaggcgggatacaccaaatcgcatccaaaaaatgccatcacatccggctgtaaagcccccaaggcccagtaagcagcggtaaaggccatggtaccgccggcatagaccactcccccaaattggttttgtaccggcacaaagtcatcagcctcaacaagctgctgagccggtgacagcgtgcttggacgtctctcaacgggcaagtcttccgggaagatgcacatatcccaatccgatcgcacccgccaagcattattaatggcaaccaaatgggtccagtactcagaatcccattgacgcgcntcagttgccgaaggcccactgcctagcatcaccactgtcgtactcacgcgacaatctntctccnntccatcaaagngngaatgagccgnctcgaaggatccgatngagatttttttgctcgcaatcactggcgattcagcgaatctccgaccgacacactcaaaacggcnccagaatacctncagatcccatgctttcaaagtctgtggctcaagntcagaatntgggntgtttggctcaacagaggattngangtncncnncggnttcgcattgatcaganntttt

SEQ ID NO: 618 - DNA, 4000 bp, Escherichia coli
  misc_feature (74)..(74): n is a, c, g, or t
  misc_feature (223)..(223): n is a, c, g, or t
  misc_feature (1099)..(1099): n is a, c, g, or t
  misc_feature (1997)..(1997): n is a, c, g, or t
  misc_feature (3483)..(3483): n is a, c, g, or t
ctgcctttttaatttcagatcctctggaaaaagaagcaccatcttccggacgttatgcaatgagtgacggtgangctgttgcctgggttaactccgaaaattcaaaaacacgtcaactctatgcttccacttatgaagatcagctaaaaagtttaaagcacgaattacaactctgcaggctaagcttgaaaatgctgagtacagtggacaatgtttcacaganttaatgaatcaatcattttgattacaaacaatttcaaatgccggaagaaaatcctctaataaatttaaaagacattcacttaccaccagctgttgcaatttggcctccggctccaggctggtggattgtggcagtagtactgcttttgatttttgtgttttgcggaatgtggatcagtcgacgttttgaacggcgaaaacccaaaactgaagctctgcgattgttaaaaaatctgcaaaatcaacaaaataataccgaagaatcattggaaatactcagggatttatcgcaattactgcgtcgggttgcattgactttttgtgcagatgaaaatgtagcttcactgcatggatccgaatggttggagtttcttgatagaacaggaaaaaccactgaatttactcaaggagcagggcatgtatttggaaaggaactttatcagcaaaatccggaaattgaaatagatgttttgtttccaatggtaaaaaaatggattatggattgtagtcagcagcattgaacaaagcacggaaaatgtttttatttgagaatggtgtgtttgaatttatttggctttgggtggcgtggttctggccactgcccttattgtttcgtgttcttccaccagttgataggtcagttcagtctcttcgtgtacctttttttcatagaattacagttttgcctaaatccggaatttcagctggaaaaaactcaaaagtcttgctgttagccggattggtctggagtttgattgttctggcagcactgcggccgcaatgggttggggatccagtagaattacctgtttccggccgaagtgtgatgcttgcggttgatctttccggaagtatgaaagaaacggatctggaactncacggtgaatccgtgacgcggctggctgttgtaaaatcagttttgaggccttttattgagcggagaaaaggcgaccggctggggctgattctgtttggagatcaggcttatctgcaaactccactgactttcgaccggaaaacattgcggcaaatgcttgaagagtctgaattaggtcttgccggacagagaactgcaattggtaatgcaatcggactggccgtaaaacgtatgaaagatcttccggataaagaaaaagtattggtgttgctcacagatggtcaaaataccgccggtgaggttactcctgaagatgcagggcgtttagctaaagaaacggggctacggatccacaccattggtattggtgcagatgaggcatggataagggcttttttcggcaagcaaaaaattaatccatctgcagaacttgatgaagcaatgctgaaatctttagcaagccagactggtggtacatattttcgggcgagaagtacagaagagctggaaaaaatttatgcaatgattgataaaattgaaccgttggaaatagaaaaagaggttttccgtccccgtcaagccttgtttatgtggccgctgggttttgcagtactgatagttggaatatggtcagccgttttattgattagaaactaatcatatttattatgttaagtttcgtaattgatctaaaaagaaagaaatatttagccgtcattgatcagataatttataaagaattttctgactgaaaacaaagagctgaataataagtgcatctgttattgttcatctcgggagtcatgaaattttgtaagatactaatagtattgactccggtatgtcatctcgactgaagggagagatctgataaagtactgatttcttataagatacntcacatacgtttgggatgacacgctaaaactcgtgattgtctagttattcattcaaagcaagtataaatcatgaacaaccccggctcaggtgaattttcattaaagcaccagcctaatattcgttaattattttgttatcagaatttcaatttttacgccctctgtggctaatagcaataccagttctctggtggatggtttttcgtttccttggaagatggtggagcaaaggaaactgggaagatgtggtagaaccgcatttgctgtcgtttcttgcaacaactccggcaaagcaaaaacggagtctgctgccatggatcatctgtttagtcggtactattcttttgctggctttgtccggacctgtctggcaaaagaatctacagccactgctgcaaaaatcactggccagagtactggttttggatttatcttattccatgctggcaacagacataaaaccaacacggtttgagcgagcacgtttcaaattgaaagacctgctaggacattttgttgaaggtgaaactgcacttatcgtatatgcaggagatgcattcgttatcagcccattgacccatgatcctgtaaccattgcgtctcttcttacggggcttcatccgaatattatgcctcttcccggaagtcgttcagatcttgcaattgaacttgctgcagatcttttaagccggaggaatggcggtactggacatatcatctgggttacagacggtattgaagtacaggatattccagcagcagaaaatgcggttggtttgaatcgcctgtcaattcttgcagttggaactgaatccggctcaccgatccccttgtctggaggagggtttcttaaagacaaaaaagggggaattgtaataccaaaactttatttaaaacctttacaaaaattagccgctcaaactcatggtgccttcacaaaattgagtccggatgatcgggatgtggagcaaatcattgcagcagaaactgctgcagatgattatgttgaagacaaacagcagagaacttctgataagtggaatgaagaaggaccatggctcttattacttgtcttgcccatggcagcgttgctgtttcgtaggggtctattgttttcaattggatttgcagtattacttggagtcacagcaaggccttcttcagcactcgcattcggatgggatgatttatggttacgaccggaccagcaggcagctaaattgtttcagcaaggtgaaacgaaacaagcagctgaactttttgaaagctcggaatggaaaggggcagcggcatatcgatctggcgactatgaaaaagcaattgagcatttttctcaacagaatcattcacgggccaatttcaacagtggaaatgcattggcctttgcaggacggttacaggaatcactggaagcttttgagcgggttttagcagataatgcgcaagacgtagatgctcagtacaatcatgatttgattgaaaaantactgaaagaacaacaaaagaaaaaacaacagcaggagggacaacagggtgcaaatcaaaaaaataaacaggatcaacagaatggctctagccaaactcaggaaaaacaaaatgcacagtccgcccaggattcttctggtgacaatgcgggtaccagtgatcagcagactgcagaggccgtaaaaaataatgctgaaaaggaatcaactgcagagaaaaataatgaaaaatttgatgaagaaaaaactgaatctccaaataatgaagaagggcagaaaaaaattgatggatctgccgaaaaagaaaacgcaaaaaacaagaaacaggattcaactccggttgatcttgccaaacagcaattccttgaacaatggttgagaaaaatacctgatgatcccgggcgcttgttacgcaacaaaatggaaagggaatttcaacgccgcggaaaacaaaattttacaaatgaacaatattggtaaatgatgataaaactatttattttgggaatcttgatatt

SEQ ID NO: 619 - DNA, 4000 bp, Escherichia coli
  misc_feature (2)..(2): n is a, c, g, or t
  misc_feature (5)..(5): n is a, c, g, or t
  misc_feature (7)..(14): n is a, c, g, or t
  misc_feature (16)..(18): n is a, c, g, or t
  misc_feature (22)..(26): n is a, c, g, or t
  misc_feature (32)..(33): n is a, c, g, or t
  misc_feature (35)..(38): n is a, c, g, or t
  misc_feature (40)..(48): n is a, c, g, or t
  misc_feature (51)..(51): n is a, c, g, or t
  misc_feature (53)..(55): n is a, c, g, or t
  misc_feature (58)..(60): n is a, c, g, or t
  misc_feature (62)..(66): n is a, c, g, or t
  misc_feature (68)..(72): n is a, c, g, or t
  misc_feature (74)..(74): n is a, c, g, or t
  misc_feature (76)..(76): n is a, c, g, or t
  misc_feature (79)..(86): n is a, c, g, or t
  misc_feature (88)..(92): n is a, c, g, or t
  misc_feature (94)..(95): n is a, c, g, or t
  misc_feature (97)..(97): n is a, c, g, or t
  misc_feature (100)..(102): n is a, c, g, or t
  misc_feature (104)..(104): n is a, c, g, or t
  misc_feature (107)..(107): n is a, c, g, or t
  misc_feature (111)..(114): n is a, c, g, or t
  misc_feature (116)..(119): n is a, c, g, or t
  misc_feature (121)..(121): n is a, c, g, or t
  misc_feature (124)..(129): n is a, c, g, or t
  misc_feature (131)..(133): n is a, c, g, or t
  misc_feature (135)..(137): n is a, c, g, or t
  misc_feature (139)..(139): n is a, c, g, or t
  misc_feature (142)..(142): n is a, c, g, or t
  misc_feature (144)..(148): n is a, c, g, or t
  misc_feature (153)..(156): n is a, c, g, or t
  misc_feature (158)..(161): n is a, c, g, or t
  misc_feature (163)..(168): n is a, c, g, or t
  misc_feature (170)..(173): n is a, c, g, or t
  misc_feature (175)..(177): n is a, c, g, or t
  misc_feature (183)..(192): n is a, c, g, or t
  misc_feature (194)..(195): n is a, c, g, or t
  misc_feature (198)..(203): n is a, c, g, or t
  misc_feature (205)..(205): n is a, c, g, or t
  misc_feature (207)..(209): n is a, c, g, or t
  misc_feature (211)..(215): n is a, c, g, or t
  misc_feature (217)..(222): n is a, c, g, or t
  misc_feature (225)..(225): n is a, c, g, or t
  misc_feature (227)..(227): n is a, c, g, or t
  misc_feature (229)..(230): n is a, c, g, or t
  misc_feature (232)..(233): n is a, c, g, or t
  misc_feature (235)..(236): n is a, c, g, or t
  misc_feature (239)..(247): n is a, c, g, or t
  misc_feature (250)..(250): n is a, c, g, or t
  misc_feature (256)..(256): n is a, c, g, or t
  misc_feature (258)..(264): n is a, c, g, or t
  misc_feature (267)..(267): n is a, c, g, or t
  misc_feature (269)..(269): n is a, c, g, or t
  misc_feature (273)..(273): n is a, c, g, or t
  misc_feature (275)..(277): n is a, c, g, or t
  misc_feature (279)..(283): n is a, c, g, or t
  misc_feature (285)..(285): n is a, c, g, or t
  misc_feature (287)..(287): n is a, c, g, or t
  misc_feature (289)..(290): n is a, c, g, or t
  misc_feature (292)..(292): n is a, c, g, or t
  misc_feature (295)..(299): n is a, c, g, or t
  misc_feature (301)..(307): n is a, c, g, or t
  misc_feature (309)..(309): n is a, c, g, or t
  misc_feature (312)..(316): n is a, c, g, or t
  misc_feature (319)..(320): n is a, c, g, or t
  misc_feature (324)..(324): n is a, c, g, or t
  misc_feature (326)..(326): n is a, c, g, or t
  misc_feature (328)..(334): n is a, c, g, or t
  misc_feature (336)..(338): n is a, c, g, or t
  misc_feature (340)..(340): n is a, c, g, or t
  misc_feature (342)..(344): n is a, c, g, or t
  misc_feature (346)..(350): n is a, c, g, or t
  misc_feature (353)..(354): n is a, c, g, or t
  misc_feature (356)..(358): n is a, c, g, or t
  misc_feature (361)..(362): n is a, c, g, or t
  misc_feature (364)..(364): n is a, c, g, or t
  misc_feature (367)..(372): n is a, c, g, or t
  misc_feature (379)..(379): n is a, c, g, or t
  misc_feature (382)..(383): n is a, c, g, or t
  misc_feature (385)..(385): n is a, c, g, or t
  misc_feature (389)..(396): n is a, c, g, or t
  misc_feature (398)..(399): n is a, c, g, or t
  misc_feature (401)..(404): n is a, c, g, or t
  misc_feature (406)..(406): n is a, c, g, or t
  misc_feature (409)..(409): n is a, c, g, or t
  misc_feature (411)..(413): n is a, c, g, or t
  misc_feature (416)..(418): n is a, c, g, or t
  misc_feature (421)..(426): n is a, c, g, or t
  misc_feature (428)..(429): n is a, c, g, or t
  misc_feature (431)..(432): n is a, c, g, or t
  misc_feature (434)..(434): n is a, c, g, or t
  misc_feature (440)..(440): n is a, c, g, or t
  misc_feature (442)..(442): n is a, c, g, or t
  misc_feature (444)..(444): n is a, c, g, or t
  misc_feature (446)..(449): n is a, c, g, or t
  misc_feature (451)..(452): n is a, c, g, or t
  misc_feature (454)..(454): n is a, c, g, or t
  misc_feature (460)..(465): n is a, c, g, or t
  misc_feature (467)..(472): n is a, c, g, or t
  misc_feature (474)..(474): n is a, c, g, or t
  misc_feature (476)..(477): n is a, c, g, or t
  misc_feature (479)..(480): n is a, c, g, or t
  misc_feature (485)..(485): n is a, c, g, or t
  misc_feature (487)..(487): n is a, c, g, or t
  misc_feature (491)..(492): n is a, c, g, or t
  misc_feature (494)..(495): n is a, c, g, or t
  misc_feature (502)..(503): n is a, c, g, or t
  misc_feature (505)..(507): n is a, c, g, or t
  misc_feature (509)..(513): n is a, c, g, or t
  misc_feature (515)..(518): n is a, c, g, or t
  misc_feature (520)..(522): n is a, c, g, or t
  misc_feature (525)..(525): n is a, c, g, or t
  misc_feature (527)..(529): n is a, c, g, or t
  misc_feature (534)..(537): n is a, c, g, or t
  misc_feature (540)..(542): n is a, c, g, or t
  misc_feature (544)..(546): n is a, c, g, or t
  misc_feature (550)..(550): n is a, c, g, or t
  misc_feature (553)..(555): n is a, c, g, or t
  misc_feature (557)..(557): n is a, c, g, or t
  misc_feature (559)..(560): n is a, c, g, or t
  misc_feature (562)..(562): n is a, c, g, or t
  misc_feature (567)..(567): n is a, c, g, or t
  misc_feature (571)..(576): n is a, c, g, or t
  misc_feature (582)..(582): n is a, c, g, or t
  misc_feature (584)..(589): n is a, c, g, or t
  misc_feature (591)..(592): n is a, c, g, or t
  misc_feature (594)..(597): n is a, c, g, or t
  misc_feature (599)..(599): n is a, c, g, or t
  misc_feature (602)..(604): n is a, c, g, or t
  misc_feature (607)..(608): n is a, c, g, or t
  misc_feature (611)..(611): n is a, c, g, or t
  misc_feature (613)..(613): n is a, c, g, or t
  misc_feature (615)..(616): n is a, c, g, or t
  misc_feature (618)..(618): n is a, c, g, or t
  misc_feature (620)..(621): n is a, c, g, or t
  misc_feature (624)..(625): n is a, c, g, or t
  misc_feature (627)..(627): n is a, c, g, or t
  misc_feature (633)..(635): n is a, c, g, or t
  misc_feature (637)..(642): n is a, c, g, or t
  misc_feature (645)..(645): n is a, c, g, or t
  misc_feature (647)..(652): n is a, c, g, or t
  misc_feature (657)..(657): n is a, c, g, or t
  misc_feature (659)..(659): n is a, c, g, or t
  misc_feature (663)..(664): n is a, c, g, or t
  misc_feature (668)..(669): n is a, c, g, or t
  misc_feature (673)..(683): n is a, c, g, or t
  misc_feature (685)..(685): n is a, c, g, or t
  misc_feature (687)..(689): n is a, c, g, or t
  misc_feature (691)..(692): n is a, c, g, or t
  misc_feature (695)..(695): n is a, c, g, or t
  misc_feature (697)..(699): n is a, c, g, or t
  misc_feature (701)..(701): n is a, c, g, or t
  misc_feature (703)..(703): n is a, c, g, or t
  misc_feature (705)..(708): n is a, c, g, or t
  misc_feature (712)..(714): n is a, c, g, or t
  misc_feature (718)..(718): n is a, c, g, or t
  misc_feature (720)..(721): n is a, c, g, or t
  misc_feature (724)..(725): n is a, c, g, or t
  misc_feature (727)..(727): n is a, c, g, or t
  misc_feature (731)..(731): n is a, c, g, or t
  misc_feature (733)..(733): n is a, c, g, or t
  misc_feature (736)..(736): n is a, c, g, or t
  misc_feature (740)..(741): n is a, c, g, or t
  misc_feature (746)..(747): n is a, c, g, or t
  misc_feature (749)..(752): n is a, c, g, or t
  misc_feature (754)..(756): n is a, c, g, or t
  misc_feature (758)..(760): n is a, c, g, or t
  misc_feature (762)..(764): n is a, c, g, or t
  misc_feature (766)..(772): n is a, c, g, or t
  misc_feature (774)..(775): n is a, c, g, or t
  misc_feature (777)..(777): n is a, c, g, or t
  misc_feature (780)..(783): n is a, c, g, or t
  misc_feature (788)..(788): n is a, c, g, or t
  misc_feature (793)..(795): n is a, c, g, or t
  misc_feature (798)..(798): n is a, c, g, or t
  misc_feature (800)..(800): n is a, c, g, or t
  misc_feature (802)..(803): n is a, c, g, or t
  misc_feature (806)..(806): n is a, c, g, or t
  misc_feature (810)..(810): n is a, c, g, or t
  misc_feature (813)..(813): n is a, c, g, or t
  misc_feature (815)..(817): n is a, c, g, or t
  misc_feature (820)..(820): n is a, c, g, or t
  misc_feature (822)..(822): n is a, c, g, or t
  misc_feature (824)..(824): n is a, c, g, or t
  misc_feature (827)..(830): n is a, c, g, or t
  misc_feature (833)..(836): n is a, c, g, or t
  misc_feature (840)..(840): n is a, c, g, or t
  misc_feature (844)..(847): n is a, c, g, or t
  misc_feature (849)..(852): n is a, c, g, or t
  misc_feature (855)..(856): n is a, c, g, or t
  misc_feature (859)..(860): n is a, c, g, or t
  misc_feature (863)..(863): n is a, c, g, or t
  misc_feature (865)..(865): n is a, c, g, or t
  misc_feature (868)..(868): n is a, c, g, or t
  misc_feature (870)..(872): n is a, c, g, or t
  misc_feature (874)..(874): n is a, c, g, or t
  misc_feature (877)..(877): n is a, c, g, or t
  misc_feature (879)..(882): n is a, c, g, or t
  misc_feature (884)..(886): n is a, c, g, or t
  misc_feature (889)..(890): n is a, c, g, or t
  misc_feature (893)..(894): n is a, c, g, or t
  misc_feature (897)..(897): n is a, c, g, or t
  misc_feature (901)..(902): n is a, c, g, or t
  misc_feature (904)..(910): n is a, c, g, or t
  misc_feature (912)..(912): n is a, c, g, or t
  misc_feature (916)..(917): n is a, c, g, or t
  misc_feature (921)..(922): n is a, c, g, or t
  misc_feature (924)..(924): n is a, c, g, or t
  misc_feature (929)..(931): n is a, c, g, or t
  misc_feature (933)..(936): n is a, c, g, or t
  misc_feature (940)..(941): n is a, c, g, or t
  misc_feature (943)..(943): n is a, c, g, or t
  misc_feature (946)..(946): n is a, c, g, or t
  misc_feature (948)..(948): n is a, c, g, or t
  misc_feature (951)..(951): n is a, c, g, or t
  misc_feature (953)..(954): n is a, c, g, or t
  misc_feature (957)..(960): n is a, c, g, or t
  misc_feature (963)..(966): n is a, c, g, or t
  misc_feature (968)..(968): n is a, c, g, or t
  misc_feature (973)..(978): n is a, c, g, or t
  misc_feature (982)..(983): n is a, c, g, or t
  misc_feature (985)..(985): n is a, c, g, or t
  misc_feature (989)..(989): n is a, c, g, or t
  misc_feature (991)..(991): n is a, c, g, or t
  misc_feature (993)..(993): n is a, c, g, or t
  misc_feature (998)..(998): n is a, c, g, or t
  misc_feature (1001)..(1004): n is a, c, g, or t
  misc_feature (1006)..(1009): n is a, c, g, or t
  misc_feature (1013)..(1013): n is a, c, g, or t
  misc_feature (1016)..(1016): n is a, c, g, or t
  misc_feature (1020)..(1021): n is a, c, g, or t
  misc_feature (1027)..(1029): n is a, c, g, or t
  misc_feature (1033)..(1033): n is a, c, g, or t
  misc_feature (1039)..(1042): n is a, c, g, or t
  misc_feature (1061)..(1061): n is a, c, g, or t
  misc_feature (1064)..(1064): n is a, c, g, or t
  misc_feature (1237)..(1237): n is a, c, g, or t
  misc_feature (3149)..(3149): n is a, c, g, or t
  misc_feature (3248)..(3248): n is a, c, g, or t
tnttntnnnnnnnntnnntttnnnnncaatcnntnnnntnnnnnnnnntgnannnacnnntnnnnnannnnntntntannnnnnnncnnnnntnnanaannnanttnaatnnnnannnncnggnnnnnnannnannncncancnnnnnggaannnntnnnntnnnnnnannnnannnagcaannnnnnnnnnannaannnnnntncnnncnnnnntnnnnnnaancnanntnnannaannnnnnnnnttngtttgntnnnnnnnatnantaantnnntnnnnntnantnnanttnnnnntnnnnnnnantgnnnnnaannaacnancnnnnnnntnnntntnnntnnnnntanntnnnttnntnaannnnnnttttttnttnnanaatnnnnnnnnanntnnnntnggnannnatnnnttnnnnnnanntnntntttttntntntnnnntnngnttgttnnnnnnannnnnntntnntnnttgcntnactnnannttaggtnncnnnannnnngnnnnannnatntnnnttccnnnncgnnntnnntaantcnnntntnntntttcntttnnnnnnaaaaanannnnnngnncnnnncnttnnnttnnatntntnntngnnggnngnggtgtnnngnnnnnnaantnnnnnnttacntncccnncccnncctnnnnnnnnnnncntnnnanntanannnancncnnnncttnnntaantnnacnnancaananaantaannaatanntnnnntnnnannntnnncnnnnnnncnntnctnnnnaaaanaaatnnnttngntnnaanaatncantnnnatntntnttnnnnaannnngttngttnnnntnnnnttnnttnnatnanctntnnntnaantnnnntnnntanntannttnaacnnannnnnnncnctcnnatcnnanccaannnannnnaatnnanaananatncnntcnnnnctnnnntnttttnnnnnnaaannanaaancntnccttnttnnnntnnnntttntcnaatnnacttannngaangaactnnnnttatttatttttcttcttngtntttttttgaaaaagttttcttttttttaaattttttcttaacgctaaacttaaacgttcatttttatcttttgaattcattctttatctgggtttgtcagaaaatctaatgttatcggtttagaggcatctaatacttttggcttaacttcttcttcttttggaccttccttngctaaacgtttagctcttttttcagcaagctttttttctcttttagcttgcttctccataagcttattacctttagtagatttataatcgtaatgaattcccataaaattttcctcacgtagatataaatcatattagtcaaaaaattaaggcaatattttgaaaaaaatgctttattatcaataaaatacaaattgcttataagctcctatagataaatggtatatcaagtcattggtaatgactaattccctggtcagtacagggtgggagcaccataattaatttttgtagaaaatttttcttaaaaagattgataatataattaatccaaaaaaagctataattggcaaataaatatctgctgaaaaaattatatcagatattcctggaacttctgaattctgatcaataactttttctaaaccactaccaatagaaacggctaagaatatttgtggtataattccaattaaagttgcaaagaaaaaattatttacttttacattaaaaagagttggtaagagacaacttaactgccaaggtattcctccaataaatcgataaattaacaaataaataaattcagattttttaaatttttgttcaaggttttgaaatttatttaaaaatttttctctaattaattcttttaaaaaataattaccaaataaatatataaaagttgcaccaatacttaatcctaaaacaactagtaatgttccaatccattttccaaaaataaatccccctagcaaggctactggagacccaaaccccaaaaatggaaacacccacaatattgtcaacgataaaaaaattattgataacaaaaataaatttgaatttttaagctcaaaaaaataagatctattttctctgataaaatcataagaggttaattcctgaaggctaaattttgaaaagaaaaaatataaaaataaacaaatggctgttatataaaataaccctacaaatattttaatttttttagttttttccattgaatctaatacaatttataaaatcttctatttgctatttatatatttaattactataaagggcgaaaattaataaattttaatcacattttatgaagcgaacatatcaaccatctaacgttaaaagagccagaaaacatggctttagatcaaaaatgaaaactaagggtggacaaaaacttttagctagaagaagagcaagaggaagaaaatcgttaaccgtatcagtctagataaatgaaaagcaaaatacttgctctttcaaaaaacgaggaattcaaaaatctactaaagcaaaaaaaaatttctaacaaatatgttacaattttttttggcaatctagctaataaagataacagcaaactaaatattagttttgtaaccaaaaagaaaattggtaatgctgttaaaagaaataagattaaacgtaggttaagaaatattgttaatgaagcagtaaaaaaaataacattaaaattcaactattcatatcttgttattgctaagtcaactatgctaaacaatgagtacaaaaatataaaagaaactctatttcaggatttagaaaaaattaaataatgaacattttcacaaatattttaattaaatttatcaaaggttataaatttctaatcagtccattacttggtcagtcttgtagatatttaccaacctgctctgaatatagcatagaggccttaaaagaatttggtttagcaaaaggtagcttcatgagcttaaaaagaattttgtcttgtcatcctataaaatttttaggtgggggagatggttttgatccagttaaaaaacaaatgaaagttaagaagtagatggacactaaaaacgtaattgcagctatttctttgtcagccgcagtgattattctttattcacttttttttgcaccnccaccaattacaaaagaacaattagcagaaaaaaataaaactgaacaaaattcagatgcccctagtttggatcaaaaagaaactgttactgaaataacnagagatgaggctttaagccaaaataaaagaattcagtttgaaaaccaaagcattgttggctcaatttctttaaaaggtgcagcaatagatgacttaacctttaaagaatataatgttgcattagaaagtgatgaaaaggtcaaacttttatcgccaagaaataccaaagatggctacttcatagaaagtggatttattactactgataaaaatattgatattccagattcaaactctgtatggtctgtattaggaaatagtaaacttactaaccaatcacctgttaaattgtcttggactaatgatcagggaattacttttgaaaaacaaataactttagatgacaattttttattcacaattaaccaaaaagtaatcaattcaacaaataaaaattatgatttttattcttatggacaaattattagaaaagaaattccagatatttcaaatttttacattcttcacgaagggcttattgcaacattggatgaggaattaattgaagaagattacgatgatattcaagaagaaaagttttcaagaacttctcaaaaaggatggcttggaatttcagataagttttggatcacatcactaattccaccaagtggtaaagaatttaaaactacttttgattataaagataagtttcgagctaattttgttgctacagatccattagaacttagaggaaactcaagtatcgaagataagttacaagtaatagtggctgcaaaaagagttgatat

SEQ ID NO: 620 - DNA, 4000 bp, Escherichia coli
  misc_feature (1989)..(1989): n is a, c, g, or t
  misc_feature (1998)..(1998): n is a, c, g, or t
  misc_feature (2223)..(2223): n is a, c, g, or t
  misc_feature (2992)..(2992): n is a, c, g, or t
  misc_feature (3033)..(3033): n is a, c, g, or t
  misc_feature (3063)..(3063): n is a, c, g, or t
  misc_feature (3760)..(3760): n is a, c, g, or t
gacgcgcaacgccagctctgcctcgcggctcgagggcaaacgattagcgtcgcattttacccaaaaaaaggtttgatttgctacggttctgagcaggctgcggtgaaggctggtctgtcgattccgacgcccggtggcgacgttctcgcgagtgttcacggcggcgcatacggcgacgacaacgctgccattcgtcttgatctcgacgacctaaacggcgagatttgcttgctcgactggggtgccgataggacgccagcggtatcgttaccaaactcacatctggggcagtacccgttgatgggctcaactgtcaccgttattttggctagggaagggaaaatgtcgctcgaagcgccgatgcacgcctcgcattcgttgaaatcgttggggtcgcgaagtggaactgccatgatcgatacgggattattccacagaatgacccgtctcgagggaaacgaattcatcaaaccgttgctcccggatcaagacgatttagtattgtccgatattcaggacattcccaaagttttgcggaatttgcaagaagactggagaaacaaaccaaaagcttccatcagtctcaatcgtttgacggcgtggaacctcgcgagatgcctgaagaagcgcttgcagcgccaagttgactcacagagcaagtcaaacacatccgtggacgtcgtcgtgacgggttgtgaagtctctctttggttggctgaacagtttgcggccgacttgcaaaccgcatttccgagactcgccgtcaaggcggtaagctccaacaaggtgcttggactatttggccaagacatcgcggtgcccaccgttggattcccgcactcgaagaagaatgacgactttaccgattcacttgtcatcatcgtcagtcattccggcgggaccttcgccccgctcgcgacttccaatcttttaataagctcgacgagctcgatcttcgtcgtcgcgagcgagtgggatacccaaatcggtaagcaactccgcggaatcaaatcgaatgagctcttcgcgagtcgtatttttagcacggacgttggtgtacgtcccgcagagccgtgctcggtgagcgtcgcggcgactcagcaactgttgacacaaatattcatgcacatgtcgttggtgatactcgacaattccgatttccgcaagtacaccggagcggtgatatcaaagcacgatttggcagagctcgagcggtgcaaccaaatgaacatcgctgctctcgaggaaattgtcggtactacttctgatggtaagaagacgtattccgccgtggagagcgatcttcgtcgctctggcgacgtctgggcggaccacgttttggaaggagtaaaagggtggatattatcagccttgtacatcatcggcacggtgacagccggttacccactcatcaccggtatcgccaccgcttgcggcttagccgcgacgtgggcattctatctcactcgcttttttgacgcgttgatttacctgttcctcccgcaaatcaatattacgctcattcgtctgctgcaaggacgtgacgtccttcatcggatgacgggtcgcacagtcgtcatcggtgacattccgtgggtcgcgcaggctgcggatgcgtttttatccaagatttttgcgtgttcgtactccgcggcgggcattaacgtgttgagtgggaacccgaacgatcatctcgtgcataggcacacgcatcgcgttgtcagaggcgctttgctcttggtcggacgtccggacggtcgattgtcggcgctcacatcgtcagaggcgacagcttcgctctcgctgagccaggcgagcagtattcagagcgtcggtggcacgtgcgaatccgtgacaatcggacactcgccgttcaagcttccgctttctaagcgaggcatcttcttaaaccgtcatcgtccgttgtacttatgcgaaaagttggtgcaagaacgcgagggcgaaaagaatttggatggcaggtcaccnggtgcactnctcgggctgtactcgagttaccacgaagagtccgtcgaactctccattcacaagctttcgcagcgcaacgccgtgtctttgctcactgaagctgcgttgaacgcgtctcgcaacacggatgctttacgcgccgtcttcaacgagattgacgtcaacggcgacggcgcgttgtgcctcaacgagtttatcaaagcttacaaaaaagttgacagttctttgaccgangcacaaatttcaaagctcttccgcgacgcagacgtcgatggaagcggtgaactggactttgaagagttttgcgaagtgatgaaccttccagagatggacatgctcaacattttagagcgggatccgcgcaacgaggaaggcttgctcatggtcgaggcgtcgtccgaagagtactttgggcaagccattcgacgcagcgctccgaaaaaggtgaagacgtacacgctcgtggaatcgcaagagtttagcatgaagctctatgaagcgcgaatcgcgtcgcttcaacggttcgtcgccatgacagtcatgtttcatcaaatgggcgaccgcgtccaaaaattctggccgcgcgtctcattcgggtactttggctaccgcatggaccgcacgcacagcatcatgcgcatcgcaacgacggcatcgcccgtgagcggggctgaagtccgcgcgcgtcgtcacttcatcgctctcacgacggcgttctccaacgccgtttcagtcattcatcgcgtccatcgcgaattcacagagggcgtcaggctcgaaagaaaacggtcgctccgccgcacggcgtcgggtagaatcgctcgcgactaatcatccaccattgctctaatacacattcattccatccttctttggtttccgtcgcggtatccatcgctgatccgtcgttaacgttaacgcgcgcgaactgcacttcacttttttactctgaaagacagttggaccagccatgtcgcgtcgcgcgctccgcgcggcgctgtgngcgatgacgaaacatcgagcggtgtccgcaccgtctcattnccattgcgtcgcggctttctcgacggatancgaaccgcatggggaagaaatcatgcgcgctttgggtctctcgtcggacgactttgacgacgtctctcaaccgttcgagcgcgtcaaggacaaggcgtacgtcgaccggcgacgcgtgcgcgtgcaggcaggacgcggaggtggtgggtgcgtgtcgttcgcgatggatggtgggtcgaggcggaggagaggggcggatgggggagacggcggacgaggaggtgacgtcgtcgtcgtcgcgtgcgagagaaccaaggcgctcggggacgtgaaaaatctcgttcgaggcggacaaggtggagcgggagggagcaatgggcgtattgggagtcgaggtaaagatgcggagattcgtgtgccgctagggacgatggtttggaaggagctggaggagcctgacgaggactcggtggagacgtttgacgtagattttagcaaatggggaagcgaatcgccgatcgatcacgacgcagaagatgccgcgcaggaagaggtttcctcggaacaggcgaccgccggcgaggcgtggacgagaccgcggggtttgagccgagggagctggcaaatgttggctgatttgacagagcgcgggcagacgtgcgtcgtggcgcgaggcggtcgaggaggcaagggtaacaagagaatgccagtcggtaaagaggctggaacgcgcgaggctggtttggatggtgaagangctaagtttgttttagagctcaagtcggtcgccgacattggactcgtcggattgccaaacgcgggaaagagcacgcttttacgagcgctttccaacgccacgcctcgcgtcggctcttacgctttcacgacgatgcaaccgcagctcggcgcggtttcgacggctttcggtgataaagtgaccgtcgccgatattccgggcatcatcaagggtgcgcacgaaaacaagggtctcggtcac

SEQ ID NO: 621 - DNA, 4000 bp, Escherichia coli
  misc_feature (63)..(63): n is a, c, g, or t
  misc_feature (305)..(305): n is a, c, g, or t
  misc_feature (355)..(355): n is a, c, g, or t
  misc_feature (455)..(455): n is a, c, g, or t
  misc_feature (471)..(471): n is a, c, g, or t
  misc_feature (478)..(478): n is a, c, g, or t
  misc_feature (498)..(498): n is a, c, g, or t
  misc_feature (531)..(531): n is a, c, g, or t
  misc_feature (566)..(566): n is a, c, g, or t
  misc_feature (574)..(574): n is a, c, g, or t
  misc_feature (585)..(585): n is a, c, g, or t
  misc_feature (590)..(590): n is a, c, g, or t
  misc_feature (618)..(618): n is a, c, g, or t
  misc_feature (720)..(720): n is a, c, g, or t
  misc_feature (756)..(756): n is a, c, g, or t
  misc_feature (763)..(763): n is a, c, g, or t
  misc_feature (783)..(783): n is a, c, g, or t
  misc_feature (825)..(825): n is a, c, g, or t
  misc_feature (934)..(934): n is a, c, g, or t
  misc_feature (1041)..(1041): n is a, c, g, or t
  misc_feature (1214)..(1215): n is a, c, g, or t
  misc_feature (1217)..(1220): n is a, c, g, or t
  misc_feature (1222)..(1223): n is a, c, g, or t
  misc_feature (1287)..(1287): n is a, c, g, or t
  misc_feature (1289)..(1289): n is a, c, g, or t
  misc_feature (1291)..(1291): n is a, c, g, or t
  misc_feature (1293)..(1294): n is a, c, g, or t
  misc_feature (1299)..(1300): n is a, c, g, or t
  misc_feature (1302)..(1307): n is a, c, g, or t
  misc_feature (1310)..(1311): n is a, c, g, or t
  misc_feature (1313)..(1314): n is a, c, g, or t
  misc_feature (1317)..(1321): n is a, c, g, or t
  misc_feature (1323)..(1324): n is a, c, g, or t
  misc_feature (1329)..(1331): n is a, c, g, or t
  misc_feature (1333)..(1333): n is a, c, g, or t
  misc_feature (1335)..(1339): n is a, c, g, or t
  misc_feature (1341)..(1342): n is a, c, g, or t
  misc_feature (1346)..(1346): n is a, c, g, or t
  misc_feature (1349)..(1349): n is a, c, g, or t
  misc_feature (1353)..(1355): n is a, c, g, or t
  misc_feature (1357)..(1357): n is a, c, g, or t
  misc_feature (1360)..(1362): n is a, c, g, or t
  misc_feature (1364)..(1364): n is a, c, g, or t
  misc_feature (1368)..(1373): n is a, c, g, or t
  misc_feature (1375)..(1375): n is a, c, g, or t
  misc_feature (1377)..(1378): n is a, c, g, or t
  misc_feature (1383)..(1386): n is a, c, g, or t
  misc_feature (1389)..(1390): n is a, c, g, or t
  misc_feature (1393)..(1397): n is a, c, g, or t
  misc_feature (1399)..(1399): n is a, c, g, or t
  misc_feature (1402)..(1403): n is a, c, g, or t
  misc_feature (1407)..(1407): n is a, c, g, or t
  misc_feature (1409)..(1410): n is a, c, g, or t
  misc_feature (1412)..(1412): n is a, c, g, or t
  misc_feature (1414)..(1419): n is a, c, g, or t
  misc_feature (1422)..(1422): n is a, c, g, or t
  misc_feature (1425)..(1428): n is a, c, g, or t
  misc_feature (1430)..(1433): n is a, c, g, or t
  misc_feature (1437)..(1440): n is a, c, g, or t
  misc_feature (1443)..(1446): n is a, c, g, or t
  misc_feature (1452)..(1455): n is a, c, g, or t
  misc_feature (1457)..(1459): n is a, c, g, or t
  misc_feature (1465)..(1468): n is a, c, g, or t
  misc_feature (1473)..(1475): n is a, c, g, or t
  misc_feature (1479)..(1483): n is a, c, g, or t
  misc_feature (1487)..(1489): n is a, c, g, or t
  misc_feature (1494)..(1494): n is a, c, g, or t
  misc_feature (1497)..(1497): n is a, c, g, or t
  misc_feature (1499)..(1499): n is a, c, g, or t
  misc_feature (1501)..(1501): n is a, c, g, or t
  misc_feature (1503)..(1503): n is a, c, g, or t
  misc_feature (1506)..(1513): n is a, c, g, or t
  misc_feature (1515)..(1516): n is a, c, g, or t
  misc_feature (1518)..(1520): n is a, c, g, or t
  misc_feature (1522)..(1524): n is a, c, g, or t
  misc_feature (1527)..(1528): n is a, c, g, or t
  misc_feature (1531)..(1531): n is a, c, g, or t
  misc_feature (1533)..(1544): n is a, c, g, or t
  misc_feature (1546)..(1547): n is a, c, g, or t
  misc_feature (1551)..(1551): n is a, c, g, or t
  misc_feature (1555)..(1555): n is a, c, g, or t
  misc_feature (1557)..(1557): n is a, c, g, or t
  misc_feature (1559)..(1559): n is a, c, g, or t
  misc_feature (1561)..(1561): n is a, c, g, or t
  misc_feature (1563)..(1565): n is a, c, g, or t
  misc_feature (1569)..(1570): n is a, c, g, or t
  misc_feature (1574)..(1579): n is a, c, g, or t
  misc_feature (1582)..(1582): n is a, c, g, or t
  misc_feature (1584)..(1593): n is a, c, g, or t
  misc_feature (1595)..(1599): n is a, c, g, or t
  misc_feature (1601)..(1603): n is a, c, g, or t
  misc_feature (1606)..(1612): n is a, c, g, or t
  misc_feature (1614)..(1619): n is a, c, g, or t
  misc_feature (1621)..(1627): n is a, c, g, or t
  misc_feature (1631)..(1635): n is a, c, g, or t
  misc_feature (1637)..(1637): n is a, c, g, or t
  misc_feature (1639)..(1640): n is a, c, g, or t
  misc_feature (1642)..(1643): n is a, c, g, or t
  misc_feature (1645)..(1650): n is a, c, g, or t
  misc_feature (1653)..(1655): n is a, c, g, or t
  misc_feature (1657)..(1658): n is a, c, g, or t
  misc_feature (1661)..(1661): n is a, c, g, or t
  misc_feature (1663)..(1665): n is a, c, g, or t
  misc_feature (1668)..(1669): n is a, c, g, or t
  misc_feature (1674)..(1680): n is a, c, g, or t
  misc_feature (1682)..(1682): n is a, c, g, or t
  misc_feature (1684)..(1684): n is a, c, g, or t
  misc_feature (1688)..(1689): n is a, c, g, or t
  misc_feature (1691)..(1692): n is a, c, g, or t
  misc_feature (1695)..(1697): n is a, c, g, or t
  misc_feature (1701)..(1701): n is a, c, g, or t
  misc_feature (1706)..(1707): n is a, c, g, or t
  misc_feature (1709)..(1710): n is a, c, g, or t
  misc_feature (1713)..(1713): n is a, c, g, or t
  misc_feature (1716)..(1720): n is a, c, g, or t
  misc_feature (1722)..(1726): n is a, c, g, or t
  misc_feature (1729)..(1729): n is a, c, g, or t
  misc_feature (1733)..(1733): n is a, c, g, or t
  misc_feature (1736)..(1737): n is a, c, g, or t
  misc_feature (1739)..(1740): n is a, c, g, or t
  misc_feature (1742)..(1747): n is a, c, g, or t
  misc_feature (1749)..(1753): n is a, c, g, or t
  misc_feature (1755)..(1757): n is a, c, g, or t
  misc_feature (1759)..(1760): n is a, c, g, or t
  misc_feature (1762)..(1762): n is a, c, g, or t
  misc_feature (1764)..(1770): n is a, c, g, or t
  misc_feature (1772)..(1775): n is a, c, g, or t
  misc_feature (1779)..(1782): n is a, c, g, or t
  misc_feature (1784)..(1786): n is a, c, g, or t
  misc_feature (1789)..(1791): n is a, c, g, or t
  misc_feature (1835)..(1835): n is a, c, g, or t
  misc_feature (1985)..(1985): n is a, c, g, or t
  misc_feature (1992)..(1992): n is a, c, g, or t
  misc_feature (2003)..(2003): n is a, c, g, or t
  misc_feature (2234)..(2234): n is a, c, g, or t
  misc_feature (2296)..(2296): n is a, c, g, or t
  misc_feature (3203)..(3203): n is a, c, g, or t
  misc_feature (3470)..(3470): n is a, c, g, or t
  misc_feature (3640)..(3640): n is a, c, g, or t
accctcctccagtaactcaagggtttcttctggtgtagccatgccatatatacctttcgaagntttcttatcataatggatacttctggcttcgcgaggaaagttgtaaccaacattcttgcaatttttttcaatatatcttcttaactctaaaagttgtttttttatttttttttctatattagtatttttagaagttttatttgttttgctaaataaattcggagccataactgattttctaactgaggtagaatcacaataaatacaattaataagtttttttctctgctgcacatcgtgcncatctgaacttgaaaaccaactttcaaacgtttttccgcattcacatatnaaattgtattttatcatcaataattatattatttaatttttagttaagaaaaacacaagtcttaatttctataatcggcatttatatctatatattcgtntgtaaaatcacacgtntaaactntgtgaaatgcatttccaatntttaaattgacttcaatattaattgaatcccanttcatatactcttttatatcactttctttataatntttggcanttttattttgntcagnaactaaataatctccaatttttatttgnattttgtttggaataatattctctcctgattttccaattgccataacaatcctaccccagtttggatcctctcctgcaattgcagttttaaataaaggaganttggcaattgaaaagccaatattttttgccatagtngttgatnttgctccaattacttttatngtaataaatttttttgctccttctccatctacaacaatttgnttggaaagatttaacgctaatctatgtaaagctttttcaaaatcttgtagtttaggatctaaaacattgtatatttttgaattttttgctttaccggtagcaaaaatancaaccatatcgtttgttgaagtgtctccatctacagttatagaattaaatgttgttgtagcaactttccttagaatagcttttaaaaatacagaaggtatatttgcntcagtaaatataaatgacaacatagtagccatattgggagcaatcatacctgaaccttttgcaatgcctgaaattttaactaatttattacctatcttacattcttcgtaagcaagctttggttttgtgtcggttgtcattatcgcggtcgcagccttaaaccaaataaactnntnnnntnnagtccttaatttttttactaattcagggattctgttttttatttttaaataaggaaaatctccncnantnnccccnntnnnnnnaannannaannnnntnnttttnnnancnnnnntnncccnttngggnnntnggnnnantttnnnnnnangnnctttnnnnaannatnnnnnanttnntttnanncntnnnnnnccnttnnnncnnnnaaannnnttnnnntttttnnnntnnncaaaannnnctttnnnaaannnnntttnnnttttnaantncnanttnnnnnnnncnnannnannnttnnatntnnnnnnnnnnnngnnaaanttgncncntncnnnaaannaaannnnnnaangnnnnnnnnnncnnnnncnnnaannnnnnncnnnnnngnnnnnnntttnnnnncntnnanngnnnnnnaannntnnaantnnnccnnttttnnnnnnntnantttnngnnttnnnaaanttttnnannttnaannnnntnnnnnttnaaanttnntnntnnnnnntnnnnnannncnnantnnnnnnntnnnntttnnnntnnnttnnnaaaaaaaataaatatttatgctaaacattagcaagattatcggnaaatttattaaaaattcaagccaaagagaactggatcgtttaaggttaaccatcgaaaaaattaatgcctacgaaccaaaaatcaaagaaatgcctagtgaaagttttccagccaagacggctgaatttaaatcaaaaattcaaaaaggnacagctntagaagatttnattccagaagcttttgcatgcgtaagagaagctgccagaagaaccttgggtgaacgccattatgatgtacagctaatgggtggcattattcttcaccaaggtaaaattgcggaaatgaaaacaggagaaggaaaaactttggtatctacactacccgtttatttaaatgcactaacggacaaaggagttcacgttgtaacggtaaatgattatttagcaaaaagagattcngtatggatgggtcaagtatacaattttttaggtttatctgttggatgtattacaaatgaaangggggatgagattagaaaaaaaaattatagctgtgatgtaacttatggaaccaataacgaatttggttttgactatttaagagacaatatgaagtacaacattgaccaaatggttcaaagaaatcattttttttgtattgtcgatgaagtagatagtattcttatagatgaagcaagaactccccttgtaatttctggagcaaccgaagataaatcggaccaatatttcgtaagcaataattttattaaacaacttgaaaaatctgactatgaactagatgaaaaagacaaaaatgtgatgctttctgaaaaaggtatagacaaaatagaaaaactatcacaaacatatggaattcttaaaaacaataatttttttgatccgcaaaatattaatttagttcatcacattaaccaagctttaaaagcgaatttgttattttcaaaagacactgactacattgttagagataacaaagtgcaaattattgatgaatttacaggaagagcgcttgaaggtagaagattttctgatggactacatcaggctatagaagcaaaagaaaatgtcgaaattcaaagcgaaaatcaaactctagcttctatcacctatcaaaattattttaggctttatgaaaagctgtccggaatgacgggaactgcacttactgaggcagaagagttttatgacatttataaactaaaaacagtttcaatacctacaaatgagttgatgataagaactgatttaaatgatcaaatttttagaacagaaaaagaaaaatataaagctataattgaaaaaatagaaaattgttacaaaacaaatcaacccgttttagttggaacaactagcatagaaaaatctgaaaaaatttcacttttacttaaaacaaaaaaaataaatcanaatatattaaacgcaaagcaacatgaaaaagaggctaaaataattgctgaagcaggtaagttgggagcaataacaatagcaaccaatatggcaggtagaggaactgacattcagttgggaggaaaccaaagtcttttaaccaaagaagaattaagcaaccaaaaagacttaattttacaggaaaaaaatgaagttataaaaaaagggggtctatttgtaattggaaccgaaagacatgaaagcagaagaattgataaccaattgagnggacgatcaggaagacagggtgatccaggcaaatctatattttatataagtttagaggatgatttgatgagaatatttggttctgaatctatagacggaataatgcaaaaatttggattaaaggaaggggaatcgattgaccacccgtggataaataaagctttagaaanagcacaacaaagggttgagtctcgtaattttgacataagaaaaactttattaaagtttgatgatgtgatgaatgatcaaaggcaagtaatttttgaacaaagaaaagaaatcctcatatcaaataaagttgacaaaataataaattcctttttagaagatttatacaaaaacctctcaaatgaaaaagtaatttatgaaagagaaaatcaacttaatgcctttaaagctaaaataaagcctatattgggccgatcatttaaagatgaagaattggtaaatattacaaagttaaaaaaagaagagtttgaaaatattattaaagaaaaatttaatgaatctagaaacaaaagaaacaaact

SEQ ID NO: 622 - DNA, 4000 bp, Escherichia coli
  misc_feature (237)..(237): n is a, c, g, or t
  misc_feature (246)..(246): n is a, c, g, or t
  misc_feature (1424)..(1424): n is a, c, g, or t
  misc_feature (1615)..(1615): n is a, c, g, or t
  misc_feature (1790)..(1790): n is a, c, g, or t
  misc_feature (1861)..(1861): n is a, c, g, or t
  misc_feature (1873)..(1873): n is a, c, g, or t
  misc_feature (2941)..(2942): n is a, c, g, or t
  misc_feature (3569)..(3569): n is a, c, g, or t
gctgggtcgaattgcaggcaggcgtggcagatccattcaggcccgaactgccaggcctggcagtgtgcgcagcgctgcacgcgcagcacgccttcgcgcaggccgttccagtacggcgccgagacgccatccggctcgggaaccggaatgggcaggcccggcggaaggtaggaagaaggcatggtcatcgcggtgtctctcccagtgcatcgcgcgagcccagcaacaggttgctcnccggcgccnccatgggtcccccgatcaccagcgccacgtcgctgcgcgccgcctgcgccgtggaggtgccgcgcacctgccgtaccgcctccagcaccagctcgaagccatgcatgtagcactcggcgaggttgccgccgctggtgttcagcggcagccgcccgctcggtgcgatcaggttctccaaggtgaggaagtcgttcgcctcctgcgggctgaagaagcggtgttcggccagggccatgacaacgcccccggtgaagttctcgtagctctggaccacgccgacgtcggcggggccgaggccggccatccggtagagatcctcggccaccgtttcgaagttcgccgaggcataggacggcgaattgtgggcgtgcgtggcgaagcgatggctcgacccggaggcggctccgagcaggtacaccggcttgtgcgcgaaatcggcggcgcgctcggcatccaccatcacgatggccgcggcgccgtcgttctccatgcagcagtcgaacaggtgcagcggctcggcgatccagcgcgaggcatcgtacttttccgcgtccagcggcttgccatgcatcacggcccgcgggttcgcctgcgcatggtgataggacgccagtgcgatggcacgcagcgcctcctgccggatgccgtgctcatgcatgtagcgctggatccgcatggcgaagcgctgcggcggcgagatcacgccgtagggcaccaggtaggcgcgctcgcccgagatcgtgccgctgccggcgctctggccgaagcggccgtactgcccctggttgagcgaacgaaacaccaccacgcagtcggcttggccggtggcgatggcggccgcgccattggcgaccgcggcgcagcagccgccaccgccgccgccccactgcatggtggcggagcgcaggcgcggcagccccagcgcggaggccaggcgggtggcttcgctgcggtcgtcgccgtacgaggcgaagccgtcgatgtggcgtggatccaggcccgcgtcggcgcaggcgcgcagcacggcctgcagcgccagcttgaactcggcatcgggagactggccgtgcttgtagtagtgcgtctccccgatgccgacgatcgcgacacggcccttcagtgtgcgctgggccatcgttgggaccgcatcagacagtgatgttgaacttcttcacgancggcccccactgggcgatctcgccttcgatcgtgcggcccagctcttcctgcgtgctgccccacggctccacgttgcggtcggttaagaacttgctgacctcggggcggcgcaccgcggcggcgatggtgctggaaagcttctgtgcgacggggtcgggcacgccagccggggccagcacgccgaaccacnccacggcctggaatccgggcacggtctcggcgatggcaggcaggtccggcagcactggcgtccgcttgggcgacgccaccgccaggtagcggatcttgccggcctgcaccatggcagcgccatccagccccgtcacgaacgccatctgcacctggcccccggcgaaagcggtcancagcggcggggcgccggtataagggatgtgctggaagcgggtgccggccagctcgttgaagtactcgctgnagaggtgggaancgccgccgacgccggtggagccgtaattcaccttgtcgccccgcgaccgcgcccacgcgacgaattcggccacggacttgtggggcgaatcggcgggcacggcgaggatcatcgggacccgcatcacgccggagatcggccggaagtccttctgggggtcgtagggcagcttgcgcatcaggccggcggtggcgctcgggccgctgttgccgaacaccagcgtgtagccgtccgcgggctgcttggcgacgtagtcggtaccgatggtgccgccggctccaggcttgttttcgacgatcacggtctggcccagcacctcgcgcatcggttgggcgatcgcccgtgcgagctggtcggtggtaccgccggccgggtacggcacgacgatgcggatcacccgggagggaaacgcctccccctgctggctgaaggcgggaagccccacggaagcggcggcgccgccggcggccagcatcctgagtgcgctgcgacgggtgtgcagggtcatggttgtctcctggttgtgaatgcgcgccgctgctgccggtcgcgcggggttgaaatcaagatgcgggcaccgggtcgcggtccatcgggcccggcacggctgcggctgcggctgcggctgcaggaccgaaggcaccggcgcgctccagttcggcgatctgccgttcgtccaggccaagagcgtcccgcaggacctcctgcgtatgctgccccaccgccggggccgccaccggatcggccatgggcgtggcggcgtagcggatcggcaagcgcacgttcggaacccagccgagcaccggatgggggatgcgggtgacgagttcgtggtcgcgcgcctcgggcgagcggatcgcctcgcccaccgtgcgcaccaatccgtagggcacgccggcggcgcgcatgcgagcctgccagtgcgcccagtcgtgccgcgcgaacgcttcgtcgaggaaggcgaacaggcgctcccgatgccggatgcgcaggggacccgtggcgtaatccgcatcggcggccacgtccggacgttccagcacctgccccatgagccgctggaagatnntgtcgttgccgctgttgatgtagaaggtgcggtcgctggcgcggaaggcgcccgaggggcaggtgtcgggggcggtgttgccgctgcgttgcggctccttgccggtgaacagcgactgcatggtcgcatagcccgtcatcaggacggccgtgtcgaacagggacacctccacccgctggccgcggcccaggcgctcccgggccagcaacgcgccgagcacggcgttgcccaccatcatggcggtgctgatgtccatcaccggcgagagcgcccgcacgccttcgcggtcgggataaccgttcatggaaacgaagccgctttcggcctgcgcgatgggatcgaagccgaagcggtcggcgaaggcgccttcgcggctgtaggcggccaccgagcagtagaccaggcgcgggttcagggcaaggcaggtctcgtggtccagccccaggcgacgcatcacgcccgaggagaagttctcgaccagcacgtcggcgcggcagacgaggtcgcgcgccagcgccagcccctgcggggacttcaggtccagcgcgatgctcttcttgttgcggttgctccagacgaagggtgcgccctggtccagttgcgggtgcatgggcggatagcggcgcncgtcgtcgccgcggaccggcgcctcgaccttgatcacctcggcgcccatgtcggccaggatcatggtcgccagcggccccgcgatgaagtgcgagaagtccaccacccggatgccgtccagcgcatggggtgcgccggaggcccgtcgcttgtgctccggaaagtcggcttcgaggttctccaacatgtcctggccgcctgcctgcatcggagaaccgctcacggcgtgtacccgaagcccttgccgagctccgccttcatgtagtcgcgtcccagttccatccagtcggaaccggcggggatggtgacggagatggcccgcatcatgaaggaagacggcttcgcggcggagaccggctcggcgccctccgccagcttcttcgcgctctccaggagcagccggcgcacgcgcacgatgcctgcatcggtgg

SEQ ID NO: 623 - DNA, 4000 bp, Escherichia coli
  misc_feature (224)..(224): n is a, c, g, or t
  misc_feature (2511)..(2511): n is a, c, g, or t
  misc_feature (2535)..(2535): n is a, c, g, or t
  misc_feature (2577)..(2577): n is a, c, g, or t
  misc_feature (2583)..(2583): n is a, c, g, or t
  misc_feature (2616)..(2616): n is a, c, g, or t
  misc_feature (2658)..(2658): n is a, c, g, or t
ctccaccaccataaacagattttagcattacaggataaccaatttcattagcaattttttctgcatcatctgcatcttttactaaacctggacttccaggtacagttggaacttcagcttttaacattgcagccttacatttcattttatcaccacaaagattcatagaatctgcagaaggaccaatgaaagtaagtttatttttttcacataatcttgcaaantcatcattttcagaaaggaaaccataacctggatgaactgaatctgcaccagatgacaacattacatctaaaattttttcttgattaagatatgattttgcaggagttgcttcaccaatatggtatgcttcagttgcttgttttacatgcattgaatttgtatcttcatcagaatatacggcaactgttttaattccaagggctttacaagttcgaattacacgtaaagcaatttctcctctattagcgataagtactttctcaatcatatttaatcacaaattgatatttccatgttttctaggtaattgtttttctcttttgtttgcaagcatttcaagtgctttaatcaacataggtcttgtttcagcaggatcaattacattatcaacagttccatgagatgcagcaacgtaaggattttcaaatttttgtgcgaattcatctatgagttcttgtttaagagtgtcagggtcatcagaagaagcaagttcttttctattcataatttttacagctgcttcaccacctaaaacagcacatttggcagttggccatgcataatttacatcagttctaagatttttacttcccattgcaatgtatgcaccaccatatgccttaccaataactaaagttattcttggtacagttgcttcacaatatgcataaagtaacttacttccatgtctaatgattccgttatgttcctgattagaacctggcatgtaaccaggtgtatctactaaagtaattattggaatattaaatgcatcacaaaatctaatgaaacgagatgctttatttgatgaatcgatatctaatgcacctgcaagatgcataggttgattggctacaattccaacaacattaccatttagtcttccatatccaattacaatatttggtgcaaacaattcatgaacttcaaagaattcatgattatcaacaactgaattaataatttctttcatgtcatatggttgtaaaggattttcaggcattatgttaatcaaattgtgatctagtcgatttggatcatcatcagttgtaagtttaggtggttgttcagtattattttgaggtaaaaacgaaattaattttttaatgtaatccatacattcgtattcattttcagcaacaaaatgtgcaacaccgctttttgaaccatgtgtattagcaccaccaagttcttcaaaagaaatttcttcacctaatacagttttaacaacatcaggtccagtgacaaacatacttccaattttttcaaccattataacaaaatcagtcattgcaggagaatatactgaaccacctgcagaaggaccaacactagcagtaatttgtggaattactccagaagctaattggttgtgataaaagatatctgcaaatccatctaaactcataattccttcttgaattctagcaccgccagaatccataattccaataattggacatcctgtttttaatgcatgatccattaatttagtaatttttttagctcccatccgacttaatgttccacctaaaacagtgaaatcatatgcaaaaacaaagatttgtcgtccagatacattcccataaccaccaactacaccatcagtgaaaaatttctttttctgcatgccatattcatgataatgatgagttgccaatggatcaatttcaacaaaagtaccttcatcaagtaaaagattaattctttcacgagcagttaatttacctttctcatgctgagcaccaatacgatcttgacccccaccttgtaatgcggtatcactatttttagtatattcatcaatcttttcagaatgcataatatgatctgattcatggagttttcatatattaatctagattcaattttagattattgtaaaaattcatagatcatgtatactttaacaaattatgagttaagaagagagaatttctttttagaggatttttgatatgaactaaaagcatccttttcatcactacatttcttacaaatacataattgagatacattgggtatatcacaaatatcttgaaattcacattgtgcacatccagctgatgagccacatacaatacattgtaattcattgacctcagcacatttttcatgtttgacaccaactccttttgaccaaagtccaatttcattaatttcaattttatcattacaaataatacatgttcccggaaatttcattggaatttttatccaactcattatatcaattcaatctccttatcaataatatcaccaaaagtttcttccaattctaattcnaaagttttatttttaatacaaaanaaaacatatggtaaacacaatgttacaaatgaactagaaganagatgnagtttttttgccattacagaagatagtgatttnatttttgaaccatcccaacgaattctatttaataatggccangacaaattatatttagaatatctgattcgatcgtctttttgatacaagttaattaaaatatcattaagataacgtagtaacctccaattttgagttttcataattttcccaaataacatatcagcatttgaaataacttctaaatattttgcaagtgaatcactatctaaatcactagttactatactagaataaaatgcatcaatttttttcctaggatcaatttgtattgaatacaaaacacctctagcttcttcaatagaatttgctttgaaaaatgcatttattccatcttcaatattgatactttcaaaagaagtttctgtttgaggattaaatccagtaatcaaagattgagttaaattaatcattgaacgaatatcaccttgagatttatcaatgactttgattaaagaacctggacttagttttgtattttctttttttaaaatattatccaaataaacacgtagaagacgtggtggaatttttttaaatgatattgttgttacggcttttttgatactcttcattttatctgaatcatcataatttgcagcaagtaaaattgggacatttggtttttttaagatatcaacaagggcagcagcaccaccatagtctccacgaccatgaataccatctacctcatcaacaaaaatcatgggaattcctaaaacactaacgttacctaaaacaggcgtaagaatttcattaattctagatttacttcgtacatcactggcattaagaccaatcatatcgtaaccaaattgtttagctaaaagatatgcaatggtagtttttccaattccaggaggtcctactatcaaaagaggttttgttccttttttccattttgcaaaccattccataatggctacacgtggttcttcattacccaccatatcagaaatattctgaggtcgatatttttcagaccacatcaattttatcacttagttggaagatttttgttcaaatctgaccaaatattttcttcttgtaatttcttataccaaaattgattatagtgttcaacagtaagaaataaaaattctaagaactttgtatgtgagaatttatcaggtaatttttcaagagcatctcttgcgtcacttaggtatgattcactatgattcattgtttcttcaaaaccactttttgcatcattcattttcaatgaataaaataatggccaagaaggaatttttgcagctctatctcgaatactatcttcaatttcatttccacatccaacagattcagctgcttttgccattccagtataaaaaatatcagctaaaggtgcacgattcaatgccatatttctaccagcagt

SEQ ID NO: 624 - DNA, 4000 bp, Escherichia coli
  misc_feature (697)..(697): n is a, c, g, or t
  misc_feature (906)..(906): n is a, c, g, or t
  misc_feature (1952)..(1952): n is a, c, g, or t
  misc_feature (1964)..(1964): n is a, c, g, or t
  misc_feature (2003)..(2003): n is a, c, g, or t
  misc_feature (2136)..(2136): n is a, c, g, or t
  misc_feature (2139)..(2139): n is a, c, g, or t
  misc_feature (2455)..(2455): n is a, c, g, or t
  misc_feature (2457)..(2458): n is a, c, g, or t
  misc_feature (2460)..(2461): n is a, c, g, or t
  misc_feature (2463)..(2464): n is a, c, g, or t
  misc_feature (2466)..(2466): n is a, c, g, or t
  misc_feature (2469)..(2470): n is a, c, g, or t
  misc_feature (2472)..(2472): n is a, c, g, or t
  misc_feature (2474)..(2475): n is a, c, g, or t
  misc_feature (2477)..(2478): n is a, c, g, or t
  misc_feature (2480)..(2480): n is a, c, g, or t
  misc_feature (2482)..(2486): n is a, c, g, or t
  misc_feature (2525)..(2525): n is a, c, g, or t
  misc_feature (2531)..(2531): n is a, c, g, or t
  misc_feature (2632)..(2632): n is a, c, g, or t
  misc_feature (2634)..(2635): n is a, c, g, or t
  misc_feature (2637)..(2644): n is a, c, g, or t
  misc_feature (2646)..(2647): n is a, c, g, or t
  misc_feature (2649)..(2651): n is a, c, g, or t
  misc_feature (2653)..(2653): n is a, c, g, or t
  misc_feature (2655)..(2656): n is a, c, g, or t
  misc_feature (2659)..(2659): n is a, c, g, or t
  misc_feature (2662)..(2662): n is a, c, g, or t
  misc_feature (2665)..(2665): n is a, c, g, or t
  misc_feature (2667)..(2669): n is a, c, g, or t
  misc_feature (2671)..(2672): n is a, c, g, or t
  misc_feature (2674)..(2674): n is a, c, g, or t
  misc_feature (2676)..(2679): n is a, c, g, or t
  misc_feature (2683)..(2686): n is a, c, g, or t
  misc_feature (2688)..(2696): n is a, c, g, or t
  misc_feature (2698)..(2698): n is a, c, g, or t
  misc_feature (2703)..(2703): n is a, c, g, or t
  misc_feature (2765)..(2765): n is a, c, g, or t
  misc_feature (2768)..(2768): n is a, c, g, or t
  misc_feature (2770)..(2770): n is a, c, g, or t
  misc_feature (2772)..(2772): n is a, c, g, or t
  misc_feature (2776)..(2777): n is a, c, g, or t
  misc_feature (2779)..(2780): n is a, c, g, or t
  misc_feature (2783)..(2783): n is a, c, g, or t
  misc_feature (2787)..(2787): n is a, c, g, or t
  misc_feature (2790)..(2791): n is a, c, g, or t
  misc_feature (2797)..(2797): n is a, c, g, or t
  misc_feature (2802)..(2804): n is a, c, g, or t
  misc_feature (2807)..(2807): n is a, c, g, or t
  misc_feature (2811)..(2811): n is a, c, g, or t
  misc_feature (2815)..(2817): n is a, c, g, or t
  misc_feature (2822)..(2822): n is a, c, g, or t
  misc_feature (2824)..(2825): n is a, c, g, or t
  misc_feature (2828)..(2829): n is a, c, g, or t
  misc_feature (2834)..(2836): n is a, c, g, or t
  misc_feature (2838)..(2838): n is a, c, g, or t
  misc_feature (2846)..(2846): n is a, c, g, or t
  misc_feature (2848)..(2848): n is a, c, g, or t
  misc_feature (2854)..(2854): n is a, c, g, or t
  misc_feature (2856)..(2856): n is a, c, g, or t
  misc_feature (2894)..(2894): n is a, c, g, or t
  misc_feature (2921)..(2921): n is a, c, g, or t
  misc_feature (2926)..(2926): n is a, c, g, or t
  misc_feature (2939)..(2939): n is a, c, g, or t
  misc_feature (2957)..(2957): n is a, c, g, or t
ctcgttacgccgcgtcgcgaggagcgcagccgcgatgagggcgacgagagcgacgagcgcaccgaagccgggcgtgccgtcttcggagtcgccgccgtcgtcaccgccgtcggagccgtcggatccatcgtcggagccgtcgtcaccgtcgtcggttccgtcgtcaccatcgtcggtgccgtcgtcaccgtcagtgacgttgccgtcgtcaccatcgtcaccgtcggtaacgttaccgtcgtcaccgtcgtcaccgtcggtcacgttgccgtcgtcaccatcgtcggtaccgtcatcgactgcttcgatgaccgtaccgtcgacggacgggttctcgtcaaggcccgtctgccggaccgtgaacgtgtactcgtcaccgaccgaggtgtcactgaagtcgaattcagtcatccacgtgccgtcagcgttgacacgcacgccctcgctcgtctcgatgaacgagggactcgtaccagacgccgagcggaggcggacgttcacttcagtaccgggcgcaacgttcgaggtgcccgagacggcctgaccctcagcgttcgtcacgttgtaagggtcctggtcgaactcgaattcacgctctgccacgtcgaaggaagcggtcacgctctggtagtactcgttggtgagctcgttcgtcgagagagcgtcacggtccgagtcagacgggttgaggaggcgntcgtcctgcacgcggaagcgtgcgtcgaacgcttcgccatcctcagccgacgtgtcgtcgaggtcgtagacgacgtagtagttgttcgtctcctcgtctgcgaagaccgtcatgttacccaggatgttgctctgcagttcagcgggatcctggttggcggtcgtcgaggcctgagtctgacggacacgcaggctgagcgcaccgtcgtnggtgccgatacccgcgccggtgtcggtcactgcatcgttaagcgcggtggtcgggtcgtcgtcgtactgcgcgaggaggccggacaggccggacgcctcgatctggtggatgacgtagtcgccctcggcgatcgtgctcgcctgggtcacgttgtcaccctcaatctgggagttcagctcttcgagcccgtcctcatcgtcggcatctgctgcgtcgacgatgtcagtgacggtgccttcagaggtcgtccagatctgctggttcgtcgtcgcgcgctgttcgagcacgagcgtcccgatcgtgtcgggatcgtccagcgtatcgtcgtagtcgctcgacgtactcaccgagagcgtgtagtcgccatcggagaggacgtcggaaatctggttctgctggaagttgtcgagctcagcgtccgtgtcgtccgggttcgcgagctcaaagaccgtcccgttaccggagctacccgcggcgtagctgttgaacaggacgttcacttcgtcttcgccgttcgagtcaatcgtgatgttaccctggtagccaacatcgtcttcgtcgccgacgaggagcgtaccagtttcagcggtaccgtcaaaggtgacggtgatgttcgcgacgtcaccctgctgttcggtgacgatgctctcgccaccaagggtgagttcaccctcgccgagctcggtcacttcgatcgagtcggtgtcggaggccgtagtgtcctcgacgtcgaagtcgaaggagtagttgccgccgtcaacatcagtgaagttcgcaacgaaggcttcgccgtcctggacgtcctcgatgagcaccgtgtcatcgtcgccgtcgtcgaggccggttgcgctctcgtcgtcgaagatgttctcgagttcttcttcggagagctcgctgtcgtcaaggtcgccgctcacttcaacgtcgaattcgccacgcagcgatgcaacgtcgacgtcgatcttctcgtcgttgttcgcttcatcctcagcaaactctgccgagaggtcctgcgtgagaacttgcgcctcagcgatgtcggatncaccaagaaccntactgaactctccgtcagtaccagcgccggtcgttccgnctgctaggagcccgttagacgtccgaaggacgtattcggcttcaccacggagacgatccgtttcgatggagatcgtccgatcaccgctaacggtgagggagcgggctagtcgcgtgttggtcgcgtacccgtnacnattgcggttagtgacctctcgcacggtgacctcgtcaccgggagcaacattgctgccactaaggtcaacagtaactgtctgaccttcccagagctgcgaaccgtcccaatcactatcggtgatgatatccgcatcagaatcatcgacagtggcggtaccatcagcctgaacgttatttaagctggcctcgaatccgctcgtaccgttgtcggcgtcagccgccaacacagcatggaactggatctcgtcgccagcaccggaagcgattccctgactgtccagattgacacccgtgaaggttgtggagtctgcgtcngnngnngnngnagnngnanngnnancnnnnnaattatcgtttccagtgatgaagagtgaaacttcatcancggcgnccggagtgttagccgggtgcgagactgtgaaatccgcggagttcacattgtcttcggtgagcggtgcgtcaaggctgacatcctcagcggagtaaacctcnanntnnnnnnnngnngnnncngnntcngtnccngnnncnncncnnnngctnnnncnnnnnnnnntnccggngggaccttcaacattgctgaggtcgtgctcgaaggaggcagtgactgttgcgacgtcgtctnctncngnggtnncnntgncttnganntcgagnacgtnnntgntctngtcnnnctccnanncgnngaggnnnanattaccantngtactngnggagatggttacgtcctgtagcgacggaacagcttccncgtctgccgcctcagagaggtcgacantcacnttgtcgctggcantgtcgctaattgtaaccnttacctgtacgtcctgctctgacgagtcgaacccagccgtcacgggttcggcggccgcagagtcgatggtactgtttgtaccatcaaggtcggctgctgccggagcagcagcgaaaccaattgcgaccatggagacgaccatgatcgccgcgaagaagaccgcactggccttcttacgtgtattattgtcgtttgtcattgtgtgttgtgtttcgcatcgaccacagcagctttcccgtcaccttcgatccacgcccgatcttcgtcgccgccaacatcatcatcaaattgcgaccggactcggttctcggtacttagtactgcagtcatttgggtaggggttgcaagcgaaacatacagcggtcaatataaatgctttgtggggtattcatcgtgtgttaacccgtaacaaccacgcgagaaggcctgaggcggacgatctctgtttaagccgggattaccggacagcggatcgtggtataaaggctcgcgatcgaacgggctgtgaccgcgatcgaccccgaacaaatgccggatcgccgcgaatccgcgtcggcgatgcttgcgcgcagtggggactgggaacctccctgtgcgtcgacaccgcccagccgccgggtatttagggcggtcggggacgtagatactcccgggtgcgcccggacgcgccaccgcctcgggtagggggtcgcgtccggccgcgccacacgctccctttcgacgccggaaccgcgcgaatttgctgcgcgttccgggcgtcgacggcgactcccccggtcgcccgcccgcgatcgacaccgagacccgcagaggcacacgccgcgaacgcggcccgcgtgtcgggtccggtcggatcgggggtgactgcaatactccctgacgaatactcggatactaacactcatacgtccgcgccggagacggagcggtatgccaaagatcagcgtcgagatcccgggcgaactgctcgacgacctcgacggccacgtcggcgacgacggaaagttcgtgaaccgcagcgacgccgtccgcgcgtcgatccg

SEQ ID NO: 625 - DNA, 4000 bp, Escherichia coli
  misc_feature (331)..(331): n is a, c, g, or t
  misc_feature (592)..(592): n is a, c, g, or t
  misc_feature (601)..(601): n is a, c, g, or t
  misc_feature (633)..(634): n is a, c, g, or t
  misc_feature (637)..(637): n is a, c, g, or t
  misc_feature (657)..(657): n is a, c, g, or t
  misc_feature (661)..(661): n is a, c, g, or t
  misc_feature (672)..(672): n is a, c, g, or t
  misc_feature (682)..(682): n is a, c, g, or t
  misc_feature (718)..(718): n is a, c, g, or t
  misc_feature (737)..(737): n is a, c, g, or t
  misc_feature (751)..(751): n is a, c, g, or t
  misc_feature (790)..(790): n is a, c, g, or t
  misc_feature (835)..(835): n is a, c, g, or t
  misc_feature (838)..(838): n is a, c, g, or t
  misc_feature (840)..(841): n is a, c, g, or t
  misc_feature (853)..(853): n is a, c, g, or t
  misc_feature (856)..(856): n is a, c, g, or t
  misc_feature (859)..(859): n is a, c, g, or t
  misc_feature (862)..(862): n is a, c, g, or t
  misc_feature (865)..(868): n is a, c, g, or t
  misc_feature (870)..(870): n is a, c, g, or t
  misc_feature (874)..(875): n is a, c, g, or t
  misc_feature (877)..(879): n is a, c, g, or t
  misc_feature (884)..(884): n is a, c, g, or t
  misc_feature (886)..(887): n is a, c, g, or t
  misc_feature (889)..(889): n is a, c, g, or t
  misc_feature (895)..(895): n is a, c, g, or t
  misc_feature (899)..(900): n is a, c, g, or t
  misc_feature (903)..(904): n is a, c, g, or t
  misc_feature (906)..(909): n is a, c, g, or t
  misc_feature (911)..(914): n is a, c, g, or t
  misc_feature (916)..(929): n is a, c, g, or t
  misc_feature (931)..(932): n is a, c, g, or t
  misc_feature (934)..(942): n is a, c, g, or t
  misc_feature (944)..(944): n is a, c, g, or t
  misc_feature (947)..(947): n is a, c, g, or t
  misc_feature (950)..(952): n is a, c, g, or t
  misc_feature (954)..(958): n is a, c, g, or t
  misc_feature (961)..(962): n is a, c, g, or t
  misc_feature (965)..(965): n is a, c, g, or t
  misc_feature (967)..(967): n is a, c, g, or t
  misc_feature (969)..(979): n is a, c, g, or t
  misc_feature (981)..(981): n is a, c, g, or t
  misc_feature (983)..(985): n is a, c, g, or t
  misc_feature (987)..(991): n is a, c, g, or t
  misc_feature (993)..(994): n is a, c, g, or t
  misc_feature (996)..(998): n is a, c, g, or t
  misc_feature (1000)..(1003): n is a, c, g, or t
  misc_feature (1005)..(1005): n is a, c, g, or t
  misc_feature (1007)..(1009): n is a, c, g, or t
  misc_feature (1011)..(1012): n is a, c, g, or t
  misc_feature (1014)..(1015): n is a, c, g, or t
  misc_feature (1017)..(1021): n is a, c, g, or t
  misc_feature (1023)..(1024): n is a, c, g, or t
  misc_feature (1026)..(1027): n is a, c, g, or t
  misc_feature (1029)..(1039): n is a, c, g, or t
  misc_feature (1041)..(1046): n is a, c, g, or t
  misc_feature (1050)..(1052): n is a, c, g, or t
  misc_feature (1054)..(1055): n is a, c, g, or t
  misc_feature (1057)..(1057): n is a, c, g, or t
  misc_feature (1063)..(1063): n is a, c, g, or t
  misc_feature (1066)..(1066): n is a, c, g, or t
  misc_feature (1069)..(1069): n is a, c, g, or t
  misc_feature (1072)..(1072): n is a, c, g, or t
  misc_feature (1075)..(1076): n is a, c, g, or t
  misc_feature (1078)..(1078): n is a, c, g, or t
  misc_feature (1081)..(1081): n is a, c, g, or t
  misc_feature (1083)..(1088): n is a, c, g, or t
  misc_feature (1090)..(1092): n is a, c, g, or t
  misc_feature (1991)..(1991): n is a, c, g, or t
  misc_feature (2138)..(2138): n is a, c, g, or t
  misc_feature (3124)..(3124): n is a, c, g, or t
  misc_feature (3298)..(3298): n is a, c, g, or t
  misc_feature (3313)..(3313): n is a, c, g, or t
  misc_feature (3802)..(3802): n is a, c, g, or t
gacttccgagagatcaatggtatcggaaccatcggcgcaatcgaaggaggaggtctcttcttccccgatgtatggctcgtcctcgccgtaagtgcaatcattcataccatcgttcacatacgagaatgggataatgtctccagtgtattcgcattcgaaggtggaagtttcgtcgccattttcgtcaaaggttgcctcgtcttcaccatcagcacagtcttctgtgccatcgttgacttgtgagaggtaaatgtatgacattccatcgtcgcaatcgaagtacgtctgttcggtttcttcataggttggctcatcatctgcatccatgcantcttcaaccccgtcgttgacttgagaaaggtaaatttcactgccatccatgcagtcaaaggttgaaatttctgtcgtgtcatacatcggctcatctgattcgtcgttgcagtctgcgccgccatcgtttgcgtacaagaaggtcacataggagccatcagcacactggaaaatcttaaactcgtcagatccatctgcacaatcatcctctccgttgttgacatgcatgaggccgattgtttcgccgctcaagcaggtgtangagtaagtntctgtgtattgtggttcgtcagaaccatcagnncantcttcagttccgtcgttganttcnctgctcatganggttgttccntcagcgcatgtgtactggtggagcgtttctgtagcnctgtcagggttgccttcgntgaagtagtccgantcggagcagacccatgagttgtcagcgagttgttcgcantgcatccattctggttgatccatgaacgggtttgccatgtactgntgntnnatgaggacttgntcntcnatnacnnnntnttcnncnnngtctncnncntcttcnacgnnaanntnnnncnnnngnnnnnnnnnnnnnntnnannnnnnnnngntgntgnnnannnnntcnncgncntnnnnnnnnnnnancnnntnnnnnannannntnnnntntnnngnngnngnnnnnannannannnnnnnnnnnannnnnncagnnncnncntcgccntcnatntcntcnntngangnnnnnnannngtgccatgtctcgtttgtcatgaaattcatcatcatttcaaagacatcttcagcattcaggcatgttccatcatcgagatttgcctcggcatcaaagttgaacgatgcggtgtcggtgcagcctgggacatcttcgtgcttgcttgggtcacgtgggtacatgtcatcggcgtttgcagttccgtcgccatccatgtcatcatccaaagcgtcacaaattgtgtcgttgtcgaggtcagcagggatgcttgttgcatcgagtggatctgagccacattgtgtctcttcatcatcggagtaggtgtcggcatcgtcgtcagtcgagactgcgtcgcagataccgtcgccgtttgcatcaaccggcatgagggttgcaacaagggagttgctgccacaagcagtttcgtcaacatcagaccagccgtcgttgtcgtcatcgaggtcttcagtgagggttgattcacctgtgagcgtgtttggcatgccgtcaccatctgtgtcggtggctgcactggcgtcccgggggaaagcatcagcatcgttgaacactgtgtcaccatcgatatcgaagtcgtactcatcgcattcgaagtcgccgtcaagatcgtctgggaaggaagttgcattgagcgggtctgttccacaggttgtttccatcgagtcgaggaaaccatcgttgtcgtcgtccatgtccgctacgagcggtggggtggacgtcgattcgccgtcaagttggtctggcaatccgtcgccatcggtgtcgaagtacgctgcgtcgtcgtcagggaacatatcgttctcgtcaattttttcaacgtcttcgtcggccatgccgaggcatccggagagcaacagcatcaaagtcagtaagagggtttgtaccttcataggctatgggncttacccttcccatatgaaggttgacccgacgagcgaagctgaaaggtccactgctatcgatagttaatttcgatgagtgaggttatttgggtgagccttctccacaaggcatggcgcgtcccgtggcactcattaccggcggaggncgagggattggtgccgccactgccaaacgacttgccgcagatggttatgatgttcttttgacgtacaacacctcttccaaaccagcagaaatggtcgtggacgaaattcgtgaacgaggtgatgacgcgttggcagtgaaggttgattgtgccaacacgggcgaagttggtttgcttggcatccacccgtggatggcccgcggcatcgatgtgctggtcctcaaccacggcgcatacgaccgagtggccgcccaagatatgaccatggaggacttgcgtaggaccatgttgatcaattttgaaggcgcagtcagcgtgtggaaagcagtgcaagcacatctcacaaggcacgcccgaatggtggtcgtcagctcgcagctcggcacccgtggctcgccccatggagcggattattctgcatcaaaggcggctcttgccacctgggctcggtcgctggctcaagccgtggggccagaaggaaaacgagtcaacatcctcgccccaggttatgtcgatacagatattctcgctgacgacacccctgaaaagagaaaggaacgtgaactgcaagtaccgctaaaacgagtagggacgcctgaagacatggcacaaacaatttcgttcttagtaagcaatgattcgagttacatcacaggcgcaatccttcatgtgaatggtggactttaccttccataggccatttcaacagccttgtatagggtcctcacgagcggctaccaaaggaggcgtcgagcatggtgaacgattgggacgatgacggcgcattcgaagacttggcaaatcgaccaattgaagatgctgaccttgaagagcgagaccctttcgatctctcgcgagccctcgaaggtgcggcacttgaacacttacaccctgatgtaaagcggatggttttgcactccaaattcgaaccttcaggcgaccagccaaaagcaattgaaaaattgatttcccaattggaaaatggncaagagcgttgtgtccttctcggcgtcaccgggagtggtaagacatacgccatggcccaagtgatccaaaagctcaacatcccaacactcatcattagccacaacaagacgctcgctcgacaattgtaccatgaaatggccgggtattttcccgagaatgcggttgactactangtatcacactacgantactatcaaccagaggcatacctcgcaaaacgagatatgtacatcgaaaaggaactgtccgtcaatgaaagaatcgaacaagaacgcttcgccaccatcgcctcattggtcacccgcccagattgcgtgattgtgtcctctgtctcctgtatctatggattgaatccacccgaaacgttcctagaataccacgtgagagtgcacgttggccaagaaatcgaaacaagcgatctccttcgggaattaatcaccctccaatacaagcgcaccaccactgatttgtctcgaggcgactgcagggtacgcggcgaagttgtggacgtatggatgccgagcagggacgatccattacgaattcagttcgatttcaatggcatcaccaaggtatcggtctgtgacccagtgagttgggatgtgctcgatgaattggacgaagcatggattcaccccaaggaattctacatgacgagccctgaacgcctcgaagcngcacttgtctcaatcgaagacgaattggatgaccgtgtcgcccactttgcgagccaaggaaaagaacttgaacggcacagaatcgatcaacgaacacggtacgacttggaaatgattcgcgagatcggacactgtcagtcgattgagaattattcactccactttgatggcagggagcgagggcaacgaccccactgc

SEQ ID NO: 626 - DNA, 4000 bp, Escherichia coli
  misc_feature (87)..(87): n is a, c, g, or t
  misc_feature (135)..(135): n is a, c, g, or t
  misc_feature (210)..(210): n is a, c, g, or t
  misc_feature (219)..(219): n is a, c, g, or t
  misc_feature (264)..(264): n is a, c, g, or t
  misc_feature (276)..(276): n is a, c, g, or t
  misc_feature (285)..(285): n is a, c, g, or t
  misc_feature (289)..(289): n is a, c, g, or t
  misc_feature (291)..(291): n is a, c, g, or t
  misc_feature (303)..(303): n is a, c, g, or t
  misc_feature (387)..(387): n is a, c, g, or t
  misc_feature (578)..(578): n is a, c, g, or t
  misc_feature (716)..(716): n is a, c, g, or t
  misc_feature (728)..(728): n is a, c, g, or t
  misc_feature (815)..(815): n is a, c, g, or t
  misc_feature (917)..(917): n is a, c, g, or t
  misc_feature (989)..(989): n is a, c, g, or t
  misc_feature (998)..(998): n is a, c, g, or t
  misc_feature (1001)..(1001): n is a, c, g, or t
  misc_feature (1061)..(1061): n is a, c, g, or t
  misc_feature (1109)..(1109): n is a, c, g, or t
  misc_feature (1124)..(1124): n is a, c, g, or t
  misc_feature (1142)..(1142): n is a, c, g, or t
  misc_feature (1193)..(1193): n is a, c, g, or t
  misc_feature (1469)..(1469): n is a, c, g, or t
  misc_feature (1933)..(1933): n is a, c, g, or t
  misc_feature (1985)..(1985): n is a, c, g, or t
  misc_feature (1989)..(1989): n is a, c, g, or t
  misc_feature (1991)..(1991): n is a, c, g, or t
  misc_feature (1996)..(1997): n is a, c, g, or t
  misc_feature (2010)..(2010): n is a, c, g, or t
  misc_feature (2013)..(2013): n is a, c, g, or t
  misc_feature (2191)..(2191): n is a, c, g, or t
  misc_feature (2215)..(2215): n is a, c, g, or t
  misc_feature (2224)..(2224): n is a, c, g, or t
  misc_feature (2262)..(2262): n is a, c, g, or t
  misc_feature (2296)..(2296): n is a, c, g, or t
  misc_feature (2308)..(2309): n is a, c, g, or t
  misc_feature (2311)..(2312): n is a, c, g, or t
  misc_feature (2317)..(2317): n is a, c, g, or t
  misc_feature (2321)..(2321): n is a, c, g, or t
  misc_feature (2323)..(2323): n is a, c, g, or t
  misc_feature (2327)..(2327): n is a, c, g, or t
  misc_feature (2336)..(2336): n is a, c, g, or t
  misc_feature (2342)..(2342): n is a, c, g, or t
  misc_feature (2348)..(2348): n is a, c, g, or t
  misc_feature (2350)..(2350): n is a, c, g, or t
  misc_feature (2355)..(2355): n is a, c, g, or t
  misc_feature (2358)..(2358): n is a, c, g, or t
  misc_feature (2363)..(2363): n is a, c, g, or t
  misc_feature (2365)..(2366): n is a, c, g, or t
  misc_feature (2378)..(2378): n is a, c, g, or t
  misc_feature (2387)..(2387): n is a, c, g, or t
  misc_feature (2389)..(2389): n is a, c, g, or t
  misc_feature (2393)..(2393): n is a, c, g, or t
  misc_feature (2395)..(2395): n is a, c, g, or t
  misc_feature (2398)..(2400): n is a, c, g, or t
  misc_feature (2404)..(2404): n is a, c, g, or t
  misc_feature (2407)..(2408): n is a, c, g, or t
  misc_feature (2416)..(2417): n is a, c, g, or t
  misc_feature (2419)..(2419): n is a, c, g, or t
  misc_feature (2421)..(2421): n is a, c, g, or t
  misc_feature (2424)..(2428): n is a, c, g, or t
  misc_feature (2431)..(2431): n is a, c, g, or t
  misc_feature (2434)..(2434): n is a, c, g, or t
  misc_feature (2437)..(2441): n is a, c, g, or t
  misc_feature (2443)..(2449): n is a, c, g, or t
  misc_feature (2453)..(2457): n is a, c, g, or t
  misc_feature (2459)..(2459): n is a, c, g, or t
  misc_feature (2461)..(2468): n is a, c, g, or t
  misc_feature (2472)..(2472): n is a, c, g, or t
  misc_feature (2474)..(2476): n is a, c, g, or t
  misc_feature (2478)..(2478): n is a, c, g, or t
  misc_feature (2480)..(2480): n is a, c, g, or t
  misc_feature (2482)..(2482): n is a, c, g, or t
  misc_feature (2484)..(2487): n is a, c, g, or t
  misc_feature (2490)..(2492): n is a, c, g, or t
  misc_feature (2494)..(2501): n is a, c, g, or t
  misc_feature (2503)..(2504): n is a, c, g, or t
  misc_feature (2506)..(2507): n is a, c, g, or t
  misc_feature (2509)..(2515): n is a, c, g, or t
  misc_feature (2517)..(2520): n is a, c, g, or t
  misc_feature (2522)..(2524): n is a, c, g, or t
  misc_feature (2527)..(2530): n is a, c, g, or t
  misc_feature (2532)..(2536): n is a, c, g, or t
  misc_feature (2538)..(2539): n is a, c, g, or t
  misc_feature (2543)..(2546): n is a, c, g, or t
  misc_feature (2550)..(2550): n is a, c, g, or t
  misc_feature (2553)..(2553): n is a, c, g, or t
  misc_feature (2555)..(2556): n is a, c, g, or t
  misc_feature (2563)..(2563): n is a, c, g, or t
  misc_feature (2565)..(2568): n is a, c, g, or t
  misc_feature (2571)..(2574): n is a, c, g, or t
  misc_feature (2576)..(2579): n is a, c, g, or t
  misc_feature (2582)..(2582): n is a, c, g, or t
  misc_feature (2584)..(2584): n is a, c, g, or t
  misc_feature (2586)..(2586): n is a, c, g, or t
  misc_feature (2588)..(2588): n is a, c, g, or t
  misc_feature (2590)..(2590): n is a, c, g, or t
  misc_feature (2593)..(2595): n is a, c, g, or t
  misc_feature (2597)..(2600): n is a, c, g, or t
  misc_feature (2602)..(2603): n is a, c, g, or t
  misc_feature (2605)..(2605): n is a, c, g, or t
  misc_feature (2607)..(2607): n is a, c, g, or t
  misc_feature (2609)..(2610): n is a, c, g, or t
  misc_feature (2612)..(2615): n is a, c, g, or t
  misc_feature (2617)..(2621): n is a, c, g, or t
  misc_feature (2623)..(2623): n is a, c, g, or t
  misc_feature (2625)..(2627): n is a, c, g, or t
  misc_feature (2630)..(2630): n is a, c, g, or t
  misc_feature (2632)..(2632): n is a, c, g, or t
  misc_feature (2636)..(2638): n is a, c, g, or t
  misc_feature (2642)..(2643): n is a, c, g, or t
  misc_feature (2646)..(2652): n is a, c, g, or t
  misc_feature (2654)..(2654): n is a, c, g, or t
  misc_feature (2656)..(2665): n is a, c, g, or t
  misc_feature (2669)..(2671): n is a, c, g, or t
  misc_feature (2673)..(2673): n is a, c, g, or t
  misc_feature (2675)..(2675): n is a, c, g, or t
  misc_feature (2677)..(2687): n is a, c, g, or t
  misc_feature (2689)..(2695): n is a, c, g, or t
  misc_feature (2697)..(2697): n is a, c, g, or t
  misc_feature (2699)..(2722): n is a, c, g, or t
  misc_feature (2727)..(2734): n is a, c, g, or t
  misc_feature (2736)..(2736): n is a, c, g, or t
  misc_feature (2738)..(2740): n is a, c, g, or t
  misc_feature (2742)..(2742): n is a, c, g, or t
  misc_feature (2744)..(2748): n is a, c, g, or t
  misc_feature (2750)..(2750): n is a, c, g, or t
  misc_feature (2753)..(2761): n is a, c, g, or t
  misc_feature (2763)..(2763): n is a, c, g, or t
  misc_feature (2767)..(2767): n is a, c, g, or t
  misc_feature (2770)..(2772): n is a, c, g, or t
  misc_feature (2775)..(2778): n is a, c, g, or t
  misc_feature (2780)..(2782): n is a, c, g, or t
  misc_feature (2784)..(2787): n is a, c, g, or t
  misc_feature (2789)..(2789): n is a, c, g, or t
  misc_feature (2792)..(2794): n is a, c, g, or t
  misc_feature (2796)..(2797): n is a, c, g, or t
  misc_feature (2799)..(2800): n is a, c, g, or t
  misc_feature (2805)..(2808): n is a, c, g, or t
  misc_feature (2810)..(2811): n is a, c, g, or t
  misc_feature (2813)..(2817): n is a, c, g, or t
  misc_feature (2819)..(2824): n is a, c, g, or t
  misc_feature (2826)..(2828): n is a, c, g, or t
  misc_feature (2830)..(2830): n is a, c, g, or t
  misc_feature (2833)..(2833): n is a, c, g, or t
  misc_feature (2835)..(2836): n is a, c, g, or t
  misc_feature (2839)..(2840): n is a, c, g, or t
  misc_feature (2842)..(2847): n is a, c, g, or t
  misc_feature (2850)..(2852): n is a, c, g, or t
  misc_feature (2854)..(2856): n is a, c, g, or t
  misc_feature (2858)..(2862): n is a, c, g, or t
  misc_feature (2866)..(2871): n is a, c, g, or t
  misc_feature (2873)..(2873): n is a, c, g, or t
  misc_feature (2875)..(2875): n is a, c, g, or t
  misc_feature (2877)..(2878): n is a, c, g, or t
  misc_feature (2880)..(2883): n is a, c, g, or t
  misc_feature (2886)..(2887): n is a, c, g, or t
  misc_feature (2889)..(2892): n is a, c, g, or t
  misc_feature (2894)..(2894): n is a, c, g, or t
  misc_feature (2896)..(2907): n is a, c, g, or t
  misc_feature (2909)..(2914): n is a, c, g, or t
  misc_feature (2916)..(2919): n is a, c, g, or t
  misc_feature (2921)..(2923): n is a, c, g, or t
  misc_feature (2925)..(2935): n is a, c, g, or t
  misc_feature (2942)..(2943): n is a, c, g, or t
  misc_feature (2946)..(2946): n is a, c, g, or t
  misc_feature (2949)..(2950): n is a, c, g, or t
  misc_feature (2952)..(2952): n is a, c, g, or t
  misc_feature (2954)..(2955): n is a, c, g, or t
  misc_feature (2958)..(2958): n is a, c, g, or t
  misc_feature (2960)..(2962): n is a, c, g, or t
  misc_feature (2964)..(2966): n is a, c, g, or t
  misc_feature (2968)..(2973): n is a, c, g, or t
  misc_feature (2975)..(2976): n is a, c, g, or t
  misc_feature (2978)..(2978): n is a, c, g, or t
  misc_feature (2980)..(2981): n is a, c, g, or t
  misc_feature (2983)..(2985): n is a, c, g, or t
  misc_feature (2989)..(2993): n is a, c, g, or t
  misc_feature (2996)..(2996): n is a, c, g, or t
  misc_feature (2998)..(2998): n is a, c, g, or t
  misc_feature (3000)..(3004): n is a, c, g, or t
  misc_feature (3006)..(3008): n is a, c, g, or t
  misc_feature (3010)..(3016): n is a, c, g, or t
  misc_feature (3018)..(3025): n is a, c, g, or t
  misc_feature (3027)..(3028): n is a, c, g, or t
  misc_feature (3030)..(3039): n is a, c, g, or t
  misc_feature (3041)..(3047): n is a, c, g, or t
  misc_feature (3049)..(3050): n is a, c, g, or t
  misc_feature (3052)..(3061): n is a, c, g, or t
  misc_feature (3063)..(3064): n is a, c, g, or t
  misc_feature (3066)..(3068): n is a, c, g, or t
  misc_feature (3070)..(3072): n is a, c, g, or t
  misc_feature (3074)..(3076): n is a, c, g, or t
  misc_feature (3078)..(3085): n is a, c, g, or t
  misc_feature (3087)..(3091): n is a, c, g, or t
  misc_feature (3093)..(3093): n is a, c, g, or t
  misc_feature (3095)..(3104): n is a, c, g, or t
  misc_feature (3106)..(3110): n is a, c, g, or t
  misc_feature (3113)..(3113): n is a, c, g, or t
  misc_feature (3115)..(3117): n is a, c, g, or t
  misc_feature (3119)..(3120): n is a, c, g, or t
  misc_feature (3122)..(3122): n is a, c, g, or t
  misc_feature (3124)..(3125): n is a, c, g, or t
  misc_feature (3127)..(3127): n is a, c, g, or t
  misc_feature (3129)..(3129): n is a, c, g, or t
  misc_feature (3132)..(3134): n is a, c, g, or t
  misc_feature (3136)..(3136): n is a, c, g, or t
  misc_feature (3138)..(3141): n is a, c, g, or t
  misc_feature (3143)..(3146): n is a, c, g, or t
  misc_feature (3148)..(3174): n is a, c, g, or t
  misc_feature (3177)..(3181): n is a, c, g, or t
  misc_feature (3183)..(3183): n is a, c, g, or t
  misc_feature (3186)..(3189): n is a, c, g, or t
  misc_feature (3191)..(3193): n is a, c, g, or t
  misc_feature (3195)..(3198): n is a, c, g, or t
  misc_feature (3200)..(3202): n is a, c, g, or t
  misc_feature (3204)..(3213): n is a, c, g, or t
  misc_feature (3215)..(3239): n is a, c, g, or t
  misc_feature (3241)..(3258): n is a, c, g, or t
  misc_feature (3260)..(3287): n is a, c, g, or t
  misc_feature (3289)..(3296): n is a, c, g, or t
  misc_feature (3298)..(3303): n is a, c, g, or t
  misc_feature (3306)..(3311): n is a, c, g, or t
  misc_feature (3313)..(3313): n is a, c, g, or t
  misc_feature (3315)..(3323): n is a, c, g, or t
  misc_feature (3325)..(3325): n is a, c, g, or t
  misc_feature (3327)..(3328): n is a, c, g, or t
  misc_feature (3330)..(3331): n is a, c, g, or t
  misc_feature (3333)..(3335): n is a, c, g, or t
  misc_feature (3338)..(3338): n is a, c, g, or t
  misc_feature (3340)..(3346): n is a, c, g, or t
  misc_feature (3349)..(3354): n is a, c, g, or t
  misc_feature (3356)..(3363): n is a, c, g, or t
  misc_feature (3365)..(3366): n is a, c, g, or t
  misc_feature (3368)..(3383): n is a, c, g, or t
  misc_feature (3386)..(3394): n is a, c, g, or t
  misc_feature (3396)..(3406): n is a, c, g, or t
  misc_feature (3408)..(3416): n is a, c, g, or t
  misc_feature (3418)..(3423): n is a, c, g, or t
  misc_feature (3425)..(3425): n is a, c, g, or t
  misc_feature (3427)..(3427): n is a, c, g, or t
  misc_feature (3429)..(3429): n is a, c, g, or t
  misc_feature (3431)..(3432): n is a, c, g, or t
  misc_feature (3434)..(3444): n is a, c, g, or t
  misc_feature (3446)..(3448): n is a, c, g, or t
  misc_feature (3450)..(3454): n is a, c, g, or t
  misc_feature (3457)..(3466): n is a, c, g, or t
  misc_feature (3468)..(3468): n is a, c, g, or t
  misc_feature (3470)..(3474): n is a, c, g, or t
  misc_feature (3476)..(3477): n is a, c, g, or t
  misc_feature (3479)..(3480): n is a, c, g, or t
  misc_feature (3482)..(3484): n is a, c, g, or t
  misc_feature (3486)..(3491): n is a, c, g, or t
  misc_feature (3493)..(3494): n is a, c, g, or t
  misc_feature (3497)..(3497): n is a, c, g, or t
  misc_feature (3500)..(3501): n is a, c, g, or t
  misc_feature (3504)..(3506): n is a, c, g, or t
  misc_feature (3508)..(3515): n is a, c, g, or t
  misc_feature (3517)..(3519): n is a, c, g, or t
  misc_feature (3522)..(3525): n is a, c, g, or t
  misc_feature (3527)..(3527): n is a, c, g, or t
  misc_feature (3529)..(3535): n is a, c, g, or t
  misc_feature (3537)..(3541): n is a, c, g, or t
  misc_feature (3543)..(3546): n is a, c, g, or t
  misc_feature (3548)..(3550): n is a, c, g, or t
  misc_feature (3552)..(3560): n is a, c, g, or t
  misc_feature (3562)..(3563): n is a, c, g, or t
  misc_feature (3565)..(3572): n is a, c, g, or t
  misc_feature (3574)..(3589): n is a, c, g, or t
  misc_feature (3591)..(3591): n is a, c, g, or t
  misc_feature (3593)..(3593): n is a, c, g, or t
  misc_feature (3595)..(3595): n is a, c, g, or t
  misc_feature (3598)..(3610): n is a, c, g, or t
  misc_feature (3612)..(3614): n is a, c, g, or t
  misc_feature (3616)..(3622): n is a, c, g, or t
  misc_feature (3624)..(3627): n is a, c, g, or t
  misc_feature (3629)..(3630): n is a, c, g, or t
  misc_feature (3632)..(3636): n is a, c, g, or t
  misc_feature (3638)..(3648): n is a, c, g, or t
  misc_feature (3650)..(3655): n is a, c, g, or t
  misc_feature (3657)..(3668): n is a, c, g, or t
  misc_feature (3670)..(3682): n is a, c, g, or t
  misc_feature (3684)..(3691): n is a, c, g, or t
  misc_feature (3693)..(3693): n is a, c, g, or t
  misc_feature (3695)..(3700): n is a, c, g, or t
  misc_feature (3702)..(3720): n is a, c, g, or t
  misc_feature (3722)..(3723): n is a, c, g, or t
  misc_feature (3725)..(3727): n is a, c, g, or t
  misc_feature (3729)..(3747): n is a, c, g, or t
  misc_feature (3749)..(3766): n is a, c, g, or t
  misc_feature (3768)..(3768): n is a, c, g, or t
  misc_feature (3770)..(3776): n is a, c, g, or t
  misc_feature (3779)..(3782): n is a, c, g, or t
  misc_feature (3784)..(3787): n is a, c, g, or t
  misc_feature (3789)..(3795): n is a, c, g, or t
  misc_feature (3798)..(3798): n is a, c, g, or t
  misc_feature (3800)..(3800): n is a, c, g, or t
  misc_feature (3802)..(3802): n is a, c, g, or t
  misc_feature (3804)..(3809): n is a, c, g, or t
  misc_feature (3813)..(3821): n is a, c, g, or t
  misc_feature (3824)..(3826): n is a, c, g, or t
  misc_feature (3828)..(3828): n is a, c, g, or t
  misc_feature (3830)..(3831): n is a, c, g, or t
  misc_feature (3835)..(3839): n is a, c, g, or t
  misc_feature (3841)..(3843): n is a, c, g, or t
  misc_feature (3845)..(3851): n is a, c, g, or t
  misc_feature (3854)..(3854): n is a, c, g, or t
  misc_feature (3856)..(3862): n is a, c, g, or t
  misc_feature (3864)..(3865): n is a, c, g, or t
  misc_feature (3867)..(3878): n is a, c, g, or t
  misc_feature (3880)..(3888): n is a, c, g, or t
  misc_feature (3890)..(3894): n is a, c, g, or t
  misc_feature (3896)..(3897): n is a, c, g, or t
  misc_feature (3899)..(3901): n is a, c, g, or t
  misc_feature (3903)..(3903): n is a, c, g, or t
  misc_feature (3906)..(3907): n is a, c, g, or t
  misc_feature (3910)..(3915): n is a, c, g, or t
  misc_feature (3919)..(3920): n is a, c, g, or t
  misc_feature (3923)..(3928): n is a, c, g, or t
  misc_feature (3930)..(3930): n is a, c, g, or t
  misc_feature (3932)..(3932): n is a, c, g, or t
  misc_feature (3934)..(3934): n is a, c, g, or t
  misc_feature (3936)..(3940): n is a, c, g, or t
  misc_feature (3942)..(3943): n is a, c, g, or t
  misc_feature (3945)..(3949): n is a, c, g, or t
  misc_feature (3951)..(3953): n is a, c, g, or t
  misc_feature (3955)..(3957): n is a, c, g, or t
  misc_feature (3959)..(3959): n is a, c, g, or t
  misc_feature (3961)..(3971): n is a, c, g, or t
  misc_feature (3973)..(3974): n is a, c, g, or t
  misc_feature (3976)..(3991): n is a, c, g, or t
  misc_feature (3995)..(3996): n is a, c, g, or t
  misc_feature (3999)..(4000): n is a, c, g, or t
tacgctatgaactacgccgtaaataaactccaagaatacccaaattataagccagagagcttcgatacggattttatcaattatgancaaaagggcttcacagcggagcttttgggggtagaaaaactcggaganaaggaagttttcaaagtagaacttaccaaaaatgtgaataaaaccatttactattttgacaagctgtcttatctncttttaaangaggaaaaaaggggagagaccatcacttattctgattacaaaaangtaggaaatctnctgatgccntttngnatagaggcttcntcgccgaaaaaggattcggactatgtgatgatttttagtaaaatagaactaaacaaagcctttaaagacgatacttttaaattntaaataaaatcaaaatctcgaaaaataaaaatcccttctgtgagagaagggattttcttttattcgtttattttcctccgaaaggcattccgccgcccattcctgggagtccgccgcctttgctcatcatagacatcagctgcttgccttgtgggctttgcaggagtttcatagtcttgccaagctgctcnaactgcttcatcagagcggttacttcttctacttttcttccgcttcctttggctattctttgtcttctcggcatggtgatgatgctcggtcttcttctttcttctggcgtcatggactgtatcatcgcctctatatgnttgaaggtatcntcattgatatccacattttgggctacttttcccattcctggtatcatacccatgaggtctttcattcctcccattttcttcatcatntgaagctgttttaggaagtcatcaaaaccaagttcgtttttctgaatttttttgttgagtttctttgcttcttcttcatcgaactgctcttgggctctttcnaccaaggaaaccacatctcccattccgaggattctgtccgccattctgtctggatagaagatatctagggcntccattttntcncctgtggagatgaattttatcggtttattaaccacggaacgaatcgtaagcgccgctccncctcgggtatcaccatctaatttggtaagaactactccgttgtagttnagcacctcgttgaangcgttggctgtatttacngcatcctgccctgtcatggaatccactacgaagagcgtttcagaaggtttnatggtctgatgcacactgcggatttcgttcatcatttcttcatcgatagccaaacgcccagcggtgtctataatcactacatcgtgtttgttttgtttagcgaaatcgatggcgttttgtgaaatctgaacaggatttttgttttctagttctttataaacaggcacgcctatctgctctccgagaactcccagctggtcgatagccgcaggtctgtagacatcacaggctactagtagagggtttttgttctttttctttttgaggaagttggcnagttttccagagaaagtggttttccctgaaccctgaagcccagcgatgaggataatgctcggtttgtccgccagattgataccttcctgcgtgccgcccatgagctccaccagctcatcatgaacgattttggtcatcagctgcccaggagtgagcgaggtgaggacattctgcccgatggctttgtcctgcactcttttggtgaggtctttggctactttgtagtttacatcggcatccaccaaggcacggcggatttctttaaccgtttctgctacattgatttctgtgattttccctcttccagagaggttgtgcagtgctttatctaatttgtcttgtaaactctgaaacataattttctattttagaataggttgcaaaaataaggaattttcttcagttttggatagtgggaaagctcaaaacacgaataaaaaaatattggctcagaataacttgcngaaaacagtatctttgtctatgtaaaatgacaggggactatccacctaaatnaccntnaaccnnataaaaacattanganaatggaaataaaactcaataaagaattacagaaaaaactagatgatttcttggaaacaaaagatgctaaaatgcaggaatttcttgaaattttaaatctaaatgaatttactttttcacaagatgaaataaatcaagtagagaaaatatataaagaaaacgaagacctttatgaatangcatatatatacataggagaagcngtaataaangttttaggagggttttggtctataggaaagtttaaaanagatgaagcttatggttatcctattattcttgcntggggagaagannannataancctngnattngtcctgatntttggntataananataantanagatnanntaagaaaatctnttggagatntnatananacnnnaaanatnnaaaaaatnnananaannnnnaanaanatnnnnntnnnnnnnaaannnnnantnnnnnnnnatanannnanananannnnaannntnnnnnnnnannannannnnnnntnnnnannnatnnnnannnnnannatgnnnntcanaangnntattttnannnnatnnnnannnnggnantnantnaannnannnntnntntntnntnnnntnnnnnanannnttntnttannnaaanntannnnnnntngnnnnnnnnnnatannnanantnnnnnnnnnnngnnnnnnnanannnnnnnnnnnnnnnnnnnnnnnnaattnnnnnnnntntnnnanannnnnanaannnnnnnnnantatnatnnntannnnannngnnnncnctnnnannannaaaannnnanntnnnnnannnnnnannntncanannatnnannnnnnaannntnnntnnnnnaaannnnnntntntnntnnnnaannannnnantnnnnnnnnnnnnannnnnnannnntnnnannnnnnnnnnnagaaaannagnaannanannaanannnannntnnnnnnannananntnnnatannnnntananannnnntnnntnnnnnnntnnnnnnnnanntnnnnnnnnnngnnnnnnngnnannnnnnnnnnannannncnnnannnannnnnnnnannnnntngnnnnnnnnnntnnnnnttntnnngnntngnntntnaannnanannnnannnnannnnnnnnnnnnnnnnnnnnnnnnnnnaannnnnantannnnannntnnnntnnnannnnnnnnnnannnnnnnnnnnnnnnnnnnnnnnnnannnnnnnnnnnnnnnnnntnnnnnnnnnnnnnnnnnnnnnnnnnnnnannnnnnnntnnnnnntgnnnnnngnannnnnnnnncntnnanngnnntanannnnnnnttnnnnnngnnnnnnnntnncnnnnnnnnnnnnnnnntcnnnnnnnnngnnnnnnnnnnnannnnnnnnntnnnnnntntntngnnannnnnnnnnnngnnntnnnnntgnnnnnnnnnntntnnnnntnntnnannngnnnnnntnnctncgnnagnnntnnnnnnnntnnnttnnnnantnnnnnnncnnnnncnnnntnnntnnnnnnnnntnntnnnnnnnntnnnnnnnnnnnnnnnntncntnttnnnnnnnnnnnnnannngnnnnnnnannnngnntnnnnnannnnnnnnnnntnnnnnntnnnnnnnnnnnngnnnnnnnnnnnnncnnnnnnnnantnnnnnntnnnnnnnnnnnnnnnnnnnanngnnntnnnnnnnnnnnnnnnnnnncnnnnnnnnnnnnnnnnnnanannnnnnncannnnannnntnnnnnnnttnantntnnnnnntgtnnnnnnnnnagnnnanannttannnnnannnannnnnnnttntnnnnnnnanntnnnnnnnnnnnngnnnnnnnnnannnnnanntnnncnaannctnnnnnntagnnaannnnnncntntngnnnnntnncnnnnntnnntnnnanannnnnnnnnnncnntnnnnnnnnnnnnnnnnggcnntcnn

SEQ ID NO: 627 - DNA, 4000 bp, Escherichia coli
  misc_feature (3307)..(3307): n is a, c, g, or t
  misc_feature (3309)..(3309): n is a, c, g, or t
  misc_feature (3311)..(3311): n is a, c, g, or t
  misc_feature (3316)..(3316): n is a, c, g, or t
  misc_feature (3318)..(3320): n is a, c, g, or t
  misc_feature (3322)..(3323): n is a, c, g, or t
  misc_feature (3325)..(3325): n is a, c, g, or t
  misc_feature (3327)..(3329): n is a, c, g, or t
  misc_feature (3335)..(3336): n is a, c, g, or t
  misc_feature (3349)..(3351): n is a, c, g, or t
  misc_feature (3353)..(3354): n is a, c, g, or t
  misc_feature (3357)..(3359): n is a, c, g, or t
  misc_feature (3361)..(3361): n is a, c, g, or t
  misc_feature (3364)..(3364): n is a, c, g, or t
  misc_feature (3368)..(3368): n is a, c, g, or t
  misc_feature (3379)..(3379): n is a, c, g, or t
  misc_feature (3386)..(3386): n is a, c, g, or t
  misc_feature (3388)..(3390): n is a, c, g, or t
  misc_feature (3392)..(3395): n is a, c, g, or t
  misc_feature (3397)..(3397): n is a, c, g, or t
  misc_feature (3399)..(3408): n is a, c, g, or t
  misc_feature (3410)..(3411): n is a, c, g, or t
  misc_feature (3415)..(3415): n is a, c, g, or t
  misc_feature (3418)..(3448): n is a, c, g, or t
  misc_feature (3452)..(3452): n is a, c, g, or t
  misc_feature (3455)..(3455): n is a, c, g, or t
  misc_feature (3459)..(3461): n is a, c, g, or t
  misc_feature (3463)..(3466): n is a, c, g, or t
  misc_feature (3468)..(3468): n is a, c, g, or t
  misc_feature (3475)..(3484): n is a, c, g, or t
  misc_feature (3486)..(3490): n is a, c, g, or t
  misc_feature (3492)..(3493): n is a, c, g, or t
  misc_feature (3495)..(3496): n is a, c, g, or t
  misc_feature (3498)..(3502): n is a, c, g, or t
  misc_feature (3504)..(3508): n is a, c, g, or t
  misc_feature (3511)..(3511): n is a, c, g, or t
  misc_feature (3514)..(3514): n is a, c, g, or t
  misc_feature (3517)..(3517): n is a, c, g, or t
  misc_feature (3526)..(3526): n is a, c, g, or t
  misc_feature (3529)..(3532): n is a, c, g, or t
  misc_feature (3537)..(3537): n is a, c, g, or t
  misc_feature (3540)..(3541): n is a, c, g, or t
  misc_feature (3544)..(3545): n is a, c, g, or t
  misc_feature (3547)..(3547): n is a, c, g, or t
  misc_feature (3549)..(3553): n is a, c, g, or t
  misc_feature (3555)..(3558): n is a, c, g, or t
  misc_feature (3560)..(3567): n is a, c, g, or t
  misc_feature (3569)..(3576): n is a, c, g, or t
  misc_feature (3582)..(3585): n is a, c, g, or t
  misc_feature (3588)..(3590): n is a, c, g, or t
  misc_feature (3597)..(3600): n is a, c, g, or t
  misc_feature (3603)..(3608): n is a, c, g, or t
  misc_feature (3611)..(3611): n is a, c, g, or t
  misc_feature (3615)..(3631): n is a, c, g, or t
  misc_feature (3636)..(3637): n is a, c, g, or t
  misc_feature (3639)..(3653): n is a, c, g, or t
  misc_feature (3655)..(3658): n is a, c, g, or t
  misc_feature (3663)..(3709): n is a, c, g, or t
  misc_feature (3711)..(3713): n is a, c, g, or t
  misc_feature (3716)..(3717): n is a, c, g, or t
  misc_feature (3720)..(3721): n is a, c, g, or t
  misc_feature (3723)..(3729): n is a, c, g, or t
  misc_feature (3731)..(3743): n is a, c, g, or t
  misc_feature (3745)..(3746): n is a, c, g, or t
  misc_feature (3754)..(3761): n is a, c, g, or t
  misc_feature (3765)..(3767): n is a, c, g, or t
  misc_feature (3771)..(3774): n is a, c, g, or t
  misc_feature (3776)..(3782): n is a, c, g, or t
  misc_feature (3784)..(3784): n is a, c, g, or t
  misc_feature (3786)..(3789): n is a, c, g, or t
  misc_feature (3791)..(3791): n is a, c, g, or t
  misc_feature (3793)..(3793): n is a, c, g, or t
  misc_feature (3796)..(3797): n is a, c, g, or t
  misc_feature (3806)..(3808): n is a, c, g, or t
  misc_feature (3811)..(3816): n is a, c, g, or t
  misc_feature (3818)..(3818): n is a, c, g, or t
  misc_feature (3821)..(3831): n is a, c, g, or t
  misc_feature (3833)..(3838): n is a, c, g, or t
  misc_feature (3840)..(3840): n is a, c, g, or t
  misc_feature (3843)..(3849): n is a, c, g, or t
  misc_feature (3851)..(3858): n is a, c, g, or t
  misc_feature (3861)..(3862): n is a, c, g, or t
  misc_feature (3864)..(3864): n is a, c, g, or t
  misc_feature (3868)..(3868): n is a, c, g, or t
  misc_feature (3873)..(3875): n is a, c, g, or t
  misc_feature (3877)..(3880): n is a, c, g, or t
  misc_feature (3884)..(3884): n is a, c, g, or t
  misc_feature (3897)..(3897): n is a, c, g, or t
  misc_feature (3899)..(3902): n is a, c, g, or t
  misc_feature (3904)..(3904): n is a, c, g, or t
  misc_feature (3909)..(3910): n is a, c, g, or t
  misc_feature (3920)..(3920): n is a, c, g, or t
  misc_feature (3925)..(3925): n is a, c, g, or t
  misc_feature (3928)..(3931): n is a, c, g, or t
  misc_feature (3934)..(3935): n is a, c, g, or t
  misc_feature (3940)..(3940): n is a, c, g, or t
  misc_feature (3942)..(3946): n is a, c, g, or t
  misc_feature (3948)..(3949): n is a, c, g, or t
  misc_feature (3957)..(3957): n is a, c, g, or t
  misc_feature (3961)..(3961): n is a, c, g, or t
  misc_feature (3963)..(3964): n is a, c, g, or t
  misc_feature (3970)..(3974): n is a, c, g, or t
  misc_feature (3979)..(3981): n is a, c, g, or t
  misc_feature (3987)..(3988): n is a, c, g, or t
  misc_feature (3991)..(3991): n is a, c, g, or t
  misc_feature (3995)..(3996): n is a, c, g, or t
catgttacctcatgattatagaaaaaaattagggttccttagtgaaattaaggaagaggataaaaagtattgttataaagatggtctcttctttagtccacacaaatttcttggaggtaataatactccaggtgttttagtatgtaaagaacgggtaattcataatttagaaagttcaccatctcaacccggtggaggaactgttttatttgtaaccaaaaatcaggttcattatagtccagatattgaaaccagagaagaaggaggtactcctgatattattggtagcattcgtattggtttagcacttaatattagaaatttagtagatgatatagatttagtagtgattgatcaattaatcaatacctatgttactaaacatttgaaacagattaaaaatttaagattcgtccatgattttgatgatgatactcctcatttacctatttattcattgttaataacttatggaaataaatatttccattataattatattacttgtcttctaaatgatctttttggtattcaaacgcgtccaggttgctcctgtgctccactctacggtcaaatattattatttggagaaaaagaaactgaggccaagactaatcttttgaaacaattggaatattatgctattaataagcaatcaatctataaaccaggatttactcgattgaatttcccctatttttatcctaaatttattattgattatattttatatgccattcagtttgttgctcttcatgcccatgaatttcttcctctctacaaatttaatatagaaactggagtctatacaatctgtgatcaatttagacaaaaacaacaccattccctttatccttttttcagctataatagaaataattttgaatattctttgatgtcacttcaaaaagaaatagatacggcaaaatcttccgctaataaattgttatctaaattatcgacctacattcaaactaataaaaccgttcaagagaatatgagaaatcagcattcattaatgaatataaaattggagaacaattatcagtggttcttaatttgtgatgatatcgataatttgaaagatatcaacttaaaaagaaataatattaaaaataatgaatatggtaaataccttaaaaaaaagtatagcaaatattttagtaaatcacttttaaaatagatttaatttactattcattaatattctttttttttattctttttatttttttttattcttttgagaagaaaaattcattaaacaaaagcaataattaattattatatcactcagtaaaaataaataaagcttcatcaatagtataaaaaaaatagatatttatatatcatagaaatacataaacgataaatacataaacatatatatatagtataaaaaaaaaatatcatttgtatctaatttaaaatattccaccatttctattattgttatttatttatttatttatttatttaggaaagttgatattatatttaataaatatattatatatacatattttttaattattatactatttattattaaataatttactaataaattataaaacaaaattattttttaaaatattattaaaaaataattaaaagaatatcattttttaaaaatcagtcaatatagcttttcaaataaaattcatttatttattttttaaaatatttaaaccttgaaagaggtatttaataaaattgtataattttttactagtttaataaaattaataaattaataaatttttaaacaaaaaaataatattaaattactccgtttttttgattcaataataatcatattattataatcacgtttatttttatcattgtattttcacaattattaaattatcttcacgtgattattaatttactaattgtttttatctggtttgctaatatattgaaaaaaaataaccaaaaaaaaaaaaatatatatatatatatatgtatatatatatatacatatataatattctaatgcgaactgttttttttttcatctaattttttattttaatttaaatttttatttttttatttcatttttttttttaaaagaaatagataaatttgcttctaattttctcatgttttcgaatattaatataaatattatttattattattattttttaactcttacaaaacgcaaaattattaattaattcaatttatatttttgcaattactttttggttcttcagtgaaaataatccataaacaaattttacacgaaagttttaattttttaaagatttattatttattaattaacctcgaaaattatagataattatataagaattgggtttagttttatattttatatcatttatatattatataatttttattttattttattttattatgaaaaatatttgacttttcatatattatttattattatataaaaatttatatattttaatttattattatgaattttcttctctttgttcatgtaaggtgaaattattaaaaatattaattataattttataattatttatattttcttcacttttttattttattttactttgttttgtttgtctttctgtttatttatttatttatttatttttttttcattattagaaaatatgttaatccattaatattttactgaacattggaatatatatataagataatgttttataatggtattgtcgagaaaatacgaaaatttgattttattatgagattatacattcatttcctgatttgtttcttccttgtgaattattacgattttgcttttatataaattatgtagatattaaatatatttattttgtaaatgttaaacaaaagaaataatataattatgagataaaattacatataaattttatttattagttaacttttataatttattatattaattatattaatacggttatattttgaaaatattctatttacatttctttgctgttcatcatatgattgttgtagagcccaagccaattgttcatcttcagatatttgattctataaaaataattgaatttatttttataaattacaaagattaataatacactttattttttttatatttaaatacatacaaataattcatttctattagttttatatttaccaaagtatgtatattatttcctgatgtattatttcttctgctatttaaacttgatgttgatgaatttggtgtattctttctacttcttggtttttctatattaacattccttcattaataatattatttattattcatttattaaaaaaaaaaaaaaaaaaaaaaaantnanaaaanannnannanannnaaaaannaaaaaaaaaaaannnannatnnntnttnttanttttaaaaaanaaaaaanannntnnnnanannnnnnnnnntnntttnaannnnnnnnnnnnnnnnnnnnnnnnnnnnnnntttnaanaaannnannnnanaaaaaannnnnnnnnntnnnnntnntnntnnnnnannnnnttnttnttnttatttttntannnnttttnttnnttnntnannnnntnnnnannnnnnnnannnnnnnntttttnnnnaannnttttttnnnnttnnnnnnaanaaannnnnnnnnnnnnnnnnttttnnannnnnnnnnnnnnnnannnnttttnnnnnnnnnnnnnnnnnnnnnnnnnnnnnnnnnnnnnnnnnnnnnnntnnnttnnttnntnnnnnnntnnnnnnnnnnnnntnntttttttnnnnnnnntttnnnacannnngnnnnnnntntnnnntnanaannttttttttnnnttnnnnnntnttnnnnnnnnnnntnnnnnngnttnnnnnnntnnnnnnnnttnnanaatnaaaannntnnnnaaanaaaaaaaaatttntnnnntnttttnnaaaaaatttnaaaanatnnnnaannaaaanannnnnannaaaaaaantttnanntttttnnnnntttannnaaaaannttnaaannatta

SEQ ID NO: 628 - DNA, 4000 bp, Escherichia coli
  misc_feature (469)..(469): n is a, c, g, or t
  misc_feature (1687)..(1687): n is a, c, g, or t
  misc_feature (1991)..(1991): n is a, c, g, or t
  misc_feature (3322)..(3322): n is a, c, g, or t
  misc_feature (3339)..(3339): n is a, c, g, or t
tgtcgtgatcgtcggcggcggggccgccggatcagtgctggccagcagattggctgaagactcgaatacctctgtcctgctgttggaggccgggccggactatccggacccggcaaatctcccggacgagatcaaattcggcggcaccagatacgccgaagccccagactcggagcataactgggccttgcgggggaccatcaccgaagagcagggcgagattcacgtggcgcaaggccgggtgatcgggggcggctcgtccatcaacggtcaggcgatgcaaaggggattctcagaggattttgacgcttggtcagcacttggcaatgacgaatggtcctataccaagatcctcccgtactttagaaagacggagcgtgatctggacatccgggatgattaccacggtactgacggaccgatgccggtgaggcgccgacaatccggggcctggtccgatatccaaaangcgttccacgaggcctgcatatcggaggggttcagcgtctgtgaggacaccaacggcgccgatccatcgggcgttggtgtatctccctccaacaacgtggacggcatcagaatgagcgccgcaatgacctacctcaatccaatgcgccaccgcctcaacctcacggtgcggggaagtgtcgcggtcaggagagtcttgttcaacggactgaaggccgtcggggtagaagttgaaagcggcggcgaagtgttcacgatcgaggcagaccgcgtcgtgctgtgcgccggggcgataaaatcgcctcacctgctgatgctctcggggatcggacctaaggaccaactccaagagttcggtataccccaggtccacgagctatccggcgtggggcaacatttatggaaccacctcagctccaacgttgtcttcaaagtaaaagacggtgttacggtctccggtgagaccgatggggtgcacttttgcctgcattacacttcagagggatccagcgaagccaacgatatgctgctcaggacgaactcggttgtagatgaacgggaagaaaaagtgcctggcgtacggaccaagtacgcaaccgacggaatcccgcctgagcaggtagcccggatctcgtgcactctcggcttgcccgatggctcgggatacgtcaggttggcgtccaccgaccccggggtgcagccgtcgttcaattaccagtacctccagaacgccaatgacaccaagcgcgtacgggaaggcgtccgcatggcggtcaaactactagaatcagacgcctataaacacgtggtcgaccaccgggtcaatccaaaggacgacatcctggccaacgatgactctttggacctttggatacgccagaatgttggaacggccaggcacgtatcagggacctgccggatgggaccggactcagacccgacggccgttgtcgaccagcggtgcaaggtgaaaggcgtagagaagttgtgggtggtcgatgcgtcgatcatgccccgcgtcccaaggtcgggcggcgcccatgccacggtgctcatgatcgcggaacgggcagtcgactgggtcgcgcaggggtaggcctggcgttaaagccggtacgattcagacgagagggttcggacggtgtctcccatcgccacgtgagcagcgggcgccccgagcgtcttgggcccttaaagatcgaagattattcgtccgtcnccggtgacctagtctgatcgacccagttcaatcctatgaatcactccgggaactttttccggactccttccgtctagcttattgacagtcaactcagatgcgatgccgcggcattggatgcgccggcacggataaggagactccgatgagctactctgcaacatcaccgatctcgaagggccggttattgcccggactggcgtccagacttcctacggggcaaaagtctcttttaggcgccgcggtggccgttttggcggctgtaatctttttgacttggatgctggccgcagggccttggccnggtagcgacgacacgtcggctacctccgagtccggccggttcgggggaaagaccgtcggcgccccagccatggttccagcaccagcgggagcatctggattcttcggggaagacagcggcatggcattgaccatcacgaacgatttggcgcttgatttttcggaggccaaagcggcctccggggggccgatattccagactgctactgggaccaaccccagcgtcacaaccctgcggcagatcatctcccaaggctccatgtccgttgaagtcccagacgtcgccagcgcggcatcccgtgtcagggccattgcgaagggcgccggcgggttcgttgaacaactctccagctccggtgtcgacgagtttcaacagtcgactatgaccatccgcgtgccccaggacgagttcttctcggttttcgaacagatcaaagccctgggcaaggtacagagcgagaaagccggcagcgaggatgtgaccgagcggttcatcgatctggaagcccgtcttaatagcgcccagcgggaagagacgagcctgctttctctcttagaccgggccgagcagatcagcgagatcctgatcatcgaacgggaactgacccgggtgcgcacggaattagaacaactccagggccaacttaatttcctggaacggcgggtcgatctggccaccatcaccgtattcttgacccctcctcagaaagacgacgcacgggcgccatctggctccgtaagcgtagagacgacggatgttagtggcagcgttgcagcggtcaaggcgatagtttcccagatgggcggagagatcgaccaggtgttcacatccatcaaagatggacgccaaagggcgatcatgacggtccgggttttctctcaagacttcgacctgatgcttgccgcggtggaagaccagggtggcgtggtctccaaagaggtccgcgagggtaagaacggagaccaggaatcttctggcagcgagtccgacgaacccaacgctcggttggatatagccttcggagagaaagaatcgtctgacttgggccgcgacctggccatcttcgctccgttgggcagcgtcggtctgcttctggtcatcggcctgctgtcctacggcgcataccggatggggatgcggcgcgaagactaacgtccaacgccaaccgccgcagtatgtttaccggcaagttataatctatggcctaacaagggtctcccgttgatccgatcgatctgcgggacacctttatagcgttacgcatcaaatcgatttgcgaggcccttatggcgaacgggaatacctctttcggctaccttcttcccacacgngaggtggtaatggctcncggagacccagattttgcatcgatgatcgacctggcggagacagccgaaggacatgggttcgactccgtatggtgcggtgacagcgtgctggcccgtcctcgtttggaagcactcagcaccttggcggccatcgccgggcgcacccagcgggtgaaattgggcacggccgtatttcttccggccttgcgcaaccctgtgatactggccaacgaggtcgcaaacctggacatcatctcgaaaggcagggtcatcctcggcgttggtatcgccagcaagacgccatccgtggagaaagagttcaccgcctgcggcgtttcgttccgtcaccgggtcagcatcttcgaagaatgcataaccctgatgcgtaggctctggaccgagccgcaagtcacattcaatggccggcattttcagttggacggcatcagcctaggtctacggcccgtgcaacagggcggggtgcccatctggatggctgccagcgccgaaaaaccacaacgccggatgttgaagatcggcgacggctggttccccaactccacatcgcccaaggccttcactgagggctggcagcagatcgaagctctggccaaggagtcaggcgacgacgccggacgcctgcacaaggctttgtacacgacgttgaacatcaacgaggac

SEQ ID NO: 629 - DNA, 4000 bp, Escherichia coli
  misc_feature (268)..(268): n is a, c, g, or t
  misc_feature (457)..(459): n is a, c, g, or t
  misc_feature (640)..(640): n is a, c, g, or t
  misc_feature (1357)..(1357): n is a, c, g, or t
  misc_feature (1987)..(1988): n is a, c, g, or t
  misc_feature (2212)..(2213): n is a, c, g, or t
  misc_feature (2240)..(2240): n is a, c, g, or t
  misc_feature (2243)..(2243): n is a, c, g, or t
  misc_feature (2262)..(2262): n is a, c, g, or t
  misc_feature (2266)..(2266): n is a, c, g, or t
  misc_feature (2270)..(2270): n is a, c, g, or t
  misc_feature (2814)..(2814): n is a, c, g, or t
  misc_feature (3289)..(3289): n is a, c, g, or t
  misc_feature (3291)..(3291): n is a, c, g, or t
  misc_feature (3293)..(3294): n is a, c, g, or t
  misc_feature (3296)..(3298): n is a, c, g, or t
  misc_feature (3301)..(3302): n is a, c, g, or t
  misc_feature (3304)..(3304): n is a, c, g, or t
  misc_feature (3307)..(3308): n is a, c, g, or t
  misc_feature (3310)..(3311): n is a, c, g, or t
  misc_feature (3313)..(3313): n is a, c, g, or t
  misc_feature (3315)..(3315): n is a, c, g, or t
  misc_feature (3317)..(3317): n is a, c, g, or t
  misc_feature (3319)..(3323): n is a, c, g, or t
  misc_feature (3326)..(3327): n is a, c, g, or t
  misc_feature (3331)..(3331): n is a, c, g, or t
  misc_feature (3335)..(3339): n is a, c, g, or t
  misc_feature (3341)..(3341): n is a, c, g, or t
  misc_feature (3344)..(3345): n is a, c, g, or t
  misc_feature (3347)..(3347): n is a, c, g, or t
  misc_feature (3349)..(3349): n is a, c, g, or t
  misc_feature (3351)..(3351): n is a, c, g, or t
  misc_feature (3353)..(3357): n is a, c, g, or t
  misc_feature (3359)..(3362): n is a, c, g, or t
  misc_feature (3364)..(3364): n is a, c, g, or t
  misc_feature (3366)..(3366): n is a, c, g, or t
  misc_feature (3369)..(3375): n is a, c, g, or t
  misc_feature (3377)..(3377): n is a, c, g, or t
  misc_feature (3469)..(3469): n is a, c, g, or t
tgctcctgtagaatttgtccaagaagcgagaggtgcacccggcatgctatcatacgtactgttcccatccccggataatactgttacttggtctgtgatagtccccgtattgctcatagtcactattttcatatcgaatgaagaggggactgggccgcctatccccgatgtgaaggtcgcgcttgaaatggatatttctgctccatcttctattttagatactgctaccggccgaatagaaccattactaatagttccagattcttcnccctcaatggggtttcctccagcatattttaacgctggaatcttcttagcgaagaaattattttccccatttgctcttggattacagctcccgccactcgcttcagcaaacgtttctacttggacataatcccccgcggttaattcttcgattacatgaggagcgtttgtcgtccaatcatgcccatcnnnattacgagcatatccactgcctccccagccttcgagatatgtagttccattcaatttgaatcgggcgacgggattggtacgagaactgcttgtcccggtcatcagcaaagacctgaactcatatactccattctcttgaacttcgatagcctcgttcccgctatcatatgtaaacgggggnctgtctatatgttctacgttgccccatggaattaacacgtctgtaccattatggtctgtccctgttccagagtttgtaagtttacaatatttcattattctatctgaccttcgacgtaggcgattatatcttgactggacgctgtttgattatcaacgataacagcgactgtcgatgctccccctgtattattttgccatgttgtaaagggttttcctcttaattcgttgtggaccgtggagccatccccagaaatcactgtcttctgtgatgtataacctccggagttgtccatggttacgatttccatatttagagatgttggagcaggttggccatcggtcagagtaaggccacattcttcaatggataacgtctcggtatcttctaatcgacagattgccactgtcccctgattactcgcagcaacatctcctgtttccctccctcttacaggggaattagaaatgactgcttcttttggcaatttcttcatataaaacatacaagtatcagcgaccattgtgcgcgttcctcctccgccttctctgaatgtttctacttggatattatctccagccgttaactcttctatgttatgaggcgaattagaactgtggagatggttttcattattacgcgcatatccactggctccatagccatctaaatatgtagaaccgttcaacaggaaccttgctacaggatttgaccggntgctactaccctgatgatatgtatagaggactgctctcatttcatatattccatcttcttcaactgttatttgattgttagcagaatcgaagataaacgttgagtcgatatattcggcatctgtccagggaaccacggtattatcgctgttaagatttgttgaggtatccgtcgttgttagcttgacagatggcattgctgtctctccggctccttgcaatacttcagagtatgaggcatcgctaatcgaggagtctaatgttacagaatccaacagtgaagtagatgctctattctctcctattaacgtagcgtcaaaccaaaatgaagagcctgctacagatgttaaattatcaatcgtatatgctcctggtgcagttatagacaccgtatcttgattatcagccgtcgtccctccagattcatcctgatatattgttaaatctacagacccatttatagaaccatcaacggttacataattcaacttggcgtcttcaactttagtcccagatgtgtacgttccatcggcggatgctctgtcatataaagtggccacctccgtatctgtgaatgcggtatcataaattctaacatccgccaaataaccgtagaaattatccccggtannctgtctctctccgaaaacgtagggaccagtaggagtacttatggaataagtagaggaattttccaaggtgccgttcatatagattctttgctcccccgcgcctgtcataacaaagaccatgtgatgccactcgttgaggccataatcttcgatattctgccccgtggtcagactatttccccagaaatgaattcctacttgtccattacttccatcagaaggtnntaaaataacactcccatttgtgttacnggnctcgggggtgcagaccatngcgngccnttgattgttactctgataccaacccgaatcttttgacgttttaaaccaaacagatatagttctcgctgatgaacccgacactggaaaatcattatctgtttctacatacgtcccagaagcatcgaaaaaatatgaagaagtttcgagaatgcctggttgttcaggagaaactccattgtaagatgtggcatcgtgagaatttccactaatatcattaacttctgtcccagaatcttcttgtagaggccaaaaccctacaagattagaggacttgtaagggctactcatactatatcccttctttaactcggttgctaagaggtctgtagcaccgaagctctcgtgaacgatatttgcgctttcgctctgtgaattgtcccagtcactctgcgtatcccatataatagacatgaagacctcgtagttcttagtctatcttacatatcccgacctcttaaaggtttctagagaagaaaaagagtatctttattacatatgatgccaatagatagacgagccgtagaggagagacatacttcaaaangatagaagctgtcaaacggatgatttacaagtcgcgcgaagagaaagacgaggataaaatgatagttcttcgagacccagatgtagaaggctctatcttagccacagatagtagcaatgatgacgaatggatgtcctcgcccgattacgtctacctcgacgatatggtttaatcccaggagcagacgttgccgtacaacagataatctccttttagatttttgagcttataggtccgagggtaccagtatcctgcttggccgttcgttactctccacaaatcagatttttcgtcagtaaaccatactacagagtcgtggttataatagcaacaattagaatctaaatccttacgttctccaatttttactcccttaaaatgtagatgtccgttatctctcgtttcgagctgaagccagttatcttcgataagaacgtctgttatatcgtaatagtccttgcccgtaaacctatcntngnngnnnccnngncgnntnnantntncnnnnnganntgtnatgnnnnncntcnntntngntnnnnncnnnnangnaannnnnnntngggacggtaagtcgtctgatgtctccgagttcgtcgacgtaggttgcgattcttgttcgtctgtcatatttcagggcgggaggagcattagntgtctctccagtgcgttcgccagtatgacgttcagagttctcttttacgaatgtaaaaatcgctgactctgcgtcaaaatacaccttctttacctctcggcaacgcatctatcacacgtttcgataacaacctataataagataccgacgctacataccacagatgtaaagataatggttggtatgaataatctttcctgagactgaaaagttatcatgtgggtattctataaccctttcatcattatattcgtcgatgtaatgtagaaggctgtcttcataaacaacctcgccgtctcgctctattccatgcccgcctcccatccacatgtctcccgggtctttgtccggcctatggcgtatggctctccctatgaactcctcgttgtccatgcgcgtgctatagtaaccgagtgttagtgattcaccgtccacaaccagagacttacagcaaacatagccgggcttcaatgagccgcctactcggctacatccttctttcttaactgtcatcccagtcgcagattttgg

SEQ ID NO: 630 - DNA, 4000 bp, Escherichia coli
  misc_feature (1)..(1): n is a, c, g, or t
  misc_feature (3)..(4): n is a, c, g, or t
  misc_feature (6)..(6): n is a, c, g, or t
  misc_feature (9)..(11): n is a, c, g, or t
  misc_feature (14)..(14): n is a, c, g, or t
  misc_feature (19)..(19): n is a, c, g, or t
  misc_feature (21)..(21): n is a, c, g, or t
  misc_feature (23)..(23): n is a, c, g, or t
  misc_feature (28)..(28): n is a, c, g, or t
  misc_feature (30)..(30): n is a, c, g, or t
  misc_feature (32)..(32): n is a, c, g, or t
  misc_feature (35)..(35): n is a, c, g, or t
  misc_feature (40)..(40): n is a, c, g, or t
  misc_feature (44)..(44): n is a, c, g, or t
  misc_feature (49)..(49): n is a, c, g, or t
  misc_feature (51)..(52): n is a, c, g, or t
  misc_feature (54)..(54): n is a, c, g, or t
  misc_feature (59)..(59): n is a, c, g, or t
  misc_feature (62)..(63): n is a, c, g, or t
  misc_feature (73)..(74): n is a, c, g, or t
  misc_feature (76)..(76): n is a, c, g, or t
  misc_feature (80)..(80): n is a, c, g, or t
  misc_feature (84)..(84): n is a, c, g, or t
  misc_feature (88)..(88): n is a, c, g, or t
  misc_feature (93)..(93): n is a, c, g, or t
  misc_feature (95)..(95): n is a, c, g, or t
  misc_feature (97)..(97): n is a, c, g, or t
  misc_feature (101)..(101): n is a, c, g, or t
  misc_feature (103)..(103): n is a, c, g, or t
  misc_feature (105)..(105): n is a, c, g, or t
  misc_feature (108)..(108): n is a, c, g, or t
  misc_feature (114)..(118): n is a, c, g, or t
  misc_feature (120)..(121): n is a, c, g, or t
  misc_feature (128)..(128): n is a, c, g, or t
  misc_feature (130)..(130): n is a, c, g, or t
  misc_feature (135)..(135): n is a, c, g, or t
  misc_feature (146)..(146): n is a, c, g, or t
  misc_feature (148)..(148): n is a, c, g, or t
  misc_feature (152)..(152): n is a, c, g, or t
  misc_feature (158)..(158): n is a, c, g, or t
  misc_feature (166)..(166): n is a, c, g, or t
  misc_feature (168)..(170): n is a, c, g, or t
  misc_feature (174)..(174): n is a, c, g, or t
  misc_feature (176)..(177): n is a, c, g, or t
  misc_feature (180)..(180): n is a, c, g, or t
  misc_feature (182)..(182): n is a, c, g, or t
  misc_feature (184)..(184): n is a, c, g, or t
  misc_feature (189)..(189): n is a, c, g, or t
  misc_feature (194)..(194): n is a, c, g, or t
  misc_feature (196)..(196): n is a, c, g, or t
  misc_feature (200)..(200): n is a, c, g, or t
  misc_feature (207)..(207): n is a, c, g, or t
  misc_feature (212)..(214): n is a, c, g, or t
  misc_feature (222)..(222): n is a, c, g, or t
  misc_feature (225)..(225): n is a, c, g, or t
  misc_feature (238)..(249): n is a, c, g, or t
  misc_feature (252)..(253): n is a, c, g, or t
  misc_feature (255)..(255): n is a, c, g, or t
  misc_feature (258)..(263): n is a, c, g, or t
  misc_feature (265)..(271): n is a, c, g, or t
  misc_feature (273)..(274): n is a, c, g, or t
  misc_feature (276)..(276): n is a, c, g, or t
  misc_feature (279)..(281): n is a, c, g, or t
  misc_feature (283)..(285): n is a, c, g, or t
  misc_feature (287)..(288): n is a, c, g, or t
  misc_feature (290)..(293): n is a, c, g, or t
  misc_feature (296)..(302): n is a, c, g, or t
  misc_feature (304)..(304): n is a, c, g, or t
  misc_feature (306)..(314): n is a, c, g, or t
  misc_feature (316)..(325): n is a, c, g, or t
  misc_feature (327)..(327): n is a, c, g, or t
  misc_feature (329)..(332): n is a, c, g, or t
  misc_feature (334)..(334): n is a, c, g, or t
  misc_feature (336)..(346): n is a, c, g, or t
  misc_feature (348)..(352): n is a, c, g, or t
  misc_feature (354)..(355): n is a, c, g, or t
  misc_feature (358)..(359): n is a, c, g, or t
  misc_feature (361)..(367): n is a, c, g, or t
  misc_feature (370)..(371): n is a, c, g, or t
  misc_feature (373)..(384): n is a, c, g, or t
  misc_feature (386)..(402): n is a, c, g, or t
  misc_feature (404)..(414): n is a, c, g, or t
  misc_feature (416)..(428): n is a, c, g, or t
  misc_feature (431)..(446): n is a, c, g, or t
  misc_feature (448)..(450): n is a, c, g, or t
  misc_feature (453)..(455): n is a, c, g, or t
  misc_feature (458)..(460): n is a, c, g, or t
  misc_feature (462)..(467): n is a, c, g, or t
  misc_feature (470)..(473): n is a, c, g, or t
  misc_feature (475)..(476): n is a, c, g, or t
  misc_feature (481)..(481): n is a, c, g, or t
  misc_feature (483)..(483): n is a, c, g, or t
  misc_feature (485)..(493): n is a, c, g, or t
  misc_feature (497)..(503): n is a, c, g, or t
  misc_feature (505)..(510): n is a, c, g, or t
  misc_feature (512)..(520): n is a, c, g, or t
  misc_feature (522)..(529): n is a, c, g, or t
  misc_feature (531)..(540): n is a, c, g, or t
  misc_feature (542)..(554): n is a, c, g, or t
  misc_feature (556)..(560): n is a, c, g, or t
  misc_feature (562)..(571): n is a, c, g, or t
  misc_feature (573)..(579): n is a, c, g, or t
  misc_feature (581)..(582): n is a, c, g, or t
  misc_feature (584)..(592): n is a, c, g, or t
  misc_feature (594)..(600): n is a, c, g, or t
  misc_feature (602)..(613): n is a, c, g, or t
  misc_feature (615)..(637): n is a, c, g, or t
  misc_feature (639)..(645): n is a, c, g, or t
  misc_feature (647)..(648): n is a, c, g, or t
  misc_feature (650)..(659): n is a, c, g, or t
  misc_feature (661)..(705): n is a, c, g, or t
  misc_feature (707)..(766): n is a, c, g, or t
  misc_feature (768)..(782): n is a, c, g, or t
  misc_feature (784)..(809): n is a, c, g, or t
  misc_feature (811)..(834): n is a, c, g, or t
  misc_feature (836)..(841): n is a, c, g, or t
  misc_feature (843)..(848): n is a, c, g, or t
  misc_feature (851)..(852): n is a, c, g, or t
  misc_feature (854)..(856): n is a, c, g, or t
ngnncncgnnngcngggcngncncgcgntncnggntgcanccgnacgcngnngngaggngcnngcgcgcaacnncnatcngggntcgngggcncngnacgngngngtnctgctnnnnngnnccgtccncnctgcncgcgccaagcngnctangtcggngccggcgngnnngtcncnnccncnanggtcncgggncngagnggctccntccgnnngagacggncgnagtcccggtggannnnnnnnnnnngcnncnccnnnnnncnnnnnnncnncntcnnntnnncnntnnnngannnnnnngngnnnnnnnnngnnnnnnnnnncncnnnngncnnnnnnnnnnngnnnnngnngcnngnnnnnnngcnntnnnnnnnnnnnngnnnnnnnnnnnnnnnnncnnnnnnnnnnngnnnnnnnnnnnnncgnnnnnnnnnnnnnnnngnnncgnnngcnnngnnnnnncgnnnncnncgggngngnnnnnnnnnccgnnnnnnncnnnnnngnnnnnnnnncnnnnnnnncnnnnnnnnnngnnnnnnnnnnnnncnnnnngnnnnnnnnnncnnnnnnngnngnnnnnnnnncnnnnnnngnnnnnnnnnnnncnnnnnnnnnnnnnnnnnnnnnnngnnnnnnncnncnnnnnnnnnngnnnnnnnnnnnnnnnnnnnnnnnnnnnnnnnnnnnnnnnnnnnnngnnnnnnnnnnnnnnnnnnnnnnnnnnnnnnnnnnnnnnnnnnnnnnnnnnnnnnnnnnnncnnnnnnnnnnnnnnngnnnnnnnnnnnnnnnnnnnnnnnnnngnnnnnnnnnnnnnnnnnnnnnnnngnnnnnncnnnnnnggnngnnntggcgcgcccgacaggtgttggacgcgcgatttcaacctacaccatcccgatcgaggggcgcgacgagtggctggccgctgctaggcggctggcatgagggacgggtaccagcgcggggtgcttccgccgcaggcgacgcggcgccagatggacgtgcttgccgcctacgtcgccgccggcgggtcggtccacgacgcggccgaactcgtgggtatcaggcccagcaccgtcaagcggcacctcgccgacctacgagcgcggtcgggactgacgaccgagcagctgatctattcgggccgcgcccttggttggctcgtcgtcccgagcctggagccagcgtgatctcttgaatgcaggctgagcccccgcgcgcgaccccgagtgcccatcgctcgctcaagccggactatgcgccaaccactctcgctccgcagtcaggccgtgccgatgggatcggcacggtcgggcgacgcccggaggctgtccagaccggcgaggatcagatcgagaccgaagtcgaactcgctggcgaagtcgtagccggccttgcccacgtgctcggcaacggactcggcgaggtagggatagtcgtcagcggggaactggctgagaatctcgatcgccaacttgtcgacctggtccgtgctttcgaagggcagggtctgctcttgcagcgcgaagccgaagatgaagctgtcgagcagggtgaaggcgtgaacggccatcgcgacggagaagccagcctgccgcaacgcccgtatcaccatgtcgtggtatcgcatgttgcccgggcctggatggacgcgggactggatcacccccagcgcccagcggtgacgcgcgagcacttcgcggatcgagttggcttgctgacgcatcgcccctttccagtctgaccctccggcggtgacgtcgatctcctcgtacatcacgtcgaccatcgcgtcgagcagatcgtccttgttcgcgaagtggttgtagagcgccatggggtatacccccagctcctgggcgacgttccgcatgctgagcgactcgattccgccttcatcagcgagcttgatggccgttcggagcactcgctgccggctgagtgggactcgtcgtctggtcctcgatcgttgcttgacaaacatttgcatccctctcggcacctgggtcttgacgtatgtacgctgtacatctaatgtacgccgtattggcgatgtacgccgtacattagcaggagaccaccatgaaggcaatcgttcaaccaacctatggctcacccgatgacctgcagctgcgcgacatcgaccagcccacgatcggcgaccacgacgtgctggtgcgcgtgcatgccgcgtcggtcaacaccgccgaccggctcatcctgcgcggccgcccctatctgatgcgcgccgcgggctccggactcggctttagcccgcgtcgaccccagttcgccgtcgcgggcacggacctcgccggtcgtgtggcggcggtaggcagtttggtgaccgccttccgccccggcgacgaggtgtacgggagcgtccccggcgcgatcgcggagtacgtcgcggcgccggacaccgccctggcggccaagccgtcgagcctcagcttccaacaggccgccgcgatgccgctggccgcgctcaccgcactccaggggcttcgcgatgccggacaggtccagcccgggcagcgggttctgatcaatggggcctcgggcggcgtcggcacctatgcggtgcagatcgccaaggtcctgggcgccgaggtgaccgcggtgaccagcggcccgaacgtcgagatggttcgatcactcggcgccgaccacgtcatcgactacaccagcgaggacttcacggagtcagccagtcggtatgacgtcatcctggaccttgtgggcaaccactcactgtcggctcgacgacgcgcgctgaccgcgacgggcacgctgttgctgtcatacgtcggtaccaaccgctgggtggggccgatcggtcacatcctggctgccgtggtgctgacgcggttcacgagccacaggatcgtctcgttcacgaccgctccgagcagtgccgacctgctcgtccttgcgcagctgacagacgacggaaagatcgtgccggtcatcgaccggacctaccgcctcgaccaagcagccgaggcgatccgctacctggaactcggacgtgcccggggcaaggtcatcatcagcatcagcgaccgcggcgcgctggccgcgctgacgcgggcgagtgtggcgtcgtgacggcgccagcgatgccagtggggccgtacgcggctcgtctgaccattgactaccccgaacgccttgatcgggttacgaccttctttcgcctgatctgggtcataccgattgccatcgtgctcggagtgatcacggggagcgggacccacatgatggtcaccgcagccggtgagcaaattgtcggagccggcggtggactgctcgctggcttggctttcgccacggcgctgatgatcgtcatccgcatgcgctacccgcgctggtggttcgacttcgcacgggagctgacccgcttcggcgcccgcgtcggtgcctacgtggccctgctcacggaccgatatccgtccactgtcgaggagcaatcggtgcacctcgagatcgagtatccagaggtcgatcgcgacctgaaccgctggcttccactggtcaagtggttcctggcgatcccccattacgtcgcgctgatcgtcctgatcatcggagcggccctcgccatcgtgatcgcctggttcgcgatcctcatgaccgggcgttatccccagccgctcttcaactacgtggtcggcgtcgggcggtggagcctgcgcgtgaacgcctacgcgttcctgctcgtgaccgaccgctatccccccttcagcctgaaagcagggtagtcatgcgaatcctccgagagctctcgcggcgcaagctgcgcacgagcctgaccatcaccggcatcaccatcggcatctgggcactcgtggtgttcagttcgctggccaaccagatcaacggcctcgtcggcatgggcagcgaatacttcgccgacaagatcgtcgtcaccgacggcatggccttcggctcgtcgccgatgcgcctcgacgacgtcgagatcatcgcc

SEQ ID NO: 631 - DNA, 4000 bp, Escherichia coli
  misc_feature (759)..(759): n is a, c, g, or t
  misc_feature (765)..(765): n is a, c, g, or t
  misc_feature (775)..(775): n is a, c, g, or t
  misc_feature (780)..(780): n is a, c, g, or t
  misc_feature (782)..(782): n is a, c, g, or t
  misc_feature (792)..(792): n is a, c, g, or t
  misc_feature (831)..(831): n is a, c, g, or t
  misc_feature (865)..(865): n is a, c, g, or t
  misc_feature (876)..(876): n is a, c, g, or t
  misc_feature (897)..(897): n is a, c, g, or t
  misc_feature (903)..(903): n is a, c, g, or t
  misc_feature (921)..(921): n is a, c, g, or t
  misc_feature (924)..(924): n is a, c, g, or t
  misc_feature (931)..(931): n is a, c, g, or t
  misc_feature (936)..(936): n is a, c, g, or t
  misc_feature (945)..(945): n is a, c, g, or t
  misc_feature (1186)..(1186): n is a, c, g, or t
accggctggaaagtgtcgcctccgtgcaacacgacgcgatgcatcagcaggccaccggctccgccgcccatgcccgcagcttcgctcagctcgtcaccgaacagcgccgccaccgcaaccatcccgacggattctgggtcgccagtaccgacccggccgccgcccagcacgcccttgtcgacaacattgcccgcgatcgcctgcaccaagcggccgtgctcagcgacggcgccacccgcctggttgaccgcttcgacctgctcgactggtccagcttcctggccgtcctggccgagcagggaccagacgcgatcatcgcccaggtccgagcggccgaacacagcgacccggatgggcaacgctggccgcgtggcaagcgacacgacgacgcctcggccgccttctgccaactgacctaactccgggttgacgcctgaaacgggccgacaagcggccctcgtggcgggagcctcgttctcccaccacgtccagggtggagggatctggccggacggtagatggcatgcccggcccccagccgcaagcgctccaccaaccaacccggcacctgagccgagcctactcggcagcttcatccatggccgacttcgttggctccaccgcttgcccctggtggtctctcggcatgccacggcatccaccggtcctcggttccacgaggacgggcagaccgcccggccaggcaacaggaaggggcagaccatgaccgaggcagccgtgagcttcgccggcaacctnaccgangaccccgagntccgntncaccgagggnggtatcgcccgggccatcttccgggtggccgtcagcggncggcgggagcaggaggcgtcgttcttcaccgtgntcgtgtggcgngaccaggccgagcatgccgcncagtcnctggccaagggcagccgngtngtggtcntgggncggctccancagcgggcatggacggctgaggatgggagcgcccggtcggtggtggaggtcgtggccgaggagctggggccgagcctccggtgggcgaccgccacgccggtcaaggccacgaggcccgccagcgacacgaccgtgcatgagcgcccggtcaaaggcgcttgacgagcatcaccagatctccgctagggtcactggcggagccgcgggcggtatcctgggctccgcctgaccacccgccganctggggagcccggcatcgtgagaacgacctggccgcgtcgcgactccaacgcgccaggcgggcgacctggcatcgtggtggtgaactacaacacgcgccggttggtcgcccagctcgtctactcgctgtaccgcaccctccggccgccccaccctcgggtaggtcgaggtcgatctcgttgacggcccgaaggtcgccgaagtccttggtcagaccggctgttcggatcgaagccatgtgcctaccgtcccatccggagctgcggtcggtgtggtgcggcgggctcgggcatcgacggtgaggacgtgcggggccaggtccaggcgaagcgcaggatgacggcgagcacgatcacttcgagcacgacgccgaggccgtagaagtacatccaggacccgcccaccaggttgaatatcgagtaggggacgtacagcgatgccacgacgaggttgatggtgcggttcgcacgggcgggcagcgtcatggaaagcatcaccatcaggatcgggatcgccacgctcgtgagcgcgacggtcacgaaggtttggctgatgttgaactcccagacgacgccggccaggatgtcgtcgatgacgccgggcttgtacaggtgcaagtagtcgacgtagatgtagaggaacatgaagctggtccatgctgctgcgagcttcgcctgaaccgggatctgccggtcctccagcgcggtgagttctgctctctgggttctcacgtcgttgctccttcggttcggtggggatggtgagttccaccacgatggctggcgttccgcagcgcggcgcctgtatacttacgtcgtaagcatacagcgtatgttatacatacatcgtaagccttgtcaagcggaggccctgtggggacgcaacccgaaccgagctcgacgccgcggaccgccctgaacagggagcgcgtggtgcgggctgccgtcgccctcgccgacgaagccggcctcgaggcgctcagcatgcgcaagctcggccagcgactcggggtcgaggcgatgtccctgtacaaccacgtggcgaacaaggacgacctcctggacgggatgatcgacgtcgtgttcagcgagatcgacctgcccgccagcgatgccggctggcgcacggccatgcgccagcgggcggcctcggtgcgcgaggcactcgcgcgccacccctgggcgaccgggctgatggagctccggacaacgcacgggccgacgagtctgcgccaccacgaggcggtgctggactgcctgcgcgaagcgggcttctcgatcgagaacgccacccacgcgtactggctcctggacagctacatctacgggttcgcgatccaggaggcgagcctgccgttcggcacaccggaggagctggtcgagatggccgagatcgtcctcccacgggtgccggcggagacctacccgcgcctgaacgaggccgccgccgccgccctcgcggccggctacgactacacacacgagttcgagttcggtctcgacctcatcctcgacggcctcgagcgactcctagactccgctcgagaatcgggcgcgaccgttcactgaggagcgaggcgaccggatgaaggcggtggtctacgaccggtacggtccgcccgacgtgcttcgcgtcgagcaggtccggatgccgaccccgggcccaaagcaggtgctcgtcgaggtcgttgccacctcggtcaatctctccgactgggagtgcctgcggggcaccccgctctacgcgcggatcgggggcgtgcgcaggccggcgcgtcggaccctcggctcggacatcgcggggcgcgtgcacgcggtcggcccgggcgtcacccggttccgcgtgggcgacgaggtctacggcgacaacctcggcctgatgggcggcttcgccgagtacgcggtggcgcccgagtcggtgcttgcccacaagcccgccgcgttggccttcgccgaggcctcgacgcttccccaagcagcggcgatcgccctgcagggaaccgccggcgtgggggaaggccagcgcatgctcatcaacgggtcaggcggcggcagcgggtcgttcgcgatccagctcgccaagcgtgcgggggcgcacgtgaccggtgtcgacaacgcgggcaagctcgagttcatgcggtcgctgggcgccgacgaggtggtcgaccaccgccgcacggacttcacgcagctcggaccgttcgaccacatcctcgacctcgtcgcgtaccggtcggtgttcacctatcggcgggcgctggcccgtggcggccggtaccgctgcgtgggtgggccggtgccgaccctcctgcggatcgtcacgatcggcgccttgcttggccggctcaccgggcgccgcatcgggatgctggtggtcaagcagggccccgcgcacttcgagcccctcgccgagcggtgcgtcgccggggatgtccagatccacatcgaccgcaggttcggcctggacggcgtcccgcaggcgctggcatacgtcggtgagggtcgcgctctgggcaaggtcgtcatcgaaacctgaccgccacctccgcaactgcagccggggcgcaaccgtccctgcagggccacaacggcggcgagccgaagccacgatgcgtgcgtgcacgttgcaggcggcggcgagcggcgctggcgtcgtccaccatcaccaaccttgttgccgtctggactgagcgtgccaggacgggcgggagcatcgctagggcaggaacagccctgggacgacagggccgcgttgcttgttgtcctgctcgtcggccaggcgcgctctgctcgccaatcggccgccagcctgtcga

SEQ ID NO: 632 - DNA, 4000 bp, Escherichia coli
  misc_feature (1)..(3): n is a, c, g, or t
  misc_feature (5)..(6): n is a, c, g, or t
  misc_feature (9)..(13): n is a, c, g, or t
  misc_feature (15)..(17): n is a, c, g, or t
  misc_feature (19)..(19): n is a, c, g, or t
  misc_feature (22)..(23): n is a, c, g, or t
  misc_feature (25)..(25): n is a, c, g, or t
  misc_feature (27)..(27): n is a, c, g, or t
  misc_feature (29)..(36): n is a, c, g, or t
  misc_feature (38)..(39): n is a, c, g, or t
  misc_feature (41)..(41): n is a, c, g, or t
  misc_feature (43)..(43): n is a, c, g, or t
  misc_feature (46)..(46): n is a, c, g, or t
  misc_feature (48)..(56): n is a, c, g, or t
  misc_feature (59)..(63): n is a, c, g, or t
  misc_feature (65)..(67): n is a, c, g, or t
  misc_feature (70)..(85): n is a, c, g, or t
  misc_feature (88)..(89): n is a, c, g, or t
  misc_feature (91)..(91): n is a, c, g, or t
  misc_feature (93)..(97): n is a, c, g, or t
  misc_feature (99)..(102): n is a, c, g, or t
  misc_feature (104)..(104): n is a, c, g, or t
  misc_feature (106)..(107): n is a, c, g, or t
  misc_feature (109)..(109): n is a, c, g, or t
  misc_feature (111)..(120): n is a, c, g, or t
  misc_feature (122)..(122): n is a, c, g, or t
  misc_feature (125)..(128): n is a, c, g, or t
  misc_feature (130)..(135): n is a, c, g, or t
  misc_feature (139)..(142): n is a, c, g, or t
  misc_feature (144)..(146): n is a, c, g, or t
  misc_feature (148)..(152): n is a, c, g, or t
  misc_feature (156)..(157): n is a, c, g, or t
  misc_feature (159)..(159): n is a, c, g, or t
  misc_feature (163)..(165): n is a, c, g, or t
  misc_feature (167)..(167): n is a, c, g, or t
  misc_feature (169)..(171): n is a, c, g, or t
  misc_feature (173)..(176): n is a, c, g, or t
  misc_feature (178)..(180): n is a, c, g, or t
  misc_feature (184)..(190): n is a, c, g, or t
  misc_feature (192)..(195): n is a, c, g, or t
  misc_feature (1989)..(1989): n is a, c, g, or t
  misc_feature (1998)..(1998): n is a, c, g, or t
  misc_feature (2016)..(2016): n is a, c, g, or t
  misc_feature (2028)..(2028): n is a, c, g, or t
  misc_feature (2052)..(2052): n is a, c, g, or t
  misc_feature (2070)..(2070): n is a, c, g, or t
  misc_feature (2115)..(2116): n is a, c, g, or t
  misc_feature (2118)..(2118): n is a, c, g, or t
  misc_feature (2184)..(2184): n is a, c, g, or t
  misc_feature (2205)..(2205): n is a, c, g, or t
  misc_feature (2214)..(2214): n is a, c, g, or t
  misc_feature (2225)..(2226): n is a, c, g, or t
  misc_feature (2241)..(2241): n is a, c, g, or t
  misc_feature (2259)..(2259): n is a, c, g, or t
  misc_feature (2265)..(2265): n is a, c, g, or t
  misc_feature (2269)..(2269): n is a, c, g, or t
  misc_feature (2310)..(2310): n is a, c, g, or t
  misc_feature (2313)..(2313): n is a, c, g, or t
  misc_feature (2319)..(2319): n is a, c, g, or t
  misc_feature (2331)..(2331): n is a, c, g, or t
  misc_feature (2337)..(2337): n is a, c, g, or t
  misc_feature (2343)..(2343): n is a, c, g, or t
  misc_feature (2349)..(2349): n is a, c, g, or t
  misc_feature (2352)..(2352): n is a, c, g, or t
  misc_feature (2354)..(2354): n is a, c, g, or t
  misc_feature (2356)..(2359): n is a, c, g, or t
  misc_feature (2362)..(2365): n is a, c, g, or t
  misc_feature (2367)..(2367): n is a, c, g, or t
  misc_feature (2369)..(2369): n is a, c, g, or t
  misc_feature (2371)..(2372): n is a, c, g, or t
  misc_feature (2374)..(2374): n is a, c, g, or t
  misc_feature (2378)..(2385): n is a, c, g, or t
  misc_feature (2387)..(2389): n is a, c, g, or t
  misc_feature (2391)..(2391): n is a, c, g, or t
  misc_feature (2394)..(2394): n is a, c, g, or t
  misc_feature (2397)..(2398): n is a, c, g, or t
  misc_feature (2400)..(2401): n is a, c, g, or t
  misc_feature (2404)..(2410): n is a, c, g, or t
  misc_feature (2412)..(2412): n is a, c, g, or t
  misc_feature (2414)..(2414): n is a, c, g, or t
  misc_feature (2416)..(2416): n is a, c, g, or t
  misc_feature (2418)..(2427): n is a, c, g, or t
  misc_feature (2430)..(2431): n is a, c, g, or t
  misc_feature (2433)..(2434): n is a, c, g, or t
  misc_feature (2436)..(2439): n is a, c, g, or t
  misc_feature (2441)..(2442): n is a, c, g, or t
  misc_feature (2445)..(2446): n is a, c, g, or t
  misc_feature (2448)..(2449): n is a, c, g, or t
  misc_feature (2452)..(2457): n is a, c, g, or t
  misc_feature (2460)..(2461): n is a, c, g, or t
  misc_feature (2463)..(2465): n is a, c, g, or t
  misc_feature (2467)..(2467): n is a, c, g, or t
  misc_feature (2469)..(2469): n is a, c, g, or t
  misc_feature (2471)..(2472): n is a, c, g, or t
  misc_feature (2474)..(2478): n is a, c, g, or t
  misc_feature (2480)..(2485): n is a, c, g, or t
  misc_feature (2487)..(2487): n is a, c, g, or t
  misc_feature (2492)..(2493): n is a, c, g, or t
  misc_feature (2495)..(2499): n is a, c, g, or t
  misc_feature (2505)..(2510): n is a, c, g, or t
  misc_feature (2512)..(2512): n is a, c, g, or t
  misc_feature (2514)..(2515): n is a, c, g, or t
  misc_feature (2517)..(2521): n is a, c, g, or t
  misc_feature (2524)..(2531): n is a, c, g, or t
  misc_feature (2534)..(2544): n is a, c, g, or t
  misc_feature (2550)..(2553): n is a, c, g, or t
  misc_feature (2555)..(2556): n is a, c, g, or t
  misc_feature (2558)..(2559): n is a, c, g, or t
  misc_feature (2562)..(2565): n is a, c, g, or t
  misc_feature (2569)..(2578): n is a, c, g, or t
  misc_feature (2580)..(2584): n is a, c, g, or t
  misc_feature (2586)..(2586): n is a, c, g, or t
  misc_feature (2588)..(2590): n is a, c, g, or t
  misc_feature (2592)..(2598): n is a, c, g, or t
  misc_feature (2600)..(2600): n is a, c, g, or t
  misc_feature (2602)..(2602): n is a, c, g, or t
  misc_feature (2606)..(2614): n is a, c, g, or t
  misc_feature (2617)..(2619): n is a, c, g, or t
  misc_feature (2621)..(2634): n is a, c, g, or t
  misc_feature (2636)..(2636): n is a, c, g, or t
  misc_feature (2638)..(2638): n is a, c, g, or t
  misc_feature (2641)..(2642): n is a, c, g, or t
  misc_feature (2644)..(2646): n is a, c, g, or t
  misc_feature (2649)..(2652): n is a, c, g, or t
  misc_feature (2654)..(2655): n is a, c, g, or t
  misc_feature (2657)..(2659): n is a, c, g, or t
  misc_feature (2664)..(2667): n is a, c, g, or t
  misc_feature (2672)..(2674): n is a, c, g, or t
  misc_feature (2676)..(2676): n is a, c, g, or t
  misc_feature (2679)..(2685): n is a, c, g, or t
  misc_feature (2687)..(2688): n is a, c, g, or t
  misc_feature (2690)..(2690): n is a, c, g, or t
  misc_feature (2692)..(2697): n is a, c, g, or t
  misc_feature (2699)..(2700): n is a, c, g, or t
  misc_feature (2702)..(2704): n is a, c, g, or t
  misc_feature (2706)..(2707): n is a, c, g, or t
  misc_feature (2709)..(2710): n is a, c, g, or t
  misc_feature (2712)..(2717): n is a, c, g, or t
  misc_feature (2719)..(2722): n is a, c, g, or t
  misc_feature (2726)..(2728): n is a, c, g, or t
  misc_feature (2733)..(2734): n is a, c, g, or t
  misc_feature (2738)..(2740): n is a, c, g, or t
  misc_feature (2742)..(2743): n is a, c, g, or t
  misc_feature (2747)..(2747): n is a, c, g, or t
  misc_feature (2749)..(2749): n is a, c, g, or t
  misc_feature (2753)..(2753): n is a, c, g, or t
  misc_feature (2755)..(2757): n is a, c, g, or t
  misc_feature (2759)..(2760): n is a, c, g, or t
  misc_feature (2762)..(2763): n is a, c, g, or t
  misc_feature (2765)..(2773): n is a, c, g, or t
  misc_feature (2776)..(2776): n is a, c, g, or t
  misc_feature (2779)..(2781): n is a, c, g, or t
  misc_feature (2783)..(2783): n is a, c, g, or t
  misc_feature (2785)..(2786): n is a, c, g, or t
  misc_feature (2790)..(2790): n is a, c, g, or t
  misc_feature (2792)..(2796): n is a, c, g, or t
  misc_feature (2798)..(2802): n is a, c, g, or t
  misc_feature (2805)..(2805): n is a, c, g, or t
  misc_feature (2808)..(2810): n is a, c, g, or t
  misc_feature (2812)..(2812): n is a, c, g, or t
  misc_feature (2814)..(2817): n is a, c, g, or t
  misc_feature (2820)..(2822): n is a, c, g, or t
  misc_feature (2825)..(2825): n is a, c, g, or t
  misc_feature (2827)..(2828): n is a, c, g, or t
  misc_feature (2830)..(2830): n is a, c, g, or t
  misc_feature (2832)..(2835): n is a, c, g, or t
  misc_feature (2837)..(2837): n is a, c, g, or t
  misc_feature (2840)..(2841): n is a, c, g, or t
  misc_feature (2844)..(2846): n is a, c, g, or t
  misc_feature (2848)..(2852): n is a, c, g, or t
  misc_feature (2855)..(2857): n is a, c, g, or t
  misc_feature (2859)..(2863): n is a, c, g, or t
  misc_feature (2865)..(2869): n is a, c, g, or t
  misc_feature (2871)..(2873): n is a, c, g, or t
  misc_feature (2875)..(2876): n is a, c, g, or t
  misc_feature (2878)..(2881): n is a, c, g, or t
  misc_feature (2883)..(2884): n is a, c, g, or t
  misc_feature (2886)..(2886): n is a, c, g, or t
  misc_feature (2891)..(2892): n is a, c, g, or t
  misc_feature (2894)..(2895): n is a, c, g, or t
  misc_feature (2899)..(2899): n is a, c, g, or t
  misc_feature (2901)..(2902): n is a, c, g, or t
  misc_feature (2904)..(2916): n is a, c, g, or t
  misc_feature (2919)..(2920): n is a, c, g, or t
  misc_feature (2923)..(2923): n is a, c, g, or t
  misc_feature (2928)..(2936): n is a, c, g, or t
  misc_feature (2939)..(2940): n is a, c, g, or t
  misc_feature (2943)..(2944): n is a, c, g, or t
  misc_feature (2946)..(2951): n is a, c, g, or t
  misc_feature (2953)..(2953): n is a, c, g, or t
  misc_feature (2956)..(2958): n is a, c, g, or t
  misc_feature (2960)..(2964): n is a, c, g, or t
  misc_feature (2966)..(2966): n is a, c, g, or t
  misc_feature (2968)..(2970): n is a, c, g, or t
  misc_feature (2972)..(2979): n is a, c, g, or t
  misc_feature (2981)..(2992): n is a, c, g, or t
  misc_feature (2994)..(2994): n is a, c, g, or t
  misc_feature (2996)..(2997): n is a, c, g, or t
  misc_feature (2999)..(3001): n is a, c, g, or t
  misc_feature (3005)..(3010): n is a, c, g, or t
  misc_feature (3012)..(3016): n is a, c, g, or t
  misc_feature (3018)..(3022): n is a, c, g, or t
  misc_feature (3025)..(3025): n is a, c, g, or t
  misc_feature (3027)..(3028): n is a, c, g, or t
  misc_feature (3030)..(3031): n is a, c, g, or t
  misc_feature (3034)..(3034): n is a, c, g, or t
  misc_feature (3036)..(3038): n is a, c, g, or t
  misc_feature (3041)..(3043): n is a, c, g, or t
  misc_feature (3045)..(3047): n is a, c, g, or t
  misc_feature (3051)..(3054): n is a, c, g, or t
  misc_feature (3056)..(3066): n is a, c, g, or t
  misc_feature (3068)..(3069): n is a, c, g, or t
  misc_feature (3072)..(3078): n is a, c, g, or t
  misc_feature (3080)..(3081): n is a, c, g, or t
  misc_feature (3083)..(3087): n is a, c, g, or t
  misc_feature (3089)..(3089): n is a, c, g, or t
  misc_feature (3092)..(3093): n is a, c, g, or t
  misc_feature (3096)..(3096): n is a, c, g, or t
  misc_feature (3098)..(3099): n is a, c, g, or t
  misc_feature (3101)..(3106): n is a, c, g, or t
  misc_feature (3108)..(3108): n is a, c, g, or t
  misc_feature (3111)..(3119): n is a, c, g, or t
  misc_feature (3123)..(3126): n is a, c, g, or t
  misc_feature (3128)..(3129): n is a, c, g, or t
  misc_feature (3131)..(3133): n is a, c, g, or t
  misc_feature (3136)..(3141): n is a, c, g, or t
  misc_feature (3144)..(3145): n is a, c, g, or t
  misc_feature (3147)..(3148): n is a, c, g, or t
  misc_feature (3151)..(3155): n is a, c, g, or t
  misc_feature (3158)..(3161): n is a, c, g, or t
  misc_feature (3164)..(3166): n is a, c, g, or t
  misc_feature (3168)..(3169): n is a, c, g, or t
  misc_feature (3174)..(3174): n is a, c, g, or t
  misc_feature (3177)..(3180): n is a, c, g, or t
  misc_feature (3182)..(3183): n is a, c, g, or t
  misc_feature (3185)..(3189): n is a, c, g, or t
  misc_feature (3191)..(3191): n is a, c, g, or t
  misc_feature (3197)..(3201): n is a, c, g, or t
  misc_feature (3204)..(3204): n is a, c, g, or t
  misc_feature (3207)..(3210): n is a, c, g, or t
  misc_feature (3212)..(3212): n is a, c, g, or t
  misc_feature (3215)..(3219): n is a, c, g, or t
  misc_feature (3221)..(3221): n is a, c, g, or t
  misc_feature (3223)..(3223): n is a, c, g, or t
  misc_feature (3225)..(3229): n is a, c, g, or t
  misc_feature (3231)..(3232): n is a, c, g, or t
  misc_feature (3234)..(3234): n is a, c, g, or t
  misc_feature (3237)..(3238): n is a, c, g, or t
  misc_feature (3240)..(3242): n is a, c, g, or t
  misc_feature (3245)..(3247): n is a, c, g, or t
  misc_feature (3250)..(3252): n is a, c, g, or t
  misc_feature (3254)..(3254): n is a, c, g, or t
  misc_feature (3256)..(3257): n is a, c, g, or t
  misc_feature (3261)..(3262): n is a, c, g, or t
  misc_feature (3264)..(3269): n is a, c, g, or t
  misc_feature (3271)..(3272): n is a, c, g, or t
  misc_feature (3274)..(3274): n is a, c, g, or t
  misc_feature (3277)..(3278): n is a, c, g, or t
  misc_feature (3280)..(3281): n is a, c, g, or t
  misc_feature (3288)..(3288): n is a, c, g, or t
  misc_feature (3290)..(3293): n is a, c, g, or t
  misc_feature (3295)..(3295): n is a, c, g, or t
  misc_feature (3297)..(3297): n is a, c, g, or t
  misc_feature (3301)..(3302): n is a, c, g, or t
  misc_feature (3304)..(3308): n is a, c, g, or t
  misc_feature (3310)..(3310): n is a, c, g, or t
  misc_feature (3312)..(3312): n is a, c, g, or t
  misc_feature (3316)..(3329): n is a, c, g, or t
  misc_feature (3332)..(3333): n is a, c, g, or t
  misc_feature (3335)..(3337): n is a, c, g, or t
  misc_feature (3339)..(3339): n is a, c, g, or t
  misc_feature (3343)..(3343): n is a, c, g, or t
  misc_feature (3345)..(3347): n is a, c, g, or t
  misc_feature (3349)..(3356): n is a, c, g, or t
  misc_feature (3358)..(3362): n is a, c, g, or t
  misc_feature (3364)..(3364): n is a, c, g, or t
  misc_feature (3366)..(3366): n is a, c, g, or t
  misc_feature (3368)..(3369): n is a, c, g, or t
  misc_feature (3371)..(3373): n is a, c, g, or t
  misc_feature (3375)..(3375): n is a, c, g, or t
  misc_feature (3378)..(3378): n is a, c, g, or t
  misc_feature (3381)..(3381): n is a, c, g, or t
  misc_feature (3383)..(3385): n is a, c, g, or t
  misc_feature (3387)..(3388): n is a, c, g, or t
  misc_feature (3391)..(3391): n is a, c, g, or t
  misc_feature (3393)..(3393): n is a, c, g, or t
  misc_feature (3396)..(3396): n is a, c, g, or t
  misc_feature (3398)..(3401): n is a, c, g, or t
  misc_feature (3403)..(3403): n is a, c, g, or t
  misc_feature (3406)..(3406): n is a, c, g, or t
  misc_feature (3408)..(3408): n is a, c, g, or t
  misc_feature (3411)..(3411): n is a, c, g, or t
  misc_feature (3413)..(3413): n is a, c, g, or t
  misc_feature (3418)..(3418): n is a, c, g, or t
  misc_feature (3420)..(3420): n is a, c, g, or t
  misc_feature (3423)..(3424): n is a, c, g, or t
  misc_feature (3432)..(3432): n is a, c, g, or t
  misc_feature (3434)..(3436): n is a, c, g, or t
  misc_feature (3439)..(3439): n is a, c, g, or t
  misc_feature (3441)..(3441): n is a, c, g, or t
  misc_feature (3443)..(3443): n is a, c, g, or t
  misc_feature (3445)..(3447): n is a, c, g, or t
  misc_feature (3450)..(3450): n is a, c, g, or t
  misc_feature (3462)..(3462): n is a, c, g, or t
  misc_feature (3465)..(3465): n is a, c, g, or t
  misc_feature (3468)..(3468): n is a, c, g, or t
  misc_feature (3472)..(3472): n is a, c, g, or t
  misc_feature (3474)..(3474): n is a, c, g, or t
  misc_feature (3476)..(3480): n is a, c, g, or t
  misc_feature (3484)..(3484): n is a, c, g, or t
  misc_feature (3486)..(3486): n is a, c, g, or t
  misc_feature (3492)..(3492): n is a, c, g, or t
  misc_feature (3495)..(3495): n is a, c, g, or t
  misc_feature (3498)..(3498): n is a, c, g, or t
  misc_feature (3501)..(3501): n is a, c, g, or t
  misc_feature (3504)..(3504): n is a, c, g, or t
  misc_feature (3507)..(3507): n is a, c, g, or t
  misc_feature (3509)..(3512): n is a, c, g, or t
  misc_feature (3514)..(3514): n is a, c, g, or t
  misc_feature (3517)..(3517): n is a, c, g, or t
  misc_feature (3519)..(3520): n is a, c, g, or t
  misc_feature (3522)..(3522): n is a, c, g, or t
  misc_feature (3526)..(3526): n is a, c, g, or t
  misc_feature (3528)..(3528): n is a, c, g, or t
  misc_feature (3531)..(3534): n is a, c, g, or t
  misc_feature (3537)..(3537): n is a, c, g, or t
  misc_feature (3540)..(3541): n is a, c, g, or t
  misc_feature (3546)..(3546): n is a, c, g, or t
  misc_feature (3549)..(3549): n is a, c, g, or t
  misc_feature (3553)..(3553): n is a, c, g, or t
  misc_feature (3555)..(3555): n is a, c, g, or t
  misc_feature (3557)..(3565): n is a, c, g, or t
  misc_feature (3567)..(3569): n is a, c, g, or t
  misc_feature (3571)..(3574): n is a, c, g, or t
  misc_feature (3576)..(3619): n is a, c, g, or t
  misc_feature (3621)..(3624): n is a, c, g, or t
  misc_feature (3626)..(3645): n is a, c, g, or t
  misc_feature (3647)..(3658): n is a, c, g, or t
  misc_feature (3660)..(3676): n is a, c, g, or t
  misc_feature (3678)..(3701): n is a, c, g, or t
  misc_feature (3703)..(3744): n is a, c, g, or t
  misc_feature (3746)..(3752): n is a, c, g, or t
  misc_feature (3754)..(3769): n is a, c, g, or t
  misc_feature (3771)..(3774): n is a, c, g, or t
  misc_feature (3776)..(3777): n is a, c, g, or t
  misc_feature (3779)..(3800): n is a, c, g, or t
  misc_feature (3802)..(3815): n is a, c, g, or t
  misc_feature (3817)..(3821): n is a, c, g, or t
  misc_feature (3823)..(3844): n is a, c, g, or t
  misc_feature (3846)..(3861): n is a, c, g, or t
  misc_feature (3864)..(3869): n is a, c, g, or t
  misc_feature (3871)..(3871): n is a, c, g, or t
  misc_feature (3873)..(3994): n is a, c, g, or t
  misc_feature (3996)..(4000): n is a, c, g, or t
nnngnnttnnnnntnnnancanntntnannnnnnnntnnangnaangnnnnnnnnngtnnnnntnnnaannnnnnnnnnnnnnnnttnntncnnnnntnnnntntnngncnnnnnnnnnntngtnnnncnnnnnnttgnnnntnnngnnnnntgtnncngaannntntnnncnnnngnnnttcnnnnnnngnnnntctacatcaatgccactgtttatcttccattgcttacccttataatccattctcagggtgagttcctgcccacatatagatagtgtgttctcataacttaggctatctatgtatggtctattcggtatagtatagtcgtaagtgttgcttgtgtttctatcctcttcgtgatgcagtccgtaccctgtctgcaatttcaactgtttgccaaaaggatgggtatattgcaatgatattctgctttcgttgcgcagggtgggcagttgttggcaaagattgcgcaacagtagtgaatctccgcccacagcgttgcgcaggtggtggaatttcgtcagtgaaaggctggtattattagtttcattcgagttaccgccaagtgtcgccttcacggtaaatgatgccccagccttgccaatccgccgtgtgaggtcggcagatacatggtaattctttccattgctttttgtgttatttcgcagcgttcccgaggtcagcgtgtccgcagccgtattgcgctcatataggtatgttgtgttgtcagtcaggttgtctgaccgtccgaagtttccatttgcacttatattcagcaaagtctttttgtctatgttatactgcagatttatgtttgcggcattactgtgattcttgctcaaggaaagcagcattgattcccgatattttgttcccgatgaaagatattgctcatcatagtcatgattctcgcttccattgtggaaggcattgagtgagaggcttgcattgagcgtaattttcttaccaaatttcttcacgatattgcccgacaatatgttttggaaattgtttcccccaatgttcatattactaagattgtcagagcgcaaagtcagcgaggtgttttcgccatcggcattgaatagattgccctgtacctcatccctgcgtctgtcgcgattgccgtgttcagccgttagtgttcctgtcaggctgccattgtaggtagatttggtcttgatgtccagcacataattgtcggcaccatcatctactcccgtcattttctccaatgcgctgagcatgtcatacagtttcagtagttccactgcatcggttggcatattctccaacgctgcgataatgtcgttgcccataaaggtctcgccattgatgtttacgccgttcaatggctttcctttgaatgatagttgcctgttcgccttgtcgtattccatgcccggaatattcctgattaagtcttccaagttagcacctttccttactcgaaggcaatcagtattgataaacgtggtgtcttttcttatggaaaacaatttccgctgtccaataacttgaacttcatcgagttctatcgttttatgtaatgaagaaacatgttttcgagtagggtatatagtatcacccacaactaaattcaaaatagtagcattagcagtgggaaacagcagaagtagaatgatgaagattaaaagaattcttttgattatcattttgcaaaattaccattgttcatagatatatgcaataccttaaaatggcgattttatagaattagaaatgtctaaggttgattttcattgaaaaaacaacgtaaatactttgcttatatgaattatatcgctatctttgcaacatcaaacagagagttctttgagactttgcagaataaagaaagggaaagaaactcgctcgtttcttagtcgttcaccttatcagattatatattctgctttttattagtaatcagtcgattacattcacccccattacttttatgcggagatttgcgattttcgnactgccaangacatcggtatcgaccgnccggagaagaangagatactgcataacataccgccnacacccgagcaggaagtntttatcggcaagctgatggagtttgccaagagtggcgatgccacnntnttgggacgagcacctctgagtgagagcgaggaaagggcaaagatgctgattgcaacagactacgcncgcaagatgagccttgatttncgcatgatngatgaaaatgnntactcagatcatatngacaacaaggcaagtcantgtgcnaagntgctcaatgactattaccaaaagtacgatgcacagaaaggnacncagttngttttctctganttaggnacttanaagccnggngnannnntcnnnntntntnngnaaannnnnnnnannntngtngannannatnnnnnnncntncnannnnnnnnnnttnntnnannnntnnaannannagnnnnnnaannannngntngnngnnnnnannnnnngnggtgnnannnnnattatnnnnnntncnncnnnnntgnnnnnnnntgnnnnnnnnnnncagcannnngnngnngcnnnncatnnnnnnnnnncnnnnngncnnncnnnnnnntngnagcnnnnnnnnngannngnnnnnnnnnnnnnnantnttnncnnnaannnntnngnnnacaannnngttgnnntnatnnnnnnngnngnannnnnntnntnnnanngnnannnnnncnnnntgcnnnataannagcnnntnntcancnatcngnnnannannannnnnnnnngtngtnnnancnntgangnnnnntnnnnngangannncngnnnnatnnnctncnnanannnngnagnngtnnntnnnnntannncnnnnntnnnnnannnannannnntnnanaagannannaccncnntnnnnnnnnnnnnnaannacntcctnnnnnnnnntgnngcnncnnnnnngnagnnngnnnnnantnnnannnnnnnntnnnnnnnnnnnnanannannnaggnnnnnnannnnnannnnnctntnntnnagnannntgnnnannntgannnngnnnnnnnnnnnannaannnnnnnannannnnngntgnngangnnannnnnnanatnnnnnnnnntgcnnnncnncnnnagnnnnnngannannaannnnncannnnagnnnannacaanaannnngnngnnnnntntggttnnnnnatnatnnnnangannnnnantncnnnnnannanttnntnnnctnnncgnnnancnncttnntnnnnnnanngnagnngnntatctantnnnntnanaatnntnnnnngntngcannnnnnnnnnnnnntgnntnnnanaacntnnntnnnnnnnngnnnnntntncnnannntnatngantnnnannagnanganannnnanagntngtngncaatnanganntttacacnannnttncnancnnntcntggaaaaaagangangancttngntnnnnnaaangngaagcngcnganttnganagnannnntncgntnncncttncnccnnnngangannaaaangangaanangnnnnnnnnnannnannnnannnnnnnnnnnnnnnnnnnnnnnnnnnnnnnnnnnnnnnnnnnnannnngnnnnnnnnnnnnnnnnnnnnannnnnnnnnnnngnnnnnnnnnnnnnnnnngnnnnnnnnnnnnnnnnnnnnnnnntnnnnnnnnnnnnnnnnnnnnnnnnnnnnnnnnnnnnnnnnnntnnnnnnnannnnnnnnnnnnnnnntnnnntnntnnnnnnnnnnnnnnnnnnnnnnannnnnnnnnnnnnngnnnnntnnnnnnnnnnnnnnnnnnnnnntnnnnnnnnnnnnnnnnatnnnnnntnannnnnnnnnnnnnnnnnnnnnnnnnnnnnnnnnnnnnnnnnnnnnnnnnnnnnnnnnnnnnnnnnnnnnnnnnnnnnnnnnnnnnnnnnnnnnnnnnnnnnnnnnnnnnnnnnnnnnnnnnntnnnnn

SEQ ID NO: 633 - DNA, 4000 bp, Escherichia coli
  misc_feature (1534)..(1534): n is a, c, g, or t
  misc_feature (1681)..(1681): n is a, c, g, or t
  misc_feature (1988)..(1988): n is a, c, g, or t
  misc_feature (2340)..(2340): n is a, c, g, or t
  misc_feature (2547)..(2547): n is a, c, g, or t
  misc_feature (2895)..(2895): n is a, c, g, or t
  misc_feature (3036)..(3036): n is a, c, g, or t
  misc_feature (3075)..(3075): n is a, c, g, or t
  misc_feature (3444)..(3444): n is a, c, g, or t
  misc_feature (3476)..(3476): n is a, c, g, or t
  misc_feature (3811)..(3811): n is a, c, g, or t
  misc_feature (3820)..(3820): n is a, c, g, or t
  misc_feature (3823)..(3823): n is a, c, g, or t
  misc_feature (3883)..(3883): n is a, c, g, or t
  misc_feature (3967)..(3967): n is a, c, g, or t
  misc_feature (3982)..(3982): n is a, c, g, or t
cacctcctcctcagtcttattttggggtatgacctggtcaatgggcaccaaattatcgctcgtgagcagccaccggctaatcgcctgaaccagcgtcatattggtacgaacagacacggtagtcatattgaggttaccgctggtgtgatcaacatcggtgccagtgatctgtacaacatccacatcattgactttgcccaatgtgttaaacatgggccccggcccctcagccgcatacggtacggtcagcgctatatttgtgccgggaatatggtccaaattcaccaaagcagccaaggcaaaaaccggaatagcaccaaaggtaagggttgtaaaacgtcgattcacggtacttaagcgtaccgcagagatttgacaaaactaggtatcccactagccctcaacagtatgtgttttcaactgcaatgctccccatcacgtgtggtagctcacgtgttcgctataagcgttgtggttttatggcattttcgtggtaacagtaggtagcgtgtgaggcatggcgaatagtaattttggttttaattttggtttcggcaaacgcgacgacggcaacgacgataataacgactttaacgggggcataggagacttccttaacgatctcggacaaatgctgtccggtttaggctcatcaatgaatagctctgacggggaatccgtcaactattccatgacggagcgcattgcccggcaacaaatcggcgcccaagaccgccccataaccaacaccgaccagcagcaagtacaagatgcggtacggatcgtagaattatggcttgacgacgccacctacctgccggcatcggaaaataaagtcgtcgcctggaatgccaccgactggctcaccaataccctaccagcgtggaaacgcatgattaatccagtagtcgcccaaatgaatgaggcacggttaagcggactaccggaggaagtgcgcgatgccattgggccaatccttggcatatttagctcaatgtcctcggcaaacttcggggcacaattaggcaacgccctgggtgatttagccacccaatccctatccggctccgacttcggaatccaagtagcccccgaacacaccaccgcactcctaccgcactccgtcaaccacatcgcccgcgaaatagcggtatcgccccaagacgtgctcatgtatctagcggcacgagaagccgcccggcaacgactcttccggcatgtgcactggctcagcgaacgccttgtctcctccgtggaggaatacgcggccggcctggaattggataactccgccatggaagaagccatgcgaaacatcaaccttgagtcgcaagacccggcagcaatccaagacgccctcaaccaaatgcagggcatggatctagaaccaaaaatccggtcccgcaacaccggcgccacaacccggctggaaaccctcttagccttggtcgaaggctgggtggaactcgtggtcacaaacgcgctcggcgaccgggtgccggccacggcagcactcaacgaagcatggcaacgncgccgacgcactggtggctccgccgaaaaagcattcgcctcagtggtcggcattgaattcgccgccccgaaagtaagcgaagcgaaagaactatggaaacgggtgaccgtggccgtcggcgaggaacgccgcgataaagtatgggancaccccgatttcctgccgctcgccgaacacctggacaattccgccgaattcatcgactccctgcttgacgacgccgacaccgccaacttcgaccccatcgctgaaatcaccgccctggaagaaatgctggcccaaaaatccgaggaggaacaagccgaacagaaagaatggcccaagccaaaggatcaaaaacccgaggacaaccaggacaagaaatcggacgattccgacaaataactcctcattattcctcggcaacagtcatccggccccacgcctccaaaaaccccttggcccgttcagcgtngggtgctttgtccgcccacgaccaaaaatcggcggaatgcccatcgtggataaacgtgtgggtgagctcatgcaccaacaccgaatccaacacataatcgggtacgttccgcaaccggtgggaaatccgaatgtcccccgtggccggtgaacacgaaccccaccgctgactctggttcgtgacccacctgacgctaccgatggtggcttgaccatcaagaaccgtccggttcagcacctgggcacgccgggtcagatcggcatcagtccgggcggtggcggtggtttttcgattgatctttgcaacaatgtcatcaacaagctgcgcttcctcgtgcggcaataggttcgcnggaacgcgcacctgaatgcgcccatcaacgattcggccggcagcagtgcgggtgcggcgggcggaacgaatgatctcaatatcaaacgtgtttggtacggcagccatggtgtctcattctaattcatgacatggtagaaccatgccggggaaaaccaatattcaccacccattacccaaccctgcggcgcttcccggcatcgacccncccagccttgaccttgccgagccacaggaacccgacacggccccactcaccgccggtgaaatactcaaagccgccccggcgcgacatggtgacaagcacctggtggtattgagccccagcgcacatattattcgccgaccaaacgtgggtattcaatgcggtgctgatgccacaaccgctggggtgtttgaggttcaggggccgccgcagcgcctgcttgtgccgattctcatgtcgtgcattaatccggtcagcgtggatgttttgcaccgtcgggtggagatgacgggtctttccgcaatcaaagcccgcctgctcattgatgatttactgaatcatggcgtactnatcccgttcgaacacatggttgttgcggtgataggtaggtgttcgcttgcggcaacggttattcgcctgttgggggagcttggtgtggtggtgcggcaaccgcgacggggcgagtctgaggagcggtttcttgcccaaatncctaaggagttgttggtaattccggtgggtaaggtcggntatggtaaaagcatttgccgcagattgggcaggtgggatgatgtgattcccgctaccattattgattcttctggggttattgggccgattcgggtgcggggtgagggggcgtgtttgcagtgtgccgagttgtatcggatttctgcggatccgcagtggcggactgttactaaggatttgccgctgaatcctcggcataatccagttgtggagtatgcgacggccgcccgggtggcggcgttgttgatgccgcggtatccggcgccgggggtggtgaatgcgtcgtatgcgccgggggtgtgtattgaggtgaatccgtttgttggtactgcggtggagactgttgttcggacgcatccgatttgcccngtgtgttgggagaatcggtcatgatgtgggcnggttggttgttgttggttattcctcatcgtcgtcgaggaattgggcgacggtttctagtaggtcttgtccgtagcgttcgactttgacttgaccgatgccgttgattttgagtagttcggcggtgttggtggggagggcttcggcgatggcttggagggtggcgtcggagaacacgatgtaggcggggatgttgttggtttttgccacgccggcccgccagacgcggagggtttcgaagatttgtgggtccgcgtcggaggggcagttgttgcatcttccgaggattctttcgggtgtgtcgacgagtgggctgccgcagactttgcatcgggcngggcgccgntgncgtttggctggtttagcggtggtgattttgttggtttcggggatgatgtcgtcgaggaancgggtgcgtttgcggctgtgtcggccgccttcttggcgggctgccgaccaggagtggaagaggtgttttcgtgcccgggtgacnccgacgtagaagagncgtcgttcttcttcgatg

SEQ ID NO: 634 - DNA, 4000 bp, Escherichia coli
  misc_feature (598)..(598): n is a, c, g, or t
  misc_feature (607)..(607): n is a, c, g, or t
  misc_feature (1989)..(1989): n is a, c, g, or t
  misc_feature (2020)..(2020): n is a, c, g, or t
  misc_feature (2127)..(2127): n is a, c, g, or t
  misc_feature (2142)..(2142): n is a, c, g, or t
  misc_feature (2391)..(2391): n is a, c, g, or t
  misc_feature (3330)..(3330): n is a, c, g, or t
  misc_feature (3465)..(3466): n is a, c, g, or t
  misc_feature (3470)..(3470): n is a, c, g, or t
  misc_feature (3472)..(3473): n is a, c, g, or t
  misc_feature (3475)..(3475): n is a, c, g, or t
  misc_feature (3479)..(3480): n is a, c, g, or t
  misc_feature (3482)..(3483): n is a, c, g, or t
  misc_feature (3487)..(3489): n is a, c, g, or t
  misc_feature (3491)..(3491): n is a, c, g, or t
  misc_feature (3493)..(3496): n is a, c, g, or t
  misc_feature (3499)..(3499): n is a, c, g, or t
  misc_feature (3501)..(3501): n is a, c, g, or t
  misc_feature (3503)..(3503): n is a, c, g, or t
  misc_feature (3508)..(3509): n is a, c, g, or t
  misc_feature (3514)..(3515): n is a, c, g, or t
  misc_feature (3520)..(3522): n is a, c, g, or t
  misc_feature (3529)..(3529): n is a, c, g, or t
  misc_feature (3532)..(3532): n is a, c, g, or t
  misc_feature (3534)..(3534): n is a, c, g, or t
  misc_feature (3537)..(3542): n is a, c, g, or t
  misc_feature (3545)..(3556): n is a, c, g, or t
  misc_feature (3558)..(3558): n is a, c, g, or t
  misc_feature (3560)..(3564): n is a, c, g, or t
  misc_feature (3567)..(3568): n is a, c, g, or t
  misc_feature (3571)..(3571): n is a, c, g, or t
  misc_feature (3573)..(3578): n is a, c, g, or t
  misc_feature (3580)..(3585): n is a, c, g, or t
  misc_feature (3587)..(3591): n is a, c, g, or t
  misc_feature (3593)..(3594): n is a, c, g, or t
  misc_feature (3596)..(3598): n is a, c, g, or t
  misc_feature (3600)..(3602): n is a, c, g, or t
  misc_feature (3604)..(3605): n is a, c, g, or t
  misc_feature (3607)..(3608): n is a, c, g, or t
  misc_feature (3610)..(3618): n is a, c, g, or t
  misc_feature (3620)..(3628): n is a, c, g, or t
  misc_feature (3630)..(3631): n is a, c, g, or t
  misc_feature (3635)..(3636): n is a, c, g, or t
  misc_feature (3638)..(3638): n is a, c, g, or t
  misc_feature (3640)..(3640): n is a, c, g, or t
  misc_feature (3642)..(3647): n is a, c, g, or t
  misc_feature (3651)..(3652): n is a, c, g, or t
  misc_feature (3654)..(3655): n is a, c, g, or t
  misc_feature (3657)..(3661): n is a, c, g, or t
  misc_feature (3664)..(3674): n is a, c, g, or t
  misc_feature (3676)..(3678): n is a, c, g, or t
  misc_feature (3680)..(3680): n is a, c, g, or t
  misc_feature (3683)..(3684): n is a, c, g, or t
  misc_feature (3688)..(3690): n is a, c, g, or t
  misc_feature (3692)..(3692): n is a, c, g, or t
  misc_feature (3695)..(3695): n is a, c, g, or t
  misc_feature (3697)..(3697): n is a, c, g, or t
  misc_feature (3701)..(3702): n is a, c, g, or t
  misc_feature (3704)..(3706): n is a, c, g, or t
  misc_feature (3710)..(3711): n is a, c, g, or t
  misc_feature (3713)..(3713): n is a, c, g, or t
  misc_feature (3716)..(3719): n is a, c, g, or t
  misc_feature (3721)..(3724): n is a, c, g, or t
  misc_feature (3726)..(3729): n is a, c, g, or t
  misc_feature (3731)..(3731): n is a, c, g, or t
  misc_feature (3734)..(3734): n is a, c, g, or t
  misc_feature (3739)..(3739): n is a, c, g, or t
  misc_feature (3741)..(3742): n is a, c, g, or t
  misc_feature (3744)..(3746): n is a, c, g, or t
  misc_feature (3749)..(3749): n is a, c, g, or t
  misc_feature (3757)..(3758): n is a, c, g, or t
  misc_feature (3763)..(3764): n is a, c, g, or t
  misc_feature (3767)..(3767): n is a, c, g, or t
  misc_feature (3769)..(3771): n is a, c, g, or t
  misc_feature (3773)..(3773): n is a, c, g, or t
  misc_feature (3776)..(3778): n is a, c, g, or t
  misc_feature (3783)..(3785): n is a, c, g, or t
  misc_feature (3789)..(3790): n is a, c, g, or t
  misc_feature (3796)..(3796): n is a, c, g, or t
  misc_feature (3801)..(3802): n is a, c, g, or t
  misc_feature (3805)..(3806): n is a, c, g, or t
  misc_feature (3808)..(3809): n is a, c, g, or t
  misc_feature (3812)..(3812): n is a, c, g, or t
  misc_feature (3814)..(3814): n is a, c, g, or t
  misc_feature (3817)..(3817): n is a, c, g, or t
  misc_feature (3820)..(3820): n is a, c, g, or t
  misc_feature (3822)..(3822): n is a, c, g, or t
  misc_feature (3826)..(3827): n is a, c, g, or t
  misc_feature (3829)..(3832): n is a, c, g, or t
  misc_feature (3834)..(3835): n is a, c, g, or t
  misc_feature (3837)..(3838): n is a, c, g, or t
  misc_feature (3840)..(3840): n is a, c, g, or t
  misc_feature (3842)..(3842): n is a, c, g, or t
  misc_feature (3849)..(3849): n is a, c, g, or t
  misc_feature (3851)..(3853): n is a, c, g, or t
  misc_feature (3855)..(3857): n is a, c, g, or t
  misc_feature (3868)..(3869): n is a, c, g, or t
  misc_feature (3872)..(3875): n is a, c, g, or t
  misc_feature (3877)..(3877): n is a, c, g, or t
  misc_feature (3879)..(3879): n is a, c, g, or t
  misc_feature (3881)..(3881): n is a, c, g, or t
  misc_feature (3885)..(3887): n is a, c, g, or t
  misc_feature (3891)..(3891): n is a, c, g, or t
  misc_feature (3896)..(3896): n is a, c, g, or t
  misc_feature (3898)..(3898): n is a, c, g, or t
  misc_feature (3901)..(3901): n is a, c, g, or t
  misc_feature (3903)..(3905): n is a, c, g, or t
  misc_feature (3907)..(3909): n is a, c, g, or t
  misc_feature (3912)..(3912): n is a, c, g, or t
  misc_feature (3914)..(3917): n is a, c, g, or t
  misc_feature (3920)..(3921): n is a, c, g, or t
  misc_feature (3923)..(3923): n is a, c, g, or t
  misc_feature (3925)..(3926): n is a, c, g, or t
  misc_feature (3931)..(3931): n is a, c, g, or t
  misc_feature (3933)..(3933): n is a, c, g, or t
  misc_feature (3935)..(3936): n is a, c, g, or t
  misc_feature (3938)..(3938): n is a, c, g, or t
  misc_feature (3940)..(3940): n is a, c, g, or t
  misc_feature (3943)..(3944): n is a, c, g, or t
  misc_feature (3946)..(3947): n is a, c, g, or t
  misc_feature (3949)..(3955): n is a, c, g, or t
  misc_feature (3957)..(3959): n is a, c, g, or t
  misc_feature (3962)..(3972): n is a, c, g, or t
  misc_feature (3974)..(3977): n is a, c, g, or t
  misc_feature (3979)..(3982): n is a, c, g, or t
  misc_feature (3984)..(3986): n is a, c, g, or t
  misc_feature (3988)..(3988): n is a, c, g, or t
  misc_feature (3990)..(3992): n is a, c, g, or t
  misc_feature (3994)..(3994): n is a, c, g, or t
  misc_feature (3996)..(4000): n is a, c, g, or t
tccctgcaatttctccacatcataatctgaagtagaattttcaatttcatttcttatctgttgaaccctgccctgaatctccttcttcgatccactgccttcaataatcatcgtacagtccttatcgataattacctttttagcgccacccagatctgatagcttaaggctgtccaatccgactcccaagtcctcaaatattgcatccgcaccagttactgccgctatatctccaagcatcgccttccgcttgtctccgaaatcaggtgctttcactacagcgcatttcaatgtccctctcatcttattaactacgagagttgtaagcgcttcaccctccagatcttcagcaatcaccaacagaggcttaccagattgtgaaatcttttccaatataggcaaaaggtcttttagtacagagatttttttctcatgaacaaggatataaggatctacaagaacggcctgcagcttctctgtatctgtaataaaatatggggacagatagcccttgtcaaattgcattccttcaacaagctccaccgtagtttccaagccctggccctcttcaacagctattactccatcactaccggcncgatccatngcatttgatatctgctttccaatctccggatcattatttgccgcaatagtacccacctgttcgatctccttttttccggaaaccgcaatgctcattttaacgagctctgaggttatcgcctccacggctttctcaattcctcgtttaattccaaccggattagccccggcaacaagacttttcagcccctctgaatatatcgcttctgacaataccgtcgcagttgttgtaccgtcgccggcaacgtcattagttttagacgcgacttcttttaccagctgtgcacctatgttctcatacggatcttcaagctctatttcatttgcaacagtaacaccatcttttgttatagtcggggaaccaaagcttttttcaatgattacatttcggccttttggacccatcgttattttgacagcatttgccaacttatttattccatcttttatagccataccagcttcgtggccacacattacttttttaccagccattctgttctcctaactattcaattattgcaagaatatcatcttcagccattaacaggtactcttcaccatcaatatcaatctcagttcccgcgtaagatgtaaatacgactctgtctccttttttaacctgaaactttgccctggtaccactgtccaacaattttccatcaccaagagcaattatctttccctcttttggcttttctttagcagcatccggtaacacaattcccccggcagttttttctaccgcatcaaatcttttaactaaaatcttttcccctaatggctttgtcttcattgttcattgtcccctttctaaggtcttgattaacctaacagtttatctccaatagtacttttcaagtgattgttctaccgcgtatttaattatctctttgtttataggcttggatataaatgtatacgcattagcctcaatagcctcaaactttaaatctttagaagtatccgcagatacaaaaatacatggaatctgtatcttcttttccactttgatgaattcaaacgtttcgaaaccactaaaatcaggcatgtgcacatccataattaatacatgcagcaattcatgctttgcaatttcaacggcctctctgccacaactagccagatatgtcgtataaccttcaggttcgaatatgtcattcaggctggaacgacaattatcatcatcatcggttattaagatcttgtaatcagccttatcacgttttagcagtgtcatcatgatatagttttgaacttaaaataatgtatccagttaacagtagcaaacaaaatgccaataaactctacatgattttcacagacaaaccacacgtaagtaattgttaaaatgaaacttacaattatttctgaagcaatatncaacctgccacaatggcacacgagatcaaanattattttttttgctgccaatttggcatctattatttaccagcactatacatttcaccacgcaaatggagcaacgtaaaattaaactcacctgcaagtgttatagcngcagccgcagccgcnaattcactagatgtcccaatgtccataaacctgagtacttctctggccgtagggcaaatcggcccttctctgtttgaagcggcacctacttccagattaggtaattctactccgaatattacctcttcacctttgatttcaacatatacgttctcagtacaggatacattatacgggcgcggattgactttagtaccacggtagagcgcgggaataatttcccctcccattcctgagtaaacaaacccnccctgttcctgcataaccccctgacgatcaatctccatataggacagcaatttatcaataccggtcttgctcattttctcgtaagccggtataggtactttaacctgtgcagagacataacgtccgcgacggtttcgtggtgatggcttcaggtctccatcaaaacccatagcgatgaggctctgtacaaaagcaactccatttgcattaaattcagtatccagacgacctctggcaaatcctacggctgcagaagtaactccgtgccctctggcatgttcaaatctggtataaaaacagatgtagataaaaaactgcccgtgatgctgtcttcttacaaattcaacttcgtatatttctccactaaattcggcgagatatttctcctccatctctctcctcaggaaaggcagtatcttatttgccgttgcaatcgctttctcacgatcctcttcactttcaaaaatatatcctaaattacgtgatgcaccagcccatctgccgacttttacttccgcaccgcccaatttattgatacgaaaacagccaacactgattccgatagaaccaaatccaggaccataggccaacaagtttgtaaaggttttatcaatatctccataaacctttatctgacctgcggaagagtagtattcctccttaccaccaacataattgtttaccagcggcctatatctatcttcgcccgttccataaggctccagagccgatccacattgagtacagacagtatccgtatccctcgcttccagctgccatattgagttatctttcgggcagcgccattgcaacaagtaaggtttttccggcagctctaaatagttaaactttataccggtcagcttctctatacactctcttctgctcaacgccgcaattagaaaatgatcaggagcgcttacaccatattcttccagnagaacagcttcagccttccagggctgaacatctcccgatttaattttgcctgccagctcttcaacaagctttctgttgtcattcataatgtattttaaacctcctgactcgatcaagtagaaataatgttcaccnnaaananngnaaannannaaannntntnnnntantntnttaannccttnntttannnttttttnttntnttnnnnnnttnnnnnnnnnnnncntnnnnnttnnttntnnnnnntnnnnnnannnnntnntnnnannnanncnngnnnnnnnnnannnnnnnnntnnattnntncntnnnnnnttcnntnntnnnnnttnnnnnnnnnnntnnnanctnntgannntnttngngttnntnnntgcnntncgnnnntnnnntnnnnanttntaaantnntnnnccnctctttcnnccaanngcncnnntntcnnncatcnnncagnntgtttnacatnnttnntnnttnanatnttngnagcnntnnnncnncnntncnagaattncnnnannnacatcaagccnnatnnnntnananaacnnnaacngcccnanggngnnntnnngtncnnnngtnncngnnttatnantnncngnggnngnngnnnnnnnannngcnnnnnnnnnnntnnnntnnnncnnnantnnnanannnnn

SEQ ID NO: 635 - DNA, 4000 bp, Escherichia coli
  misc_feature (812)..(812): n is a, c, g, or t
  misc_feature (1661)..(1661): n is a, c, g, or t
  misc_feature (1947)..(1947): n is a, c, g, or t
  misc_feature (2226)..(2226): n is a, c, g, or t
gcgcttgtggcaagtgtgtagccaccattattgagggtgaagtaagttacgagggtgaaatcccaagtggcatcactccagaagaaattgctgacaatatggttttactttgtcaatgtaaggcaacaacagacgtttcattagtggtggctgaattagacagcgtggccgacattgaagtgagaacattgccttgtaaagtgcagagtattaatcgccttaatcatgatgtggtgcaagtatttttaaaaattcctggtgatgagtccttgcagtatctagcggggcaatacattgatttaattcatcctgattttgacccacgcgctttttccattgccaatgcaccggttaattcaagcttgattgagctgcatatacgtttggttgaaggtggtaaattcactaattttttgtttaatgaattaaaagaaaaagcattgcttagacttgaaggcccaaaaggtactttttatttcaaagaagacagtaaaaaaccagtgattttggtggctggcggtacaggttttggtccgataaaagccattgttgagcatgccattgagatcaatttaaaacgtcaaatttatatatactggggtgtgagggatgaagtagatctgtacatgaacttgccgcaacaatgggtaaatgaatacaataatattcattttgtgccagtattgtccgaaccaaatgaacaatggaaaggcaggacaggttttgtacatgaaagtgttttggtcgattttgatgatttaactggctatgaagtgtatgcttgtggaccgccaaccatggttaaagctgcngccgatacttttttagaccaaggcatgattaaggacaactttttttcggacgcttttgaatttgctttttcaggaggataataatgagagacatgcaacaacacctaacgcagcaattagaaatttcgctcaatccgacacaccttgaagtgatcaacgagtcgcacaatcattctggaccagctagcgaatctcactttaagttggtggttgtgagtgattatttttctgatttaaaactcattgatcggcatcgttttgttaatcaactgtttaaagaagagttgagtcatattcatgcattggctatgcacacttatactccagatgaatgggctattaaaaatggcgcacccgattctccaaaatgtgcaggtggttcaaaatcttaaaacggatagtttatctttttattctatcgctgagtgtcagttcttgcacttcgcaaggaagcattaattcgtctaaagctgatattaatgagtccgtttcaagacctggtattgaaactaaacaggttgttattgagaaagatttgtggcaatacattattaatcgttacacgttaagtgcacccaatcaaaagaaattattctggcacattgattggtttaagaaaaatcctgattacttaacgcgcgttactaagcgagcaacaccgtatctgtatttggtgaccaaggaggttgaaaaagctggccttccgattgagattgcactattacccattgtggaatcggcttattatcctttttcttattcgcacggcacagcatctggtttatggcaatttatcccatccacaggtaaactttatggtctgaaagacaattggtggtacgacggcanacgtgatgtacttgcctcaactaaagcagcagttaagtatctgaaaaatttaaataaactttttaaaggtgattggcttttagctattgcagcgtacaattctggacctggtcgagttcaaaaagcagttcgtaaaaataaaagattgggtaagaaagcagatttttggcatttggatttaccaactgaaaccaaaggttatgtgccacgattactagccgttgcagagctaattaaaaatcctagtttgtacaatcaaagcgtcactccgattgataatcagccncaagtacgtccggttacacttaattcacaatttgatttagccctaatcttagagtggacaggcctagattcggatgaattgtattcactgaatcctggtttaaagcgctgggcaacaccaagcacgggatcgtacacaatgttattgcctattgatgtcattccaaaatttgaaaaaaaactaaatgctcatccaaaagaaggaaggatgcgttggttgcgacacaaagttaaatcaggcgaaagtttaggctatttatccaataaatttaaaaccacnattgatcaaattaaaagtgtgaatgacttgagttctaatgttattaaggtgggtgagtatttaattgtaccaattgcacaaaaatctgaaaattattactcgttatctgaagtgcaacgagaaaaacgtagaatgaatgctgagaaaaaaggttttaaggtaattcacacggttaaaagcggggatagtttatggaaaatttcaaaaaaatacgatacccatataaactctattattaagtggaatcacttgtcgcgtactaagccgcttaaagtaggaaaaaaactagttatctggcgttcatcggtagcaaagtcagatgatttgtcaaaagtgattaataccggtatcgacattaatagaaaggttacttatcgtattagaagtggcgataacttatcaaccattgccgctaaatttaaagtgagtgtgagtgatcttaaattgtggaataatcttaatgataaaaaaccattgcaaatagggcagaaactaaaaattattgtcaatgtgattaactctaaaatgaaataagaccatgaatgcattacccattaataaaattattttagctggttttgcttttgcattaacgcactggaagaaaattttggaaatctctatttttccagcacttatttccaccccatttttattgatattgcctgatttgttatcattgatggagcaaatttttaatggtggcgaagtgaccgatgttcaattgccccagaacatgatgatttaccttgtgttgtttttctacggttacttaaccctgtcaatcaatatgtatcgtttagtgatgtcaggagaaaaggttgtttctggtttaacatttattttaaattttaatcagatcgttcgatttgtagggttaacgttgtttattggattggcaaccatgattccagtaatgctcacaaaattggcgtttctgcaattggttatgtattttttactcatacccatcacgcttaattttattaacatcgcccttaatcagccatcaaaatacaaatggagtttgtcatttcccacgcatttgaatttgttctttttacaagtaattttgccagcattgatcacaatgttatttgccgcacttgctgatgttgtcggactggattcaacactagaatggatcgttagagtaattgttttttattggacattggtcacacttgcactgtgttaccaattagttgagactagtaactcagcgtaaatccttttgggtaacgcatatcaaaggtagcttgttcaactcttgaggttttttttcgatgcatcatgtaagactttttaaagttgattagcctttcattttgcatttgatacccaagaataaccttgatattaggttcaataactaattgatcaatattggttcttgaaattgatttgattttcattggctcaatcaacgcttggtagtgtttgtaatcctgatacaactgagtaatggtttctttttccccgcctgaaatcatccaaacggcattagatttcactggtttttttggagtgaataattccccattatttgatacataaccaaaacaaggtaaattattggtttttttaggtttgcaatcttttttatttttccagcgcattgtaatttgctgttcttcaatggttatacgaatagagttccaaaataggcgtttgatgtttgcctgagcaacccaaggctcttgttcaagggtttgtttaatctcatgtaagtcgagttggtatttatccttgattagcggttggatttttttga

SEQ ID NO: 636 - DNA, 4000 bp, Escherichia coli
  misc_feature (1989)..(1989): n is a, c, g, or t
  misc_feature (2006)..(2006): n is a, c, g, or t
  misc_feature (3172)..(3173): n is a, c, g, or t
  misc_feature (3176)..(3177): n is a, c, g, or t
  misc_feature (3179)..(3182): n is a, c, g, or t
  misc_feature (3184)..(3184): n is a, c, g, or t
  misc_feature (3186)..(3186): n is a, c, g, or t
  misc_feature (3188)..(3194): n is a, c, g, or t
  misc_feature (3199)..(3201): n is a, c, g, or t
  misc_feature (3204)..(3212): n is a, c, g, or t
  misc_feature (3215)..(3217): n is a, c, g, or t
  misc_feature (3220)..(3222): n is a, c, g, or t
  misc_feature (3225)..(3237): n is a, c, g, or t
  misc_feature (3241)..(3241): n is a, c, g, or t
  misc_feature (3244)..(3244): n is a, c, g, or t
  misc_feature (3246)..(3247): n is a, c, g, or t
  misc_feature (3249)..(3252): n is a, c, g, or t
  misc_feature (3254)..(3254): n is a, c, g, or t
  misc_feature (3256)..(3258): n is a, c, g, or t
  misc_feature (3261)..(3265): n is a, c, g, or t
  misc_feature (3267)..(3267): n is a, c, g, or t
  misc_feature (3275)..(3279): n is a, c, g, or t
  misc_feature (3284)..(3289): n is a, c, g, or t
  misc_feature (3297)..(3299): n is a, c, g, or t
  misc_feature (3302)..(3307): n is a, c, g, or t
  misc_feature (3310)..(3315): n is a, c, g, or t
  misc_feature (3318)..(3319): n is a, c, g, or t
  misc_feature (3325)..(3327): n is a, c, g, or t
  misc_feature (3332)..(3335): n is a, c, g, or t
  misc_feature (3337)..(3338): n is a, c, g, or t
  misc_feature (3340)..(3342): n is a, c, g, or t
  misc_feature (3350)..(3351): n is a, c, g, or t
  misc_feature (3353)..(3356): n is a, c, g, or t
  misc_feature (3358)..(3358): n is a, c, g, or t
  misc_feature (3365)..(3367): n is a, c, g, or t
  misc_feature (3370)..(3370): n is a, c, g, or t
  misc_feature (3375)..(3375): n is a, c, g, or t
  misc_feature (3377)..(3377): n is a, c, g, or t
  misc_feature (3386)..(3388): n is a, c, g, or t
  misc_feature (3395)..(3395): n is a, c, g, or t
  misc_feature (3401)..(3403): n is a, c, g, or t
  misc_feature (3407)..(3410): n is a, c, g, or t
  misc_feature (3416)..(3418): n is a, c, g, or t
  misc_feature (3420)..(3421): n is a, c, g, or t
  misc_feature (3423)..(3424): n is a, c, g, or t
  misc_feature (3426)..(3426): n is a, c, g, or t
  misc_feature (3430)..(3430): n is a, c, g, or t
  misc_feature (3432)..(3432): n is a, c, g, or t
  misc_feature (3434)..(3435): n is a, c, g, or t
  misc_feature (3437)..(3437): n is a, c, g, or t
  misc_feature (3442)..(3446): n is a, c, g, or t
  misc_feature (3449)..(3451): n is a, c, g, or t
  misc_feature (3453)..(3455): n is a, c, g, or t
  misc_feature (3460)..(3461): n is a, c, g, or t
  misc_feature (3468)..(3469): n is a, c, g, or t
  misc_feature (3472)..(3474): n is a, c, g, or t
  misc_feature (3476)..(3477): n is a, c, g, or t
  misc_feature (3479)..(3479): n is a, c, g, or t
  misc_feature (3483)..(3484): n is a, c, g, or t
  misc_feature (3487)..(3487): n is a, c, g, or t
  misc_feature (3491)..(3491): n is a, c, g, or t
  misc_feature (3494)..(3495): n is a, c, g, or t
  misc_feature (3497)..(3498): n is a, c, g, or t
  misc_feature (3501)..(3501): n is a, c, g, or t
  misc_feature (3504)..(3506): n is a, c, g, or t
  misc_feature (3508)..(3511): n is a, c, g, or t
  misc_feature (3516)..(3517): n is a, c, g, or t
  misc_feature (3519)..(3520): n is a, c, g, or t
  misc_feature (3522)..(3527): n is a, c, g, or t
  misc_feature (3530)..(3530): n is a, c, g, or t
  misc_feature (3533)..(3533): n is a, c, g, or t
  misc_feature (3537)..(3537): n is a, c, g, or t
  misc_feature (3539)..(3543): n is a, c, g, or t
  misc_feature (3545)..(3546): n is a, c, g, or t
  misc_feature (3548)..(3552): n is a, c, g, or t
  misc_feature (3554)..(3559): n is a, c, g, or t
  misc_feature (3561)..(3561): n is a, c, g, or t
  misc_feature (3563)..(3566): n is a, c, g, or t
  misc_feature (3568)..(3569): n is a, c, g, or t
  misc_feature (3571)..(3571): n is a, c, g, or t
  misc_feature (3574)..(3575): n is a, c, g, or t
  misc_feature (3578)..(3579): n is a, c, g, or t
  misc_feature (3584)..(3585): n is a, c, g, or t
  misc_feature (3588)..(3588): n is a, c, g, or t
  misc_feature (3590)..(3592): n is a, c, g, or t
  misc_feature (3594)..(3594): n is a, c, g, or t
  misc_feature (3597)..(3600): n is a, c, g, or t
  misc_feature (3602)..(3603): n is a, c, g, or t
  misc_feature (3605)..(3606): n is a, c, g, or t
  misc_feature (3609)..(3609): n is a, c, g, or t
  misc_feature (3611)..(3612): n is a, c, g, or t
  misc_feature (3614)..(3614): n is a, c, g, or t
  misc_feature (3616)..(3617): n is a, c, g, or t
  misc_feature (3620)..(3620): n is a, c, g, or t
  misc_feature (3622)..(3624): n is a, c, g, or t
  misc_feature (3626)..(3628): n is a, c, g, or t
  misc_feature (3633)..(3635): n is a, c, g, or t
  misc_feature (3643)..(3645): n is a, c, g, or t
  misc_feature (3648)..(3648): n is a, c, g, or t
  misc_feature (3650)..(3650): n is a, c, g, or t
  misc_feature (3654)..(3657): n is a, c, g, or t
  misc_feature (3660)..(3660): n is a, c, g, or t
  misc_feature (3662)..(3670): n is a, c, g, or t
  misc_feature (3672)..(3673): n is a, c, g, or t
  misc_feature (3677)..(3677): n is a, c, g, or t
  misc_feature (3680)..(3682): n is a, c, g, or t
  misc_feature (3684)..(3685): n is a, c, g, or t
  misc_feature (3687)..(3687): n is a, c, g, or t
  misc_feature (3692)..(3692): n is a, c, g, or t
  misc_feature (3695)..(3699): n is a, c, g, or t
  misc_feature (3701)..(3702): n is a, c, g, or t
  misc_feature (3704)..(3706): n is a, c, g, or t
  misc_feature (3708)..(3709): n is a, c, g, or t
  misc_feature (3711)..(3712): n is a, c, g, or t
  misc_feature (3714)..(3716): n is a, c, g, or t
  misc_feature (3718)..(3724): n is a, c, g, or t
  misc_feature (3726)..(3726): n is a, c, g, or t
  misc_feature (3728)..(3735): n is a, c, g, or t
  misc_feature (3737)..(3739): n is a, c, g, or t
  misc_feature (3742)..(3742): n is a, c, g, or t
  misc_feature (3744)..(3744): n is a, c, g, or t
  misc_feature (3746)..(3747): n is a, c, g, or t
  misc_feature (3750)..(3751): n is a, c, g, or t
  misc_feature (3753)..(3757): n is a, c, g, or t
  misc_feature (3759)..(3759): n is a, c, g, or t
  misc_feature (3761)..(3761): n is a, c, g, or t
  misc_feature (3763)..(3764): n is a, c, g, or t
  misc_feature (3766)..(3767): n is a, c, g, or t
  misc_feature (3770)..(3772): n is a, c, g, or t
  misc_feature (3775)..(3776): n is a, c, g, or t
  misc_feature (3778)..(3778): n is a, c, g, or t
  misc_feature (3780)..(3783): n is a, c, g, or t
  misc_feature (3786)..(3792): n is a, c, g, or t
  misc_feature (3797)..(3797): n is a, c, g, or t
  misc_feature (3799)..(3799): n is a, c, g, or t
  misc_feature (3801)..(3802): n is a, c, g, or t
  misc_feature (3804)..(3805): n is a, c, g, or t
  misc_feature (3808)..(3808): n is a, c, g, or t
  misc_feature (3810)..(3811): n is a, c, g, or t
  misc_feature (3813)..(3813): n is a, c, g, or t
  misc_feature (3816)..(3817): n is a, c, g, or t
  misc_feature (3819)..(3819): n is a, c, g, or t
  misc_feature (3822)..(3827): n is a, c, g, or t
  misc_feature (3830)..(3834): n is a, c, g, or t
  misc_feature (3836)..(3838): n is a, c, g, or t
  misc_feature (3843)..(3844): n is a, c, g, or t
  misc_feature (3847)..(3848): n is a, c, g, or t
  misc_feature (3851)..(3851): n is a, c, g, or t
  misc_feature (3855)..(3860): n is a, c, g, or t
  misc_feature (3866)..(3866): n is a, c, g, or t
  misc_feature (3868)..(3868): n is a, c, g, or t
  misc_feature (3876)..(3878): n is a, c, g, or t
  misc_feature (3880)..(3882): n is a, c, g, or t
  misc_feature (3885)..(3885): n is a, c, g, or t
  misc_feature (3887)..(3890): n is a, c, g, or t
  misc_feature (3892)..(3893): n is a, c, g, or t
  misc_feature (3900)..(3900): n is a, c, g, or t
  misc_feature (3902)..(3903): n is a, c, g, or t
  misc_feature (3906)..(3906): n is a, c, g, or t
  misc_feature (3908)..(3911): n is a, c, g, or t
  misc_feature (3913)..(3913): n is a, c, g, or t
  misc_feature (3916)..(3916): n is a, c, g, or t
  misc_feature (3920)..(3924): n is a, c, g, or t
  misc_feature (3926)..(3927): n is a, c, g, or t
  misc_feature (3930)..(3931): n is a, c, g, or t
  misc_feature (3935)..(3935): n is a, c, g, or t
  misc_feature (3939)..(3941): n is a, c, g, or t
  misc_feature (3943)..(3944): n is a, c, g, or t
  misc_feature (3946)..(3950): n is a, c, g, or t
  misc_feature (3953)..(3953): n is a, c, g, or t
  misc_feature (3955)..(3955): n is a, c, g, or t
  misc_feature (3959)..(3959): n is a, c, g, or t
  misc_feature (3962)..(3962): n is a, c, g, or t
  misc_feature (3964)..(3964): n is a, c, g, or t
  misc_feature (3966)..(3967): n is a, c, g, or t
  misc_feature (3969)..(3969): n is a, c, g, or t
  misc_feature (3971)..(3972): n is a, c, g, or t
  misc_feature (3975)..(3975): n is a, c, g, or t
  misc_feature (3978)..(3978): n is a, c, g, or t
  misc_feature (3981)..(3982): n is a, c, g, or t
  misc_feature (3984)..(3984): n is a, c, g, or t
  misc_feature (3987)..(3987): n is a, c, g, or t
  misc_feature (3990)..(3990): n is a, c, g, or t
  misc_feature (3992)..(3994): n is a, c, g, or t
  misc_feature (3996)..(3999): n is a, c, g, or t
tggctcgcggcgtcggtttccatgccctccgcgccgtcggctggcggcgcggcttcgtccttcatctcttcctccggcgccggcgcttcctcttcttcgatttcctccacgacttgcgcggattcgacagtgaccaaactgttcaggttcaaacgtactttcaccttgagcttttgtttctcaccatccgcggcttttgcgaacgggccgatttcgtacgtgccgacgacgggttctgtggactcggacaaaagctcacttccggcgtaactcgcttgaatggagaatttgtcgttcttgaagaatgtcatgagcttggtgctgggaactaagttattgcgctcgaaaagttccatcgtcttgttcgtgccgtcatcgctggcccacgcaacggagatcgggaacgggaacgagtcttgaacttcaaactcgcgcacgcggaagagtggcgaaagcatggcgccttgaagcgcgcaaccgcgcgccacgcactctgacgcgttcaccgtgcgccccggcaccttgccgaagtactcttgaagtcgactcgaaatggcgggcatgcgcgaagcgttgccaacgagttcgacggcagagatgtcgtccacggtgagtccggcttccttcaccgccgtctccaccgggcccatgagcttggagatcgtgtccgccgcgagctcttccatcttctcacgagtcatcatcgattgaacgtcgacatcatccatgagacactcgatgctgagcggcgcctccgggttcgaggaaagaatcttcttcatcttctcgatcgccgtcttcagacgaagcgacgcgcgagcgttggaacgaatgtcaatcttcttcgacgccttgaactcttcgcaaaagtgatcgaacatgacttcatcaaagttgcgtccacccaagtttcggtcgaaaccggtagacagaatcttcaaccccttcttcgtgaactgcgcgatgcacacttgcatcgcagagtgaccgacgtcgatgaacgccgtgttcaccggctcgtcggtgaactctgaggttttgaagatcccgtacgccaacgccgtcgccgtagtttcgtgcatcaatcgcaacacgttcaacccacaaatcgacgccgcatccaacatcgcgcggcgctccgcgtccgtggcgaagactggcaccgagatgacgcaatccgtcaccttggtgccgttgtcgttctccgcgattctcttcaaatcagccaaaatcgccgctacgcactgttccggcacgaaatctcgcgtctcccccatgtactgcacggtaaacatcaactccccgttcgctccgcgcttggcggcgaacggcaagttttgcaaatcgctctgcgcctcgacgtcgtcgtactttttcccaatcaagcgcttgagctgcgtcagcgtgttcttcggttgcatgttaatcttatccgccgccgcgcacccgacgaatcgctgcgcgtcgcgaaaatcatccaccaatcgtcagtcttcatcaccgcgtcgcccctcccgttcgccgtcgccccatcgctctcgtctctcggttcgctcgaggaatgaaaaagaagaagcttcatcttcatctgtctcttcgttcgcgcgtcgtcgctcgcctcgccgagcgttttttttctccacgcgcctgcttgtccccgaaattaatcatgctcggcgtctctcgcttggactcgtcgttcagcacgacgtcgatccctttccttcgcgccagcgcgacgacgttattcgcgttcccgaagtcgatcccgacgacgctcatcttgcgtttcgatcgctcgaggtcggtcttcgcgtcgacgtttcgcgctcggaagcggcgagcgttgagtagaggttctcgcgcgaggttctcggcgcgtcgcgtggcgtcgcgcgtcgaggcgtcgacgtgtgcgaaacgtcgcgtcgggtcaatcgtcgagccgtcgcgtcggcgcgcgctcccgggtgttttgtcgttcgccantggtgggtgtttcggtnggccgccgggacgcgaccgacgcgacgcgaaacgcgcggcgcgcagacgtcggcgcgcggggcgggacgccggaggatgtgggactgggacgatgactcgacggcgaacgtcgcgctcgcgctgacgtggctcgcgctcgtgacgtgcagcgcgctcgtcgcggcgcgacgggacgtcgaggcggcgcgcggcgcggcggcgcgaggcaaggacgggaagggactgaagcgcggacgagcgccgcacgcgtggtttcgacacttttacgtcgtcgggtgcgcggcgaacgcgcgcgagctggcgaggctgtgggcgagaggcgcggcgacgggacgggcggacgcgcgcgcggcggtcgtcgcggcgacgctgtttcaggcgcactgtttgaggagattgtacgagagcgcgcgcgtgagcacgtacggagacgacgcgacgatgcacgcgatcgtgtacgcgggcgggttggcgtattacgtgtgcgcgccgaagacgtgggcggcgtacgactgcggcgacgcggcgaagacgacgctcgagccgctcgagacgctcgcggcgacggcgctcggcgcgctcggcgtcgcgctgttcgcgctcggaaattatcggcagtacgagtgtcacgtcatactcgcgcgtttgcgcgaaccgagcgcgccgtcctcgagcgcgcgcgacgccgacgccgacgtcgcgcgccgctcgcgatactttatcccgcgcggcggttggttcgagcgcgtctcctgcgcgcactacctcgccgagatcgtcctttacctcggtctcgcgctcatcgtcgttcccaccgacgtcttcctcggcaagctctccgtctccgcgcgtccgtcggtgtcgtcggtatcgcgcgcgtcgtcgtcgtccgccgtcgtcgccgcgcgcgtcccgcgtctcgccccgctcgccctgctcgccgccgtcgtcgccaacctcgcgtgcgtcgcgtcttcgcaccacgcgtggtatttaaaaaccttcggcgacgcgtacccgcgcgatcgaggcgcgctgttcccgcgtcggcgcggatagcgcagtcggcgcagtcgcagctgacagtctcgccgcgccagtccgccagtgcccgaagaccccgctttggcgacgccggcggacgggaggaaaccctggatttttnnggnngnnnngncncnnnnnnncgcgnnncgnnnnnnnnncgnnncgnnncgnnnnnnnnnnnnncgcncgncnngnnnncncnnncgnnnnncncgcgcgcnnnnncgcgnnnnnncgacgcgnnncgnnnnnncgnnnnnnaanntcggcnnngagannnngnncnnngcgcgcgnngnnnncncgcgcgnnncgngcgcncnccgcgcggnnncgcgcgngggggnnncggnnnngcgcgnnnannanncncggngngnngngacgnnnnncgnnncnnngcgcnngggcgcnnagnnngnncncgcnnagngaancgnngnnganaannnannnnaaaanngnnannnnnngcnacncccncnnnnngnngnnnnngnnnnnngngnnnngnncntcnncgnngacgnngcncnnntntannnntnncnnggngnntntnnacngnnngnnngagannngcgagcgnnnggngngggnnnnttntnnnnnnnnntnntgcncannnannancccgnggnnnnngnncnnnannanntnnncnnnnnnntngnnnnnnnngnnnacncncnnggnnannnnncncngnnanngannncgnnanannnntannnnnnncacgnantnntnnagngnnanctnnangannnnnncgnnnnngnnnttcgnnacnnggnttcnnnnnngggggngngcggagannncnnncgnannnncnncgcgtcncnngcncnnnncnccnacannnnngnntannatancgcnnnannannnnncananatancgncnanntntnngcnccncanngnggngcntnnnannnng

SEQ ID NO: 637 - DNA, 4000 bp, Escherichia coli
  misc_feature (38)..(38): n is a, c, g, or t
  misc_feature (46)..(46): n is a, c, g, or t
  misc_feature (124)..(124): n is a, c, g, or t
  misc_feature (139)..(139): n is a, c, g, or t
  misc_feature (238)..(238): n is a, c, g, or t
  misc_feature (271)..(271): n is a, c, g, or t
  misc_feature (280)..(280): n is a, c, g, or t
  misc_feature (298)..(298): n is a, c, g, or t
  misc_feature (305)..(307): n is a, c, g, or t
  misc_feature (432)..(432): n is a, c, g, or t
  misc_feature (454)..(454): n is a, c, g, or t
  misc_feature (459)..(459): n is a, c, g, or t
  misc_feature (471)..(471): n is a, c, g, or t
  misc_feature (480)..(480): n is a, c, g, or t
  misc_feature (491)..(491): n is a, c, g, or t
  misc_feature (495)..(495): n is a, c, g, or t
  misc_feature (499)..(503): n is a, c, g, or t
  misc_feature (508)..(508): n is a, c, g, or t
  misc_feature (510)..(512): n is a, c, g, or t
  misc_feature (516)..(519): n is a, c, g, or t
  misc_feature (523)..(524): n is a, c, g, or t
  misc_feature (527)..(532): n is a, c, g, or t
  misc_feature (534)..(534): n is a, c, g, or t
  misc_feature (537)..(537): n is a, c, g, or t
  misc_feature (540)..(541): n is a, c, g, or t
  misc_feature (544)..(544): n is a, c, g, or t
  misc_feature (549)..(550): n is a, c, g, or t
  misc_feature (552)..(552): n is a, c, g, or t
  misc_feature (559)..(559): n is a, c, g, or t
  misc_feature (562)..(564): n is a, c, g, or t
  misc_feature (570)..(573): n is a, c, g, or t
  misc_feature (575)..(577): n is a, c, g, or t
  misc_feature (580)..(580): n is a, c, g, or t
  misc_feature (583)..(583): n is a, c, g, or t
  misc_feature (585)..(586): n is a, c, g, or t
  misc_feature (588)..(590): n is a, c, g, or t
  misc_feature (594)..(596): n is a, c, g, or t
  misc_feature (598)..(600): n is a, c, g, or t
  misc_feature (603)..(604): n is a, c, g, or t
  misc_feature (610)..(611): n is a, c, g, or t
  misc_feature (613)..(614): n is a, c, g, or t
  misc_feature (618)..(619): n is a, c, g, or t
  misc_feature (622)..(622): n is a, c, g, or t
  misc_feature (624)..(624): n is a, c, g, or t
  misc_feature (627)..(631): n is a, c, g, or t
  misc_feature (633)..(634): n is a, c, g, or t
  misc_feature (637)..(637): n is a, c, g, or t
  misc_feature (642)..(642): n is a, c, g, or t
  misc_feature (648)..(650): n is a, c, g, or t
  misc_feature (654)..(654): n is a, c, g, or t
  misc_feature (658)..(659): n is a, c, g, or t
  misc_feature (662)..(662): n is a, c, g, or t
  misc_feature (665)..(665): n is a, c, g, or t
  misc_feature (667)..(667): n is a, c, g, or t
  misc_feature (669)..(673): n is a, c, g, or t
  misc_feature (679)..(681): n is a, c, g, or t
  misc_feature (684)..(685): n is a, c, g, or t
  misc_feature (687)..(687): n is a, c, g, or t
  misc_feature (691)..(691): n is a, c, g, or t
  misc_feature (693)..(695): n is a, c, g, or t
  misc_feature (700)..(700): n is a, c, g, or t
  misc_feature (706)..(706): n is a, c, g, or t
  misc_feature (708)..(709): n is a, c, g, or t
  misc_feature (715)..(718): n is a, c, g, or t
  misc_feature (723)..(727): n is a, c, g, or t
  misc_feature (731)..(732): n is a, c, g, or t
  misc_feature (737)..(740): n is a, c, g, or t
  misc_feature (745)..(745): n is a, c, g, or t
  misc_feature (748)..(754): n is a, c, g, or t
  misc_feature (758)..(762): n is a, c, g, or t
  misc_feature (767)..(775): n is a, c, g, or t
  misc_feature (777)..(778): n is a, c, g, or t
  misc_feature (781)..(786): n is a, c, g, or t
  misc_feature (789)..(800): n is a, c, g, or t
  misc_feature (805)..(808): n is a, c, g, or t
  misc_feature (811)..(817): n is a, c, g, or t
  misc_feature (824)..(827): n is a, c, g, or t
  misc_feature (829)..(830): n is a, c, g, or t
  misc_feature (837)..(837): n is a, c, g, or t
  misc_feature (845)..(845): n is a, c, g, or t
  misc_feature (856)..(856): n is a, c, g, or t
  misc_feature (859)..(859): n is a, c, g, or t
  misc_feature (864)..(864): n is a, c, g, or t
  misc_feature (872)..(872): n is a, c, g, or t
  misc_feature (915)..(915): n is a, c, g, or t
  misc_feature (986)..(986): n is a, c, g, or t
  misc_feature (1004)..(1004): n is a, c, g, or t
  misc_feature (1271)..(1271): n is a, c, g, or t
  misc_feature (1391)..(1391): n is a, c, g, or t
  misc_feature (1463)..(1463): n is a, c, g, or t
  misc_feature (1553)..(1553): n is a, c, g, or t
  misc_feature (1574)..(1574): n is a, c, g, or t
  misc_feature (1760)..(1760): n is a, c, g, or t
  misc_feature (1859)..(1859): n is a, c, g, or t
  misc_feature (1977)..(1978): n is a, c, g, or t
  misc_feature (1990)..(1990): n is a, c, g, or t
  misc_feature (3557)..(3557): n is a, c, g, or t
  misc_feature (3560)..(3560): n is a, c, g, or t
  misc_feature (3953)..(3955): n is a, c, g, or t
  misc_feature (3957)..(3957): n is a, c, g, or t
  misc_feature (3959)..(3959): n is a, c, g, or t
  misc_feature (3968)..(3970): n is a, c, g, or t
  misc_feature (3979)..(3982): n is a, c, g, or t
  misc_feature (3991)..(3991): n is a, c, g, or t
  misc_feature (3994)..(3995): n is a, c, g, or t
  misc_feature (3998)..(4000): n is a, c, g, or t
caggatcatctcacgcatctgagcggtcgcccctggcntcgtgcgnagggcttcttcccaagccgccaggagcgcaggcatcgcatagcggaagtagaagtactgggggatgaaggccaagatnccgccgaagacgtgnaggaggacgacgtagctgaagccttgaccagccttgaagggccccgtggggtagaagtaatctcgataagctcgggcaccacgataggccacgatgggnacgatgatgaccccgaagaagtagagaatctgnaggaggggnacctgtaagctcagtatncgggcgnnntacatcacgacgaggatgagcccgaaggtcaggccggcacgtgccgccgatgggatgaggggggagggatgaggtgttgtcgacatcagttatctattcttgggcgcaaaggtacgactattctngtggttatccagactttagccnatccngcgcgctcctgnggggtgggnggaggaggggngggnggtnnnnnttccncnnncggnnnnttannccnnnnnntnccncgnnggnggtgnnangaagggnggnnnaaaggnnnncnnnttngcncnntnnntttnnntnnnttnnttgggnngnngggnnaantnatnnnnntnnccnatttngaccannnttgntttnnggnggnantnnnnngggttnnnggnntnaacnannnttggntcggantnngaaccnnnnttggnnnnngggnnaaccnnnnttggnccnnnnnnnaacnnnnnttggnnnnnnnnngnnccnnnnnnggnnnnnnnnnnnnccaannnnggnnnnnnngcctccnnnntnngaggagnagcagtgntgtgcgcaagnagnggggngcagggcngtctggtgaatggcgtatatttgtatagatacacactgaatanatgaatcaatcagcatgaagcgactattcaccctcgctcttagcctcgtcgccgtcctcggcgtgcaggcncaagagcttctcgtcggnacgtacaacgtccgctaccagaatgaatccgacgccaagcagggcaatggctggagccagcgctgccccgtcatctgcgaaatcctctcctacgaaagccccgatatcttcggcacacaggaggcgaaggtcgggcagatccacgaccttctgaaagggctccccgaatatgactacatcggtgtcgcccgtgatgatgggcgtgaggaaggcgagtactccgccatcttctaccacaagggccgcttgaagaagatccgctcgggnaacttctggctcagcgagacgcccgaccgccccgccctcggctgggatgctgcctgcatccgtatctgtacgtggggcgaatttgaagacctgcgtacccatcagcgtctgtacttcttnaacctccacctcgaccacgtcgggcgtcgggcgcgtatggagtccgctcgcctcgtcatgagccgtatccgnagtctcgtgcctgcgggtgcctctcacatcctcacgggagacttcaatgtcgaccagaccgatgaggtctatggcctactgacctcgacngccctccttcgcgactcgtangctatcgccgagcgtaagctggcacccaacgggacgttcaatgccttcgacaccgagctgaagacgccgagccgtatcgaccatatcttcgtctcacctgactaccgtgtcttgcgctatgccgtgcgtaccgatagctactggacggagcgtgaggacgctaccgaagaggggagcagccaagcncccgccgaggtgcgcctgaagaagcacgtgcgtcgcgctccctccgaccactatcccgtctttgctcgcctgagctatgacaaggatgccgagtgtggnactgcccatatctcccgcaagcacactgcgcctcagaagcgatagggggtaagagccccgtgatataaagaagacgccccgccttccacagtggaagacggggcgtccgttgttttgnncctacctcacgngtaggctatgcggagcgtctcttaggagagcttttccttgagggcagccagtgcatcgaggtcaccgagggtagccttctccgtagcagcgttggtagcagcgacggcagcagaagcatcctggtggcgagcctgacgctcagcgcgctctgcacgctcgcttgcacgagcttcagccttagcttcgtcttcgaaggtacggctgtgagagacgatgatgcggcgagaatccttgttgaattcgatgaccttgaaggggagcgtttcgcccttgacagcctgcgtaccatcggccttgaccaggtgcttaggcgtagcgaatgcttcgataccttcggggagcgagatgacagcgcccttctctacgaattcgcggatcgtaccttcgtggatcgtacctacgcggtagtcagcttcgaaggcgttccaggggttctcttcaagctgcttgtggccgagagagagacgacggttttccttgtcgatttcgaggacgacgatctccagaggagcaccgacttccgtgaactcgttggggtgcttgatcttcttcgtccaagagaggtcggagatgtgtacaagaccatcgataccttcttcgatctctacgaagacaccgaagttggtgaagttgcggaccttagccgtgtggcgagagccgatggggaagcgcttgtcgatgttttcccatggatcttccttgagctgcttgagaccgaggctcatcttacgctcttcgcggtcgagagagaggatgacagcttcgacttcgtcgccgaccttcaggagttcctgagccgagcggacgtgctgcgtccaagacatttcagagatgtggacgagaccttctacgccaggagcaacttcgatgaatgcaccgtagtcagcgaggacaacgaccttacccttgatcttgtcgcccaccttgaggttagggtcgaggctatcccagggatgtggctggagctgcttgataccaagagcgatgcgcttcttagcttcgtcgaactcgaggataacgacgttgagcttctggtcgaggctaacaacttcgctggggtgagatacacggccccaagagaggtcggtgatgtggacgagaccatcgataccaccgaggtcgatgaaggcaccgtaagaggtgatgttcttgacgaccccttcgaggacctgacccttctcaagcttgctgatgatctcagccttctgagcttcgagttcagcttcgatgaggatcttatgcgatacgacgacgttcttgaagtcctggttgatcttgacgatcttgaactccatggtcttgtcgacataagcatcgtagtcgcggataggacggacgtcgatctgtgagccggggaggaaggcctcgataccgaagatatcgacgatcataccacccttcgtgcggcacttgacgtagccgcgtaccacttcgtccttctcgagggcttcgttgatacgatcccatgagcgagcgacgcgtgcctgacggtgtgagaggacgagctgtcccttcttgtcttcctgtgattcgatgaagacctcgaccttgtcgcctacctggagntcngggttgtagcggaactcagctgagttgatcgcaccttcgctcttgaagccgatgttgacgagtacttcgcgcttaccaatcttggtaaccgtaccgatgacgatctcctgatccttaacgttgttcagggtgccatcataagcggcttcctgctcctgacgagaagcagagcacgctacctctcccttctcaaactcatcccagttgaagtccgcgatgggcttgatctctttcaaattttccatttgttaaacttactatgaattacacacgagtgcttctgctggtgcatagcacatgacttgtgacccagcaaagtggacatcaagcgatgcactacccccgcaaaagtcagcgcaaatgtacgaaaaagtcacgtacttatcccccacnnncncngtctttttnnntgcactctnnnnctgcccctncgnnagnnn

SEQ ID NO: 638 - DNA, 4000 bp, Escherichia coli
agtgatcaactcaatgtcggccaggtgagctgtttcgtccaacgctctggcaagaaactggggtgccatcaccagcacgatttgatctgtgggccccgaccgtgtaaggcgatcgcgggttcccgcaggaaggatatagagattccctggaccatgcttagcgcgtcgggtgcggccatccgtcgtccactcgaaggtaacttgtcccaatctctggagattcagaaaatgagtcggatgttcatgttcgggaacagagcaggcaggtacatcgttgaacgattccattgcaatgccatcccagcccgcgtgccggcttgagagcgtcgagagcgtcgggaccggcgacactatccggccactgcgaaggacttcaactgcctcgacaggaacaacccctgttttgtcttgcaacgcggtctcctcaggttttcctacggtgctgcataatgcttctgatgaaatactaatccaaagacaacgctttaagcttctcacgcccagtttcacatcacaaatccgcaagaattgaccaatgtcgaaatttctgaccaaggaacttcagaacgtttggcggaactgtatcggcatgacactcacgattcagcgaaaaaccatcgtgccgctcaacctggtccgatccacgaagcactcgactcgacaatcggaagaactaaccaataccagaacatttgaccaatggcgtatggatatcctgcctgcgaaagggactccgagcagccgcatccacgcggccaaaaagagacaaatacggccaaaaaagtcatggcctgctttgcccattggaacgacaacgctgcgttaatcaagatcgcggttagcttggcgtctaaataccgaagaatatggaagaccacgcgaacctctcgcgcgcggtgccgcccagccaagcaggatttggcgggctgattggtcaatctgctccgatgcagcttctctacgagctcatcggaaaggtcagccagagcacttccccggttctgatcattggagagaccggaacaggaaaggaactggttgcacgagccatacacttcaagggattacgacgagagaaggcgtttgtgcctgttgattgctcggcactgacccctactctggtggagtccgagttgtttggacatatcaaaggcgccttcacgggtgcagaccgctcgaagtggggtctccttcagaccgctcatgaaggaacgatctttctagatgagatcggcgagcttctcctgttcttgcaggcaaaattgttacgggcgctgcaagaaaaagagataaggcctgtcggctcgacagagcgaactccaattgacgtccgggttatcgccgcaactaatcgcgacctcgaagcgggagtctggaaggggacatttcgccaggacttgtatttccgattgaacgttgtgcaaatcaggctcccggcgctgcgcgagcgcaaggtcgatattcccctattggtgacccatttcctggacaaattttctgacccgaagcagccggttcgtgcgctctccgatgaggcactgcggcgattgatggcctacgattggccaggcaacgtccgagaactggaaaacgccatcgaatgtgctttggtcttaagttctaacagtgttctgacggcgcatgacctggcttcggtcccctatggcgcatcggccccgaatgctccccatagcaacgagctcgtccctctggaggaactcgagcgacgggccatcacaaatgctttgcgggaaatgggaggagataagctcggcgctgctcgcctcttaggcattggcaagaccacgctctatcgcaagctcagggcatacgctacaaaccccgcaccaacacgccacgagcccagcgaaggacactagccgatgatagagagacttagcagacgcgtctcaacgaagccttacatcgaaagctcagaactgaggcgcctaccggactccacaggagaggcgatctatggtatagatatgatgggtaattgtactattggtaactctgcctgtctgcgattgctcggctacagtgatccggtcgaactcatcggcaagcacatgcacaaaataatgcatcatactcgtccggatggaactccttaccccagcgatgaatgccgtatctacttagcgtttcgtggcggcgagggtagccatgtggatgacgaagtcgtctggcgcgccgatgggacgagctttccggttgagtattggtcctatccgatacgcgatcagaacgttctaattggtgcggtagtaaccttcgttgacatcaccgagcggaaaagagcagagcacgctctgcagcaaagtgcagaaatgttccgccagttgatggagaatatccgtgaaatcttttttcttgtggcgccagaccctccgaaaatggtttatgtcagcccggcctacgaggaagttgccggaaggccccgtctggagctttacgaccgagctgatgcttggatcgactcggtctatccacaagatcgctgtcatgtgcggagcgtttttgaacaagccatgcaaggcgtcacaacggccatggaataccgctttagtcggcccgatggatccgtgcgttggattcatgctcgcagctttccagtccaagattcacaaggtaatttgcggcggattgttggtattgcagaagacattaccgaccgcaaacgaacactggaagagatggatgcggccaaggcagccgcagaagcagcaaaccgggcgaaaagcgaattcctcgccaacaagagtcacgaaatccgaacacctatgaacggcattattggaatgaccgaactcttgcttgacacggagttgaccccagaacatgccgagtaccttcagatggtaaagagttctgctgactcgttgctgacgattatcaacgacattctagatttttcagaaatcgagtctggaaaattgcagctggatgctaccactttcgatttacgaaagcgcttggaagatgtgatcaaggggctcgcgatcaaggctcgcagcaaaggactcgaacttctgttgacagtacatccgggaatacccgcgtccatggtgggtgatcccactcggctgagtcaagtactcacaaatcttgtaggaaatgccctaaagttcactgaccggggagaagtcgtggtggaagtacgaaaagaggtggaaagcgataacttcgctacgcttcactttagtgtgggagatacggggattgggattccgctcgaaaaacagcaaatgattttcgatgaattttcgcaggcggactcatcaacgacacgcaggtttgggggcacggggctcggcctagcgatttcaaagcgcttagttggcatgatgggcggacaaatatggcttgaaagtgaagtcgggcgtggttccacgttccattttactgtttcgttggagctcggaccctaggtgcccatttaattggctacgatcctcacctcactgtcgaatctctggtaattcgtaaactgcccgcgacaccagtggatgtggttattcccacgaagtcattttgcgtctgcgtgaacgcgctaaacgattcaacggtaccgaaaaacgccactacatttttcctgcctgtgagcatggccacgtcgatcccacgcggcaccagaagagctttaggaccgcatggcgcaacttaaccagagcgattcagtgtcccgcctgtggcaagttgcggccgcccggaaataagtgtgccgataaagaatgccgggccaaaattcacggcatcaagagtcaactcgccggattacggtttcacgatctaaggcaccttgcaatcactgagctcgccgagtcccaggtctctgatcaaaccatcttggccatcgcaggccatgtcagccaaaagatgttggctcgatattcgcaggtgcggagcgaggcgaggcggcaagctgttgcggcactttcagcaaggcctgcaggaagctggttaactgagaatcaaagcacaggtcacgacacaa

SEQ ID NO: 639 - DNA, 4000 bp, Escherichia coli
  misc_feature (1441)..(1441): n is a, c, g, or t
  misc_feature (1720)..(1720): n is a, c, g, or t
  misc_feature (2157)..(2158): n is a, c, g, or t
  misc_feature (2477)..(2477): n is a, c, g, or t
  misc_feature (2621)..(2621): n is a, c, g, or t
  misc_feature (2834)..(2834): n is a, c, g, or t
  misc_feature (3233)..(3233): n is a, c, g, or t
  misc_feature (3734)..(3734): n is a, c, g, or t
atacgccactaattagttttatcgccgccactgtgaagtcctcttctccaataaggcataaccaatagttgatattccaaccaagatcaccatgccaagtccaagggccatcgctgtattagctccatctacctgaacatttgagctgattaaagatgcaatctgtactggcactagtgcaagagagccactagttagagctgctgctgtggcataagcagcaaaagaattagcaaagagaagaagaaagaaacctaatagctgtggagtcagaattgggataagaaccttacgccaataagtagcgttacttgcaccaagtgatgaggctgcatctcgccactcaactctgatattttccaatattggcagacagattagaaccattagaggaacttggaagtagagatagacaattaacaagccagaaaaagaatagagcgtccagctccccccatatatatctacccccagattctttaagaaagtagtaagggctccataggttccaaggactgcaataaacataaaggctagagggactccacctgtatttgctagcactcccgaagctgtagagaccaactttctcaaataaatccatttggaggtggccaaggcataggcaaagaggaagccgaaaaatagcgaaagggcagctgaaacaaaggataattgcgagcttaagatgaagccatcccgatagattccactactaattgtggcaaagttatctaatgtgaactcattttctgaatttagaaatgaaaatctaaaaattgcagttaggggcaatcctaagaaaattgccatataaataagaagcggggctaagccgattagccccgctcttttaaacatttaacaacccttcattttgtttagcagacttgcaagagcatttgtgtagcgaaagttggaccctcgaaccaacttccgctactcaaacgttttctagcagtgttacaactttggccaagcgggagtgaggagagctttggctagtagttgttgctgcaaggatgggaagatcggctttgcgttctttggcgtagctggcaatagcgcgtaggcagttttatcgtgggtattggctttcaccattgcatcaaggcgaatcggacgagcgcctccctgcaaccacaagttctgaccttcatcgctatataggaactcttgccacaaacgagctgcggcaggatgtggagagttctttacgatagcttgtgcatagaacccaccgagcaaaccatctgatggaacaacgactttccaatcaaccttgcctgattggtccttgtacttagcatgtaggtaatcccaatctaggagtattggggtttgacctgctgccacagtggccggagtcgctgcaactggaacgaaattgccggaagctttcatctgcttccagtaatcaagagcgaaattgatgttattngcgccttttactcctgcacctgcagcgacggatgttgccattactgagaggaatgctgagttggaagcagtagggtcgccattgagcgccacttgattcttatagattgggtttagaagatctgaaaaagactttggtggagtcttgattagattggcgtcatagccaattgcgatatatccgccgtaatctgaataccaaagacccttagcatctttagctgcatctggaatatctttccagccaatgactttatagggagcaagaagtccttcttgngcgccctgcactgcaaattgcagacctacgtccaagacatctggcatacgatcttgacccttaagggtgcgaactgccactaattcctcagcggagctagcctctggatcataggaatttaccttaattccatacttctcagagaagcgcttgattacattgccataatttgcccagtaatcaggaagagcaatggtatttaactcgccctcttttttggcaagtttgattagttctttcaatccaccaacatctgcggcagattgagcttttgcaggcttcttagttgctgcttgagcgattacaaaatttgaagatagcgctagtgctagcacgatgccaactacagcgcgtaatgatttcttgttcatgcgactcctaacgtcggtgtgaggagtcaagttcccaactattaaatttaagtagattaatccttnnaatcaatcgaatattgggtaaacaaaaatccccgatactctaattagtatcggggatttaaccttctgttaactagcgattttctccaacttggtaatcatcaaggcgaactgcctctcctgatccagtggtatcaaatggcgcatagtcatactcttcataagctgcatagaccgcagcctttgcctcttcagtaggttcgactcgaacgttgcgataacgagcaaggccggttcctgctgggatgagttttccaatgatgacgttctctttaaggccaagaagtggatcactcttttcagagagggctgcatctgtnaggacgcgagttgtctcctggaaggaggctgctgatagccaagattcagtagcaagtgatgccttggtaatacccataagttctgggcgaccatttgcagccttgccacctttctgcaccgcttcgcggttagcagattggaancttaggtgatcaactaattcacctggcagtagatcggtatcccctggttctaggacagtgatgcgacgaagcatctgcttaaccacaatttcaatgtgcttatcgtggataccaacaccctgggtgcgataaacctcttgaatttcatggactagatgggtctgagttgatcttgctcctaagatttttaatacttgcttaggatcaattgcncccacaaccatctgctgaccaacgcctaccttatgaccatcttcaacaagaagtttctgacggcgagtaattggataagcaacagcctcagtgccatcttctggggtaacaattatcttcttacccttagcatcttcaaggaagctaacaactccggcagtctctgcaattggagcaacgccctttggagtgcgcgcttcaaagagctcaactacgcgaggcagaccatgggtgatatcacctgacgcagttgctgcgcctccagtatggaaggtacgcattgttaactgagttcctggctcaccaattgattgcgctgcaatgattcccactgcttcgcccacatcaactagcttgcctgatgccattgagcggccataacacttagcgcactgtccnaccttgctatcgcaggtaagaatggagcgaactttaatctcgctaacgcctgcatcaattagatcattgattaagcgatcaccaagatcagcacctgatgtaacgatggtcttgccacctaccactacatcatctgcaagtgtgcggccatagattgaagtctcaacataatcatcgcgggttagttttcctgcaacgatatttccaatctttagagttagaccgcgatcagttccgcaatcctcttctctaatgattacatcttgagccacatcgcagaggcgtctggttagataaccagcatctgcggtacgaagggcagtatctgcaagtccttttctagcaccatgtgttgagatgaagtactcaagaactgagagtccttcacggaagttagatttaatcggacgagggataatttcaccctttggatttgctacaagtccgcgcatacctgcaatctggcgaatctgcatcatatttccacgggctccagagaanaccatcatccagactggatttgttcttgggaaattatcttccatctctttagcaacttcatttgttgcctgagtccagatctcaattagctcctgacgacgttcatcatcggtaattagacccttctcatattgagattggaccttatcggcctttgtctcatagccctcaaggatttcaagctttcttcctggagttactacatcaacaattccaatcgttgcgccagctctagttgcccatgtgaaaccaagttccttcaaggc

SEQ ID NO: 640 - DNA, 4000 bp, Escherichia coli
  misc_feature (243)..(243): n is a, c, g, or t
  misc_feature (1820)..(1820): n is a, c, g, or t
  misc_feature (1986)..(1986): n is a, c, g, or t
  misc_feature (2000)..(2001): n is a, c, g, or t
  misc_feature (2144)..(2144): n is a, c, g, or t
  misc_feature (2153)..(2154): n is a, c, g, or t
  misc_feature (2162)..(2162): n is a, c, g, or t
  misc_feature (2166)..(2166): n is a, c, g, or t
  misc_feature (2176)..(2176): n is a, c, g, or t
  misc_feature (2270)..(2270): n is a, c, g, or t
  misc_feature (2281)..(2281): n is a, c, g, or t
  misc_feature (2313)..(2313): n is a, c, g, or t
  misc_feature (2318)..(2319): n is a, c, g, or t
  misc_feature (2324)..(2324): n is a, c, g, or t
  misc_feature (2330)..(2330): n is a, c, g, or t
  misc_feature (2333)..(2333): n is a, c, g, or t
  misc_feature (2337)..(2337): n is a, c, g, or t
  misc_feature (2339)..(2340): n is a, c, g, or t
  misc_feature (2344)..(2344): n is a, c, g, or t
  misc_feature (2347)..(2348): n is a, c, g, or t
  misc_feature (2354)..(2357): n is a, c, g, or t
  misc_feature (2360)..(2360): n is a, c, g, or t
  misc_feature (2362)..(2370): n is a, c, g, or t
  misc_feature (2375)..(2375): n is a, c, g, or t
  misc_feature (2379)..(2379): n is a, c, g, or t
  misc_feature (2386)..(2386): n is a, c, g, or t
  misc_feature (2389)..(2395): n is a, c, g, or t
  misc_feature (2397)..(2397): n is a, c, g, or t
  misc_feature (2400)..(2405): n is a, c, g, or t
  misc_feature (2409)..(2409): n is a, c, g, or t
  misc_feature (2411)..(2417): n is a, c, g, or t
  misc_feature (2419)..(2420): n is a, c, g, or t
  misc_feature (2423)..(2424): n is a, c, g, or t
  misc_feature (2427)..(2427): n is a, c, g, or t
  misc_feature (2429)..(2431): n is a, c, g, or t
  misc_feature (2433)..(2439): n is a, c, g, or t
  misc_feature (2441)..(2442): n is a, c, g, or t
  misc_feature (2444)..(2446): n is a, c, g, or t
  misc_feature (2448)..(2448): n is a, c, g, or t
  misc_feature (2451)..(2451): n is a, c, g, or t
  misc_feature (2454)..(2454): n is a, c, g, or t
  misc_feature (2456)..(2456): n is a, c, g, or t
  misc_feature (2458)..(2461): n is a, c, g, or t
  misc_feature (2464)..(2466): n is a, c, g, or t
  misc_feature (2469)..(2473): n is a, c, g, or t
  misc_feature (2477)..(2484): n is a, c, g, or t
  misc_feature (2486)..(2486): n is a, c, g, or t
  misc_feature (2489)..(2490): n is a, c, g, or t
  misc_feature (2492)..(2495): n is a, c, g, or t
  misc_feature (2498)..(2499): n is a, c, g, or t
  misc_feature (2501)..(2502): n is a, c, g, or t
  misc_feature (2505)..(2508): n is a, c, g, or t
  misc_feature (2510)..(2511): n is a, c, g, or t
  misc_feature (2513)..(2514): n is a, c, g, or t
  misc_feature (2516)..(2516): n is a, c, g, or t
  misc_feature (2520)..(2521): n is a, c, g, or t
  misc_feature (2523)..(2523): n is a, c, g, or t
  misc_feature (2526)..(2528): n is a, c, g, or t
  misc_feature (2530)..(2530): n is a, c, g, or t
  misc_feature (2532)..(2533): n is a, c, g, or t
  misc_feature (2536)..(2537): n is a, c, g, or t
  misc_feature (2539)..(2541): n is a, c, g, or t
  misc_feature (2543)..(2543): n is a, c, g, or t
  misc_feature (2545)..(2547): n is a, c, g, or t
  misc_feature (2551)..(2561): n is a, c, g, or t
  misc_feature (2565)..(2567): n is a, c, g, or t
  misc_feature (2569)..(2569): n is a, c, g, or t
  misc_feature (2573)..(2573): n is a, c, g, or t
  misc_feature (2576)..(2577): n is a, c, g, or t
  misc_feature (2579)..(2579): n is a, c, g, or t
  misc_feature (2581)..(2583): n is a, c, g, or t
  misc_feature (2585)..(2587): n is a, c, g, or t
  misc_feature (2589)..(2589): n is a, c, g, or t
  misc_feature (2594)..(2599): n is a, c, g, or t
  misc_feature (2601)..(2610): n is a, c, g, or t
  misc_feature (2613)..(2619): n is a, c, g, or t
  misc_feature (2621)..(2621): n is a, c, g, or t
  misc_feature (2623)..(2623): n is a, c, g, or t
  misc_feature (2625)..(2625): n is a, c, g, or t
  misc_feature (2627)..(2629): n is a, c, g, or t
  misc_feature (2631)..(2633): n is a, c, g, or t
  misc_feature (2635)..(2636): n is a, c, g, or t
  misc_feature (2638)..(2642): n is a, c, g, or t
  misc_feature (2645)..(2645): n is a, c, g, or t
  misc_feature (2648)..(2649): n is a, c, g, or t
  misc_feature (2652)..(2652): n is a, c, g, or t
  misc_feature (2656)..(2656): n is a, c, g, or t
  misc_feature (2661)..(2663): n is a, c, g, or t
  misc_feature (2665)..(2668): n is a, c, g, or t
  misc_feature (2670)..(2673): n is a, c, g, or t
  misc_feature (2675)..(2678): n is a, c, g, or t
  misc_feature (2684)..(2686): n is a, c, g, or t
  misc_feature (2688)..(2688): n is a, c, g, or t
  misc_feature (2691)..(2692): n is a, c, g, or t
  misc_feature (2694)..(2695): n is a, c, g, or t
  misc_feature (2697)..(2697): n is a, c, g, or t
  misc_feature (2699)..(2699): n is a, c, g, or t
  misc_feature (2701)..(2703): n is a, c, g, or t
  misc_feature (2708)..(2708): n is a, c, g, or t
  misc_feature (2710)..(2712): n is a, c, g, or t
  misc_feature (2714)..(2714): n is a, c, g, or t
  misc_feature (2716)..(2716): n is a, c, g, or t
  misc_feature (2719)..(2721): n is a, c, g, or t
  misc_feature (2723)..(2725): n is a, c, g, or t
  misc_feature (2729)..(2731): n is a, c, g, or t
  misc_feature (2735)..(2735): n is a, c, g, or t
  misc_feature (2737)..(2737): n is a, c, g, or t
  misc_feature (2739)..(2739): n is a, c, g, or t
  misc_feature (2742)..(2742): n is a, c, g, or t
  misc_feature (2744)..(2747): n is a, c, g, or t
  misc_feature (2749)..(2749): n is a, c, g, or t
  misc_feature (2751)..(2751): n is a, c, g, or t
  misc_feature (2756)..(2759): n is a, c, g, or t
  misc_feature (2762)..(2762): n is a, c, g, or t
  misc_feature (2766)..(2766): n is a, c, g, or t
  misc_feature (2768)..(2768): n is a, c, g, or t
  misc_feature (2771)..(2777): n is a, c, g, or t
  misc_feature (2779)..(2779): n is a, c, g, or t
  misc_feature (2783)..(2786): n is a, c, g, or t
  misc_feature (2788)..(2790): n is a, c, g, or t
  misc_feature (2793)..(2793): n is a, c, g, or t
  misc_feature (2799)..(2799): n is a, c, g, or t
  misc_feature (2802)..(2802): n is a, c, g, or t
  misc_feature (2804)..(2804): n is a, c, g, or t
  misc_feature (2806)..(2806): n is a, c, g, or t
  misc_feature (2808)..(2810): n is a, c, g, or t
  misc_feature (2812)..(2816): n is a, c, g, or t
  misc_feature (2819)..(2820): n is a, c, g, or t
  misc_feature (2823)..(2825): n is a, c, g, or t
  misc_feature (2827)..(2829): n is a, c, g, or t
  misc_feature (2831)..(2832): n is a, c, g, or t
  misc_feature (2834)..(2835): n is a, c, g, or t
  misc_feature (2837)..(2841): n is a, c, g, or t
  misc_feature (2843)..(2846): n is a, c, g, or t
  misc_feature (2849)..(2850): n is a, c, g, or t
  misc_feature (2852)..(2855): n is a, c, g, or t
  misc_feature (2857)..(2862): n is a, c, g, or t
  misc_feature (2864)..(2865): n is a, c, g, or t
  misc_feature (2867)..(2868): n is a, c, g, or t
  misc_feature (2870)..(2872): n is a, c, g, or t
  misc_feature (2874)..(2874): n is a, c, g, or t
  misc_feature (2877)..(2878): n is a, c, g, or t
  misc_feature (2880)..(2880): n is a, c, g, or t
  misc_feature (2882)..(2885): n is a, c, g, or t
  misc_feature (2887)..(2892): n is a, c, g, or t
  misc_feature (2894)..(2894): n is a, c, g, or t
  misc_feature (2896)..(2901): n is a, c, g, or t
  misc_feature (2903)..(2906): n is a, c, g, or t
  misc_feature (2908)..(2913): n is a, c, g, or t
  misc_feature (2915)..(2917): n is a, c, g, or t
  misc_feature (2919)..(2920): n is a, c, g, or t
  misc_feature (2922)..(2924): n is a, c, g, or t
  misc_feature (2926)..(2926): n is a, c, g, or t
  misc_feature (2928)..(2928): n is a, c, g, or t
  misc_feature (2930)..(2930): n is a, c, g, or t
  misc_feature (2932)..(2932): n is a, c, g, or t
  misc_feature (2934)..(2937): n is a, c, g, or t
  misc_feature (2939)..(2941): n is a, c, g, or t
  misc_feature (2943)..(2947): n is a, c, g, or t
  misc_feature (2951)..(2953): n is a, c, g, or t
  misc_feature (2955)..(2955): n is a, c, g, or t
  misc_feature (2957)..(2963): n is a, c, g, or t
  misc_feature (3372)..(3372): n is a, c, g, or t
  misc_feature (3374)..(3375): n is a, c, g, or t
  misc_feature (3379)..(3381): n is a, c, g, or t
  misc_feature (3383)..(3384): n is a, c, g, or t
  misc_feature (3386)..(3387): n is a, c, g, or t
  misc_feature (3389)..(3391): n is a, c, g, or t
  misc_feature (3394)..(3397): n is a, c, g, or t
  misc_feature (3399)..(3399): n is a, c, g, or t
  misc_feature (3402)..(3403): n is a, c, g, or t
  misc_feature (3405)..(3408): n is a, c, g, or t
  misc_feature (3410)..(3415): n is a, c, g, or t
  misc_feature (3417)..(3429): n is a, c, g, or t
  misc_feature (3431)..(3431): n is a, c, g, or t
  misc_feature (3434)..(3434): n is a, c, g, or t
  misc_feature (3436)..(3437): n is a, c, g, or t
  misc_feature (3439)..(3439): n is a, c, g, or t
  misc_feature (3442)..(3443): n is a, c, g, or t
  misc_feature (3445)..(3447): n is a, c, g, or t
  misc_feature (3449)..(3450): n is a, c, g, or t
  misc_feature (3452)..(3452): n is a, c, g, or t
  misc_feature (3454)..(3457): n is a, c, g, or t
  misc_feature (3459)..(3459): n is a, c, g, or t
  misc_feature (3461)..(3462): n is a, c, g, or t
  misc_feature (3464)..(3468): n is a, c, g, or t
  misc_feature (3471)..(3472): n is a, c, g, or t
  misc_feature (3474)..(3474): n is a, c, g, or t
  misc_feature (3476)..(3478): n is a, c, g, or t
  misc_feature (3480)..(3484): n is a, c, g, or t
  misc_feature (3486)..(3486): n is a, c, g, or t
  misc_feature (3491)..(3497): n is a, c, g, or t
  misc_feature (3500)..(3500): n is a, c, g, or t
  misc_feature (3502)..(3504): n is a, c, g, or t
  misc_feature (3507)..(3510): n is a, c, g, or t
  misc_feature (3512)..(3515): n is a, c, g, or t
  misc_feature (3517)..(3519): n is a, c, g, or t
  misc_feature (3521)..(3522): n is a, c, g, or t
  misc_feature (3524)..(3527): n is a, c, g, or t
  misc_feature (3529)..(3529): n is a, c, g, or t
  misc_feature (3531)..(3531): n is a, c, g, or t
  misc_feature (3536)..(3538): n is a, c, g, or t
  misc_feature (3540)..(3540): n is a, c, g, or t
  misc_feature (3542)..(3543): n is a, c, g, or t
  misc_feature (3545)..(3552): n is a, c, g, or t
  misc_feature (3554)..(3555): n is a, c, g, or t
  misc_feature (3558)..(3558): n is a, c, g, or t
  misc_feature (3560)..(3560): n is a, c, g, or t
  misc_feature (3562)..(3564): n is a, c, g, or t
  misc_feature (3566)..(3572): n is a, c, g, or t
  misc_feature (3574)..(3577): n is a, c, g, or t
  misc_feature (3580)..(3587): n is a, c, g, or t
  misc_feature (3590)..(3591): n is a, c, g, or t
  misc_feature (3593)..(3599): n is a, c, g, or t
  misc_feature (3601)..(3607): n is a, c, g, or t
  misc_feature (3609)..(3611): n is a, c, g, or t
  misc_feature (3613)..(3625): n is a, c, g, or t
  misc_feature (3627)..(3632): n is a, c, g, or t
  misc_feature (3635)..(3636): n is a, c, g, or t
  misc_feature (3638)..(3640): n is a, c, g, or t
  misc_feature (3642)..(3648): n is a, c, g, or t
  misc_feature (3651)..(3651): n is a, c, g, or t
  misc_feature (3653)..(3657): n is a, c, g, or t
  misc_feature (3659)..(3669): n is a, c, g, or t
  misc_feature (3671)..(3674): n is a, c, g, or t
  misc_feature (3676)..(3678): n is a, c, g, or t
  misc_feature (3680)..(3685): n is a, c, g, or t
  misc_feature (3687)..(3687): n is a, c, g, or t
  misc_feature (3690)..(3695): n is a, c, g, or t
  misc_feature (3697)..(3701): n is a, c, g, or t
  misc_feature (3703)..(3706): n is a, c, g, or t
  misc_feature (3708)..(3713): n is a, c, g, or t
  misc_feature (3715)..(3717): n is a, c, g, or t
  misc_feature (3719)..(3720): n is a, c, g, or t
  misc_feature (3722)..(3723): n is a, c, g, or t
  misc_feature (3725)..(3729): n is a, c, g, or t
  misc_feature (3732)..(3734): n is a, c, g, or t
  misc_feature (3736)..(3736): n is a, c, g, or t
  misc_feature (3739)..(3747): n is a, c, g, or t
  misc_feature (3750)..(3760): n is a, c, g, or t
  misc_feature (3765)..(3766): n is a, c, g, or t
  misc_feature (3770)..(3771): n is a, c, g, or t
  misc_feature (3773)..(3773): n is a, c, g, or t
  misc_feature (3775)..(3775): n is a, c, g, or t
  misc_feature (3777)..(3782): n is a, c, g, or t
  misc_feature (3788)..(3790): n is a, c, g, or t
  misc_feature (3792)..(3793): n is a, c, g, or t
  misc_feature (3796)..(3808): n is a, c, g, or t
  misc_feature (3810)..(3811): n is a, c, g, or t
  misc_feature (3818)..(3819): n is a, c, g, or t
  misc_feature (3821)..(3822): n is a, c, g, or t
  misc_feature (3827)..(3831): n is a, c, g, or t
  misc_feature (3833)..(3836): n is a, c, g, or t
  misc_feature (3838)..(3840): n is a, c, g, or t
  misc_feature (3842)..(3849): n is a, c, g, or t
  misc_feature (3851)..(3851): n is a, c, g, or t
  misc_feature (3856)..(3858): n is a, c, g, or t
  misc_feature (3860)..(3860): n is a, c, g, or t
  misc_feature (3862)..(3862): n is a, c, g, or t
  misc_feature (3864)..(3865): n is a, c, g, or t
  misc_feature (3867)..(3873): n is a, c, g, or t
  misc_feature (3875)..(3881): n is a, c, g, or t
  misc_feature (3884)..(3888): n is a, c, g, or t
  misc_feature (3891)..(3896): n is a, c, g, or t
  misc_feature (3898)..(3899): n is a, c, g, or t
  misc_feature (3903)..(3905): n is a, c, g, or t
  misc_feature (3907)..(3909): n is a, c, g, or t
  misc_feature (3913)..(3918): n is a, c, g, or t
  misc_feature (3920)..(3920): n is a, c, g, or t
  misc_feature (3922)..(3922): n is a, c, g, or t
  misc_feature (3924)..(3924): n is a, c, g, or t
  misc_feature (3927)..(3928): n is a, c, g, or t
  misc_feature (3931)..(3935): n is a, c, g, or t
  misc_feature (3937)..(3946): n is a, c, g, or t
  misc_feature (3948)..(3948): n is a, c, g, or t
  misc_feature (3950)..(3954): n is a, c, g, or t
  misc_feature (3956)..(3956): n is a, c, g, or t
  misc_feature (3958)..(3959): n is a, c, g, or t
  misc_feature (3962)..(3962): n is a, c, g, or t
  misc_feature (3964)..(3972): n is a, c, g, or t
  misc_feature (3974)..(3974): n is a, c, g, or t
  misc_feature (3976)..(3977): n is a, c, g, or t
  misc_feature (3979)..(3984): n is a, c, g, or t
  misc_feature (3986)..(3987): n is a, c, g, or t
  misc_feature (3989)..(3990): n is a, c, g, or t
  misc_feature (3993)..(3995): n is a, c, g, or t
  misc_feature (3997)..(4000): n is a, c, g, or t
cactatgtacaataaacagtgggcgtacaataagaacatacaggtatggcatcaggatgtaaaggggcatgtagacgctgaaatcggatgggattattttacaggaagcagtgatattgttgttgctgtatgtgacaccggcgttgactatatgcatcctgatttaaacgagaatatgtggaaggacggcaacggtaattatgggtggactttcaccccggatttaactgctcctaatggagntcctgctacatttacatatcaaggcgtcacatatacagaagatcatggaacgcacgttgccgggatcataggagctgtcggaaataacagtcgtggcgtaacaggtcttgcacaaaaatgcaagataatcccgattaatgtgttctacggacttgtatataaaggagaagtaatatttactcttgatacacctgatgtggcagatgcaatatattatgcagttgataatggagcaaaggtaataaatcattcgtggggcggtcaatttgaccctccaatgcatcttttagctgcttggacatatgcattgaatgcaggatgtatttgtgtatgtgcgtccggaaacagttcaaaaaataatgattattataattttaaccctgcaaatattaatagtccgaataacataacagtaaactcaaacaattttcttgcaggtcattcatcattctcgaattacggaataacaaatacaaatatatacgcacccggcggggaaacaagagcatacgattctgaagacaatatactgtcaaccattacaaatgacagatatacatattatccgggaacatcaatggctgctcctgttgtgacttctttccttggtctgttgggtcatagaattccgggtgcaacagtaggcaaattgagggatacattacatagaacgataatgcctttcccggatatgtttctgtcctgttacagcggtgggatggttaattacggaagagcaatgaaagccaccagaagcgggcatggtgtcaatctgtatagtgtatccgatgcaagagtatcagttgattatgctataccatatccgcatagtattgaatggagtaatcctccggggatatttcgtatcatcatatcaagaaaaccatggtgttatccgcaaaaagattatggaaatgaaacaaatgaacttgcctttgataattatatcaaggggatgattgtagatgaagatgttgagataatttacaatggtgattcagatgatccaataattgatattgaatcagacccgtatgctatatacgggtataaaatagaaacttggtataaatttggtgccaatgatttcagacaggcattaccggtatatctgagaagttatcccagtgtaatgccatttttgtgtccgagagaacctgcatatgcgtttgaatttctttgtgactggtgggacgaagcgtgggtaggcgttcgtggacaggcgatgaaagaccctgtaatacttgcccaattatggagggcaataacatctaaaaatataactgcaagaagagatgttataccgtcagaaccattctcatatagaccgggttctgtattcaaacattattttccacttgaaggcgttgaaagattctcgatgctgccgtgggaaagagttcctgttcatcctgtggcagaacatgtaaatacacaggaaggaatatctgcaggcgcaatattcattcaatctttaacggataatatcaaacggcatatgcttggatttgatatgtattcaaacaagtacaagaaacgaatgatatatagatggatggattactatcaatatatcnatacggggagaattggagcatataaacctcccgataaattctataaatggaatgacgcatatattaaagatcaggataattgggaagaaataataaaaactgctcaggaaataataaatagcatgcatgttctttataccggtcttccttcatatggagttctctntaaagtctttcatnnagaaacatgtactagtatcccgggaagtgtaggtggcataacacatagcacagtaaatttcagcgttccagtaaacagtcaaatggtagatgagggacctgatgttccgaataaacctgatggtgaatatatatatactggangcgcttttnncagattantcgnttcgatgaanccatacacggtagaaaaagtgtggagcactattcagcctgtaggtccaatagaaaatatgtctaaatttgatattggatttaaattttgcaaantgccttctgtnggatgggcaacttgggacacaccaaccactanacatnntgatnatactnatnattntnntganaannatattnnnnctncnnnnnnnnnttatnaaanagaaccnccnnnnnnngnaannnnnnatgntnnnnnnngnngannagnannngnnnnnnntnntnnngnagnagnantnnnngannnagnnnnngatnnnnnnnntnaanntnnnnttnntnntgnnnntnnannantatnntnctnnnantnntgnnannngnannngcannnnnnnnnnnttgnnntntatnatnntntnnngnnncntgcgnnnnnngnnnnnnnnnnaannnnnnnantnantnnnannnannannnnnatnatnntantgangctgnnnannnngnnnnannnnatggannngntgnnannantntnnnaactntnnnantnccnnnannncttnnnggcngnanaanannnnananaatannnnctncaananaannnnnnngnggannnncnnnagngcatcntgnanantnnntnnnnnacnncannnannnannannannnnngnnnnatnntnnnnannnnnntnntnntnnnancannantnnnncnnnnnngncnnnnnntnnnnannnnnnannnannannnangnancnannnncnnnannnnntggnnnancnnnnnnnataaatataatatgaacacaggcaaaacaacaggacctgatgtaactgttactcctgaagaaataaagattaaggatgcatatacattcgttacatatcaattcttcttctcaggcgttgttgttgtggcaactactccatttgaagccccgcttgcatgtcaatatatacctgatttaaggggtgctgacataacggataaaggaaaagaagatgagcatggattgaaacaaccacacactgatgaagtcgagagaatgtgcaatcagatagactttaaatttcctgatctgaacattgcaaacaatgaaacattgcttgttaatacgcacgaacattatgttgcaccgggaagatttattaatcagctgccattacagggcgcagtaaaagcacatgtatataatantnntaannnannannannngannnntnctnntnnnntnnnnnngnnnnnnnnnnnnnanaanannanaannannntnntnannnnanannannnnntgnngnannnannnnncngcagnnnnnnnaanannntcnnnngnnnnannntnntnnnngnantattnnngnannannnnnnnnannagnantnnntnnnnnnncnnnnggnnnnnnnncannannnnnnntnnnnnnntnnntnnnnnnnnnnnnntnnnnnnatnntnnncnnnnnnnaanannnnntnnnnnnnnnnntnnnngnnnannnnnncntcnnnnnntnnnnncnnnncnnnnnnannnannannannnnntannnangannnnnnnnntgnnnnnnnnnnnatgannaatnntntngnnnnnnattatnnngnngannnnnnnnnnnnngnngaagaannannattannnnntnnnnannntnnnnnnnntnttgtnnnangntnntnnnnnnncnnnnnnngcnnnnnagnnnnnntnntagnnnannngatnnnnnntnananaannatnnnnncnnnnnnnnnnanannnnngntnnttntnnnnnnnnntnanncnnnnnnannannagnnnannnn

SEQ ID NO: 641 - DNA, 4000 bp, Escherichia coli
  misc_feature (68)..(68): n is a, c, g, or t
  misc_feature (95)..(95): n is a, c, g, or t
  misc_feature (143)..(143): n is a, c, g, or t
  misc_feature (202)..(202): n is a, c, g, or t
  misc_feature (1028)..(1028): n is a, c, g, or t
  misc_feature (1031)..(1031): n is a, c, g, or t
  misc_feature (1184)..(1184): n is a, c, g, or t
  misc_feature (1253)..(1253): n is a, c, g, or t
  misc_feature (1262)..(1262): n is a, c, g, or t
  misc_feature (1985)..(1985): n is a, c, g, or t
  misc_feature (2155)..(2155): n is a, c, g, or t
  misc_feature (2350)..(2350): n is a, c, g, or t
  misc_feature (2449)..(2449): n is a, c, g, or t
  misc_feature (2500)..(2500): n is a, c, g, or t
  misc_feature (2512)..(2512): n is a, c, g, or t
  misc_feature (2515)..(2515): n is a, c, g, or t
  misc_feature (2518)..(2518): n is a, c, g, or t
  misc_feature (2542)..(2542): n is a, c, g, or t
  misc_feature (2548)..(2548): n is a, c, g, or t
  misc_feature (2632)..(2632): n is a, c, g, or t
  misc_feature (2665)..(2665): n is a, c, g, or t
  misc_feature (2734)..(2734): n is a, c, g, or t
  misc_feature (2761)..(2761): n is a, c, g, or t
  misc_feature (2764)..(2764): n is a, c, g, or t
  misc_feature (2884)..(2884): n is a, c, g, or t
  misc_feature (2899)..(2899): n is a, c, g, or t
  misc_feature (2945)..(2945): n is a, c, g, or t
  misc_feature (3061)..(3061): n is a, c, g, or t
  misc_feature (3172)..(3172): n is a, c, g, or t
  misc_feature (3310)..(3310): n is a, c, g, or t
  misc_feature (3355)..(3355): n is a, c, g, or t
  misc_feature (3475)..(3475): n is a, c, g, or t
  misc_feature (3586)..(3586): n is a, c, g, or t
  misc_feature (3986)..(3986): n is a, c, g, or t
ggaacgctttgatagcccaatcgaagtaggctttccactcgctcttgcgcaatggcaatccctcgcgnatagctggctcgtctatctgaataacnttaatacctgctttttcgaggtctaccacttcgtcgcggattgctaangctatttgcaaacaagtttctgaacgaggttggtcatcgcgtacaaatgaccattgtangatagttacagggcctgtaagcataccttttactggcaatttagtaagcgattgtgcgtatttgctccaacgtacggtcattggctctgggcgcgaaatatcaccaaagataatcggtggttttacgcaacgtgaaccgtagctttgtacccaaccgaatttggtaaaggtatatcctttaagcaattcgccaaagtattccaccatatcgttacgctcaaactctccgtgtacgagtacatcgatattggtttcttcttggaaacggatagactcttcaatttctttttctaataacttatcgtattcagcttgagtaagttcgccttttttgaagcgagcacgccagctgcgcacctcgtctgtttgagggaatgacccaatagtagtggtagggaacgctggcaattttaacgcctcgtgttgtgctaccttacgctgactgaatggactgtggcgtacatcgtctttatcggtaatgttgcgtacgcgctcttttaccttattatcgtggataagcggagaggttttgcgggtttcagctgcttttttgttctcttcaaaaatagcttttacctcaggagttagctgtccgttagcaatagcttgcagggtggtaacctcttttactttttgtttagcaaaggctaaccactgtttgatttcaggggtaagtaccttttcgttgttttcgagctcgaggttgcaaggtgagtgcaatagcgagcaagaagtagctataagcagacgctcagccccgatagcttctttagctttttcaatcaatgctaatgagtgctcgaagttgtttttccagatattacgnccntctactaccccaagcgatagttttttatcggcaggaagcgctttaagcactttgtcgagttgagctgctgcacgtactaaatcgatgtggagaacattgaaaggcaatgatactgctaactcggtattattatcgagcgcaccgaagtaagtngtaaggataaactcggtagtagggaacttgcttcttagttcagcataaacttttttgtacacctctgcngctccctcnggaaggtcgagtacaaggtaaggctcatcgatttggatagttttagcccctgcatttaccaaactttctaccaactgtacgtatacaggcaataggcggtcagctaaatctaaacggttaaagccttgttctttttctttacctaacaacaagtaagtaactaaaccgataagaacaggcttggtatcgaaaccgtgctttttagccaagttatactcttgcaaaggtttgtttactaatatgcggaattcttgatttttagtaaattcgggtactatataatggtagttagtatcgaaccacttggtcatttccatagcggtgatatcgataccatctttctgataaccacgagctaaggcgtagtagcgctccaaatctctcaacttgtgaataggggcgaaacgctcagggatagcgtttacagtaaaggaaaagtcaagcatttggtcgtagaaagaaaagtcgttagaggggataagctctactcctgcttctctttgcaatgtccagttatgtacgcggatattttcagccaccgctaagagctcttcttctgatattttaccagcccagaaagactcattggcttttttaagttctcgtttctcaccgatacgaggatagcctaatacgttcgatttcatatagtatttgttatttgacggcaaaactacaatattttttttacctaccaaaataatatatagaaaaatttatggnagcgcaagaatatagtatttttttctgtttttgcctcgattattagttgtttattactttttaatatttagtatcctacggctgtatcatcgccacgaggatcggcaccaccctctaaagtgccatcgggttgtactaagatagcatctaccttgcctatgattacaaanttttcttcgcgcggcttatagcctttggctttgagatgggctatcacctctggggcaaagcctttgggctcgtacatcacatcatcgggcaaccattggtggtgaaagcgcggtttgctaaccgattgttgcatcgtcataccatactccgccacattgaggaaacactgcaacaccgatgtaatgatagttganccccctggggtgcctatcaccataaacagcttgccgtctttctctataatagtaggactcatagagcttagcatacgtttgttaggggcaatggcattnttttcagagcctaccaatccgtaggtattaggctcgcccggtttgatgctnaaatcgtccatntgnttnttgaggaaaaagcctccgcctttnacatanaccttactaccatagttagtattgagggtagtggttacagcaacggcattgccaaaacgatcgactatagagtaatgggtggtntcatcgctttcgtagccgactattttgccgtgngctatctcagttgatttgctagctttatcccacgaaaaactactcatacgctctttgaggtaatcgggngatagcagctgttgggtaggcactttnacnaaatcggcatcgcccatataataggctctgtcggcataagcacggcgttcggcttctaccaataattgaatatactgctcgccgttatgagggtactgacctatattataaggttctacnctcttgagtatctgngctaaacagatgcctccgcttgagggcaacggcatagaactaatgntataatctttataggtgaaggtaatgggcttgcgccattgggctcggtagtttctcaggtcgtctaaagagaggataccgccgagttcttgcacgtaagacactatgcgtttggcngtttcgccattataaaactcatagctaccattatcgcgtatgcgctctaaggtctgagcaagctcttcgtacttgaagcgttcgcctgctttccagccgttttcaaaaggngtaacataattattagcctgcttgatgagttcaacattcttattcatataagaattggcttgcaactcggtgataagcacccctttgcgcgccaaatcgatagcaggctgtataagttcgccaataggtagcgacccnaacttttggtacacctcgaaaattccggcaatagtacccggtacncctactgccagcgcgcccagcgtactcttatcggcaatgaccttgccgtttttgtctaaatacatatcgcggtgggctttggcaggtgctttttcgcgatagtctaaagcgcctctctcnccactgcctaagcggtataccataaagcctccgccgcctatattgccggcattggggtaggctactgctaaagccaattcggtagctatcatagcatcgaaggcattaccnccttttttgaggatagcaagccctatctgcgaggcttcttctttagcactcaccaccatagcgtgaggtgctaatacccctttttcggggtcaggttgttttttggcaggagaattttggcaactggccaacaaaactactgctgttaatactgaaaagatttttttgatcattttaatttagttacttttttatttaatttttgagtgtttttgttttatagcttataagtaaacaaataatagtgagtcgctagtgattagtatgctctttgatactaaccactaacgactaaaatttattgtgtattaattattgactaacgactgcctttactttatcggctgcttcttggaataaaatagctgaatgaacggctaagcctgaattgtctaatatntctttggcaagctc

SEQ ID NO: 642 - DNA, 4000 bp, Escherichia coli
  misc_feature (545)..(545): n is a, c, g, or t
  misc_feature (1987)..(1988): n is a, c, g, or t
ttgacagttcctatcgtcgcaactttgtcgtctgatacaaagctctttgcatgaacgaagccgggagtatactcataaatcttgatgccgccagtcagcaacacctgataaaagctccgagacatacggaaaatcagcttcttatcagggatgccgggcataatgatccgcacgtctacaccacgttgagcagcggaaatcattgcatccatcaagtcatcgccaagcataagatacggtgtaaaaaaccatgcgtaatccgtgctttgagaaagcaagtcaataaagagctgattactggtagcttcatggttaaggggcgaatcgtagtaactaagcacataaccatcaaatgtgtgcggcggcgcaggataccttttgggatatgtgggcattgcaagctgtcctgcttctttttccagcgaaaatgcgttccaaaaggtcaagaacatatgggtaaaattttttactggctcaccagtaatccgaaagcctgtgtccttccagtgtccatagggatgttccaaattgatataccgatctgntaagttgatacctccgctataagcaacttcgttgtcaataatcagcattttgcgatgatcgcgatagtttgcagttccttttaaggcaaggaaaggattaaaaggaatacatggaatgcctttctttttcagttcacggacattactgaaattgaacgaagaaatactgccaagatcatcgtatatcacacgtacatcaacgccctgctccatttttacttccagttcgttcacgattgcgtcccacatatgccccggctcaataatgaagtattctacgtaaatcgagtttcttgcatttttcaaatcggcaagcatatcagggaacatattatcgcccaacggatagtaacgaacctgctcaactgcacacatcggatattgcgttttttcttccagccaccgcactgtttgccccatgcgtttttcgccgtcaaagggcgcttcttttattggaagaggctgcggattgcaactcttttgaacttgctgcaagcgcctttttagagggcgggccgtccgtttatttccaaagagcagatatagtaacgctcctaccaaaggtagtgacagaataaccagcagccaaagcaatttataagcggtttcatctctctttataataataaataccaccaagaaaaacgctgcaacggaaagcagtgacacaataatcggtgcgtaaggggtcagccatttcatcaacagcaaaagccagagcgattgtaaagccaccgctggaataattgttagaatgcgtcgaatgattttccccatatgtttaccctcctctatgctatttctcctccgaagatgcttcccaatcgcaaactatttgtgccatttcctgtggggtttctttatagcctcgtaatacccacgcattcataagcccaaacaatccatatgtaataaattggataaagtagtgcgttttggcatcggcattagcgacaatggatgccgcttcttgtaaatagaagtttagaatcacatattggcgatcagctgagtagagcagatcacaaataggacgagtggaaaggcaaaattcaaaaaacagcctgatgccgtcataactaccagtggcgaagttggtagcaccgtgttcgtcggaaaagcgcttccacagacatgtgattttgaaagacagaacttcatctttacttttgaaataacggaaataagtggagcgacctacatctgccttggcagtcatctcctcaatactgattttttcaatgggtttttctttcattagttccagcaacgctgtacccatacattctttcagatagtctgttgtagccgttgtccttcgcataagaaacgtctcctttaattgcgtatcattgaaacaaggattgtcatttgttccactttcgctcggactattgacaacgcctgcttctgtgatattctagcatctatgatactatcgnntcatttatactatcatttgttatttgccctgtcaagctaaaatgcgagtacgacgagcagaaaggaaaactatgggtacgattttttcccgtgtaaaactcagcggaaagcatgtggccgccctcttggcgctgatgctgctctccgctgtgacagccatgctgctgcctactgccctggccagtatgattgacatcggagtggccggagaaaaccgaaacaccatcctaatcattgcggcggtgatggcaaccctggccattctgggctgtcttttcaacatggcagccacggtgctgtccgccaaggtgtccactaaatttgccgctgatttgcggcgtgagatattccatcaggtgcaagatttttccgccgctgaaatggagcggtttggcaccgctagtctagtgacccgcagtacctccgatgtgaccaacatccaaatgtttctctcattgctgttgcggctgggggtgactgcaccgctgatggcggtggctgggctggtactctcttctctgaccggcggcgaactcagttccgtgctgagcttggccattcccgccctcatcattggcgtaggtgtcattctgatttttgtttcccgctactcggtgaccctgcggcagcggattgaccgactgaacaagatctttctggaaacactggagggggtacgggtgattcgggctttcaatcggcaagggaaagaaatggaaaggttttcccaagccaatggagaactggcctccatgaccattctctctgggcgggtgaccgcactgctgatgccggtgattcaggtgatctttggtgtgactacagcagcggtcatgggcatgggttcctggtatgtgtccgccggggagatggcagtgggtgacctggtggccaacagccagtatatcagcatgatccttgccgctatcatgatgctggcattggtcattatgctctttcctgtgtcctatgcctgcgctaagcgcatcgcagaagtgctgaataccgagagttccatcaaggacggcagatacagtgccgccttgcgcaaaggccgcgcctgtgtggcctttgaccatgtgacctttacctatcctggggcggacgaaccagtgttgaaggatgttagcttcgagtgccgggccggggaggtcaccgccattatcgggcgcaccggttgcggcaagtccagcatcctcaagttgatcccgcggctttacgacgccacggtaggccatgtctatgtggacgatatgaatgtaaaacaatataaattgaacgagctgcgggatctgatcggctatatcccccagaagaatgtactcttttccggagacgtggcctccaacctgcgctttggagatcaggacagcagtgaggaacagtggcggcaagcggcctacatcgcctgcgccgacgagttcatcgaacagaagccggacggctaccacgccgaaatcgctcaaggcggcaccaatttgtccggcggccagcgccaacgcatggctattgctcgggctgtcgtaaaaaaaccagaaatctacctgtttgatgacagcttttccgccttggatgtgaaaacagataaaacactccgcatgcgcctgcgggagagcatgggggattccaccatgctcattgtggctcagcgggtgggttctatcctggatgctgaccgtatcttggtgatggaggacggacagatcgtggggagaggcaagcaccgggaactgctacatacatgtccgctctaccgggagattgctgaattgcagctgggagaggaggaagtgaaacatgaactggaatgcgtttaaacggctgttccactatctgggacggtacaagctccgcctgattctagtgatgatcgccgctgtcctgagtaccctgtttaccgttttgaccccagcggtgacgggcggcatcacctcggaactgtacgatggcgtggcaagcggctccttcgactgggaaacgatcgtctggctgctcgtgacgctgatagccct

SEQ ID NO: 643 - DNA, 4000 bp, Escherichia coli
  misc_feature (1)..(1360): n is a, c, g, or t
  misc_feature (1376)..(1378): n is a, c, g, or t
  misc_feature (1380)..(1380): n is a, c, g, or t
  misc_feature (1382)..(1382): n is a, c, g, or t
  misc_feature (1401)..(1401): n is a, c, g, or t
  misc_feature (1482)..(1482): n is a, c, g, or t
  misc_feature (1487)..(1487): n is a, c, g, or t
  misc_feature (1505)..(1506): n is a, c, g, or t
  misc_feature (1510)..(1510): n is a, c, g, or t
  misc_feature (1528)..(1528): n is a, c, g, or t
  misc_feature (1531)..(1532): n is a, c, g, or t
  misc_feature (1536)..(1538): n is a, c, g, or t
  misc_feature (1541)..(1542): n is a, c, g, or t
  misc_feature (1544)..(1545): n is a, c, g, or t
  misc_feature (1549)..(1549): n is a, c, g, or t
  misc_feature (1553)..(1553): n is a, c, g, or t
  misc_feature (1555)..(1557): n is a, c, g, or t
  misc_feature (1560)..(1560): n is a, c, g, or t
  misc_feature (1567)..(1572): n is a, c, g, or t
  misc_feature (1576)..(1577): n is a, c, g, or t
  misc_feature (1583)..(1592): n is a, c, g, or t
  misc_feature (1595)..(1596): n is a, c, g, or t
  misc_feature (1610)..(1610): n is a, c, g, or t
  misc_feature (1613)..(1613): n is a, c, g, or t
  misc_feature (1616)..(1618): n is a, c, g, or t
  misc_feature (1621)..(1621): n is a, c, g, or t
  misc_feature (1627)..(1627): n is a, c, g, or t
  misc_feature (1630)..(1630): n is a, c, g, or t
  misc_feature (1632)..(1634): n is a, c, g, or t
  misc_feature (1636)..(1636): n is a, c, g, or t
  misc_feature (1646)..(1646): n is a, c, g, or t
  misc_feature (1840)..(1840): n is a, c, g, or t
  misc_feature (1850)..(1850): n is a, c, g, or t
  misc_feature (1926)..(1926): n is a, c, g, or t
  misc_feature (1984)..(1985): n is a, c, g, or t
  misc_feature (1991)..(1992): n is a, c, g, or t
  misc_feature (2226)..(2226): n is a, c, g, or t
  misc_feature (2711)..(2711): n is a, c, g, or t
  misc_feature (3158)..(3158): n is a, c, g, or t
  misc_feature (3171)..(3171): n is a, c, g, or t
  misc_feature (3674)..(3674): n is a, c, g, or t
  misc_feature (3710)..(3710): n is a, c, g, or t
nnnnnnnnnnnnnnnnnnnnnnnnnnnnnnnnnnnnnnnnnnnnnnnnnnnnnnnnnnnnnnnnnnnnnnnnnnnnnnnnnnnnnnnnnnnnnnnnnnnnnnnnnnnnnnnnnnnnnnnnnnnnnnnnnnnnnnnnnnnnnnnnnnnnnnnnnnnnnnnnnnnnnnnnnnnnnnnnnnnnnnnnnnnnnnnnnnnnnnnnnnnnnnnnnnnnnnnnnnnnnnnnnnnnnnnnnnnnnnnnnnnnnnnnnnnnnnnnnnnnnnnnnnnnnnnnnnnnnnnnnnnnnnnnnnnnnnnnnnnnnnnnnnnnnnnnnnnnnnnnnnnnnnnnnnnnnnnnnnnnnnnnnnnnnnnnnnnnnnnnnnnnnnnnnnnnnnnnnnnnnnnnnnnnnnnnnnnnnnnnnnnnnnnnnnnnnnnnnnnnnnnnnnnnnnnnnnnnnnnnnnnnnnnnnnnnnnnnnnnnnnnnnnnnnnnnnnnnnnnnnnnnnnnnnnnnnnnnnnnnnnnnnnnnnnnnnnnnnnnnnnnnnnnnnnnnnnnnnnnnnnnnnnnnnnnnnnnnnnnnnnnnnnnnnnnnnnnnnnnnnnnnnnnnnnnnnnnnnnnnnnnnnnnnnnnnnnnnnnnnnnnnnnnnnnnnnnnnnnnnnnnnnnnnnnnnnnnnnnnnnnnnnnnnnnnnnnnnnnnnnnnnnnnnnnnnnnnnnnnnnnnnnnnnnnnnnnnnnnnnnnnnnnnnnnnnnnnnnnnnnnnnnnnnnnnnnnnnnnnnnnnnnnnnnnnnnnnnnnnnnnnnnnnnnnnnnnnnnnnnnnnnnnnnnnnnnnnnnnnnnnnnnnnnnnnnnnnnnnnnnnnnnnnnnnnnnnnnnnnnnnnnnnnnnnnnnnnnnnnnnnnnnnnnnnnnnnnnnnnnnnnnnnnnnnnnnnnnnnnnnnnnnnnnnnnnnnnnnnnnnnnnnnnnnnnnnnnnnnnnnnnnnnnnnnnnnnnnnnnnnnnnnnnnnnnnnnnnnnnnnnnnnnnnnnnnnnnnnnnnnnnnnnnnnnnnnnnnnnnnnnnnnnnnnnnnnnnnnnnnnnnnnnnnnnnnnnnnnnnnnnnnnnnnnnnnnnnnnnnnnnnnnnnnnnnnnnnnnnnnnnnnnnnnnnnnnnnnnnnnnnnnnnnnnnnnnnnnnnnnnnnnnnnnnnnnnnnnnnnnnnnnnnnnnnnnnnnnnnnnnnnnnnnnnnnnnnnnnnnnnnnnnnnnnnnnnnnnnnnnnnnnnnnnnnnnnnnnnnnnnnnnnnnnnnnnnnnnnnnnnnnnnnnnnnnnnnnnnnnnnnnnnnnnnnnnnnnnnnnnnnnnnnnnnnnnnnnnnnnnnnnnnnnnnnnnnnnnnnnnggggggggtatagagnnncnanaaactttacaactttaaantctttattaaattaataattaataattttatcatttaattaaacttattatcagtctcatttattaccaccatttccttanggtantttaattttaccgcaganntacntagatttcaagaagtttnggnnatannnccnnannaaantttnannnttnaaaattnnnnnntttnnaaaaannnnnnnnnnttnnaattaatccctttnttnttnnnatntttttnaanannnanttatttttantttttataattttattgagatgtataggtgttattatatcaacataatataggtaaaggaaaatctttacaatttaaaaaagataattttaatattttaataattttattatttttattatttttaattttgtattaattattaaattttataaattatagtatcagtaataaagatttgacatttatttttancccatttaantcctagttaaattaacatattttatattaattaactgaaattaatcgctatagatacaagaattatttattatttnattaattttatgcttatttattgattttatttatattttaccgcatattttccaaggnntataannctcgaaaacctgatgcgtaaaattaggggacctcatagttatgttgaattaagaatattctaaactctaaatacttgaagttacctaacataccataatgggtatactattactactagtagaggtgcataaatgccctggataaaataattagtttgcttatataaagagtaatttaattaggtttatactattaaaaatttatttaataataaaatacaaatgatttatagntaattaattattacttaaggaagaatgggtataaaatatttatataatatttatataatattaccttaactaattagctaaataaatttaaaaaaggtacacaacataagtagatgatgaaccaatgtaagagtagggatagtaaaataaagatttataagtatttcaacaataataagctacccttaaatagttattacggaagatgtatattacattaataaattttattataatacattatggtattaatatatttaaaggtatattatctatatttattataaataattatacaaaaatctttaataagtttgtaaatagattgatataatcttaagattttatttttaatatagttgatatatggattattacctttatcatctataaattttatattatctatattatttatattttgatgaatatttgttggtggtatataagaaactattgatttaaagtttatatcgtaatgatcntttatatctattatcttagattttaaaccttgtagattaatagatttatttacaatatttatatttaaatctttccatactacctggaatgataaaccttctgttttaactgattcacctgataataataatttgaatttatcataatttaaagatgtgggttttaccccactcgatttaataactacttcattatttattgattttagtgcgtataatttttttctaataaaaataccttcttctatctgatgttctagcttcatttgtcctaactctttaccaataatatttaaaggtaattctttagataaaaccacactatcagtatcagacataatacaaggatttccaggtatatttttatatttatttattgacattctagcgtaagctgatatagctgcagaaatttgaacagcagatggtactcctctttgtttatanagagaattatcgntaactttctgttcgtcaggatatttaagtagatttcttaatgattcatgtattttactactatatttaattaaaaatttaccattatctaattcagcaaacatagagtaattaaaattattagtaatcttcttactatcctctttattaacaattttgatatttgaagtaatatccttcataccaaatttaccatataaagaatttaatagcaatttacttaaagctttttcaacaggatctttagtattctttttaatattatatatacttgatacataatttttgaatacgtcttttcctctttcaaatttatatccatattgaactttaatggtgtaaccatctttaatagcttctttaatttcttcactgaatatcattctactaaaactacctcttggacaattgacatcagatgatttatcatctctattttgaatataagctactcttaatctatcactttcaggtgctgtgatttctccgtatacaaatccaaantaattatttaaatctgtatcagtactgaaaataggnttaccaataggcatatcattcaacatagcaaaaggatattgagagttcatatcatagtagaaacctttattcatcttattaacaaatacattaacattcccaccaaaataagctgatctaatatctttttcaacaatacctctaatcattttaattttatcatcattagaatagtattttgaagtaaagatagctaccgctaatttaggggctgtaacaaatttagtaatatttaaagagtataaattaaatattttatcattaaacttagtcataacttctaaaagtcc

SEQ ID NO: 644 - DNA, 4000 bp, Escherichia coli
  misc_feature (420)..(420): n is a, c, g, or t
  misc_feature (453)..(453): n is a, c, g, or t
  misc_feature (492)..(492): n is a, c, g, or t
  misc_feature (1074)..(1074): n is a, c, g, or t
  misc_feature (1167)..(1167): n is a, c, g, or t
  misc_feature (1281)..(1281): n is a, c, g, or t
  misc_feature (1353)..(1353): n is a, c, g, or t
  misc_feature (1389)..(1389): n is a, c, g, or t
  misc_feature (2015)..(2015): n is a, c, g, or t
  misc_feature (2223)..(2223): n is a, c, g, or t
  misc_feature (2246)..(2246): n is a, c, g, or t
  misc_feature (2263)..(2263): n is a, c, g, or t
  misc_feature (2274)..(2274): n is a, c, g, or t
  misc_feature (2311)..(2311): n is a, c, g, or t
  misc_feature (2351)..(2351): n is a, c, g, or t
  misc_feature (2381)..(2381): n is a, c, g, or t
  misc_feature (2405)..(2405): n is a, c, g, or t
  misc_feature (2497)..(2497): n is a, c, g, or t
  misc_feature (2573)..(2573): n is a, c, g, or t
  misc_feature (3269)..(3269): n is a, c, g, or t
  misc_feature (3278)..(3278): n is a, c, g, or t
  misc_feature (3453)..(3453): n is a, c, g, or t
  misc_feature (3476)..(3476): n is a, c, g, or t
  misc_feature (3556)..(3557): n is a, c, g, or t
  misc_feature (3559)..(3561): n is a, c, g, or t
  misc_feature (3565)..(3566): n is a, c, g, or t
  misc_feature (3572)..(3572): n is a, c, g, or t
  misc_feature (3574)..(3576): n is a, c, g, or t
  misc_feature (3580)..(3580): n is a, c, g, or t
  misc_feature (3586)..(3593): n is a, c, g, or t
  misc_feature (3595)..(3596): n is a, c, g, or t
  misc_feature (3598)..(3601): n is a, c, g, or t
  misc_feature (3604)..(3604): n is a, c, g, or t
  misc_feature (3608)..(3608): n is a, c, g, or t
  misc_feature (3613)..(3613): n is a, c, g, or t
  misc_feature (3615)..(3617): n is a, c, g, or t
  misc_feature (3624)..(3624): n is a, c, g, or t
  misc_feature (3634)..(3636): n is a, c, g, or t
  misc_feature (3638)..(3638): n is a, c, g, or t
  misc_feature (3640)..(3648): n is a, c, g, or t
  misc_feature (3653)..(3653): n is a, c, g, or t
  misc_feature (3655)..(3655): n is a, c, g, or t
  misc_feature (3660)..(3661): n is a, c, g, or t
  misc_feature (3663)..(3663): n is a, c, g, or t
  misc_feature (3665)..(3665): n is a, c, g, or t
  misc_feature (3668)..(3668): n is a, c, g, or t
  misc_feature (3671)..(3673): n is a, c, g, or t
  misc_feature (3675)..(3675): n is a, c, g, or t
  misc_feature (3678)..(3678): n is a, c, g, or t
  misc_feature (3683)..(3685): n is a, c, g, or t
  misc_feature (3688)..(3688): n is a, c, g, or t
  misc_feature (3691)..(3691): n is a, c, g, or t
  misc_feature (3693)..(3695): n is a, c, g, or t
  misc_feature (3698)..(3699): n is a, c, g, or t
  misc_feature (3702)..(3702): n is a, c, g, or t
  misc_feature (3706)..(3708): n is a, c, g, or t
  misc_feature (3713)..(3714): n is a, c, g, or t
  misc_feature (3716)..(3723): n is a, c, g, or t
  misc_feature (3726)..(3729): n is a, c, g, or t
  misc_feature (3731)..(3731): n is a, c, g, or t
  misc_feature (3733)..(3742): n is a, c, g, or t
  misc_feature (3747)..(3748): n is a, c, g, or t
  misc_feature (3751)..(3754): n is a, c, g, or t
  misc_feature (3756)..(3761): n is a, c, g, or t
  misc_feature (3763)..(3766): n is a, c, g, or t
  misc_feature (3768)..(3789): n is a, c, g, or t
  misc_feature (3791)..(3793): n is a, c, g, or t
  misc_feature (3795)..(3808): n is a, c, g, or t
  misc_feature (3810)..(3810): n is a, c, g, or t
  misc_feature (3812)..(3827): n is a, c, g, or t
  misc_feature (3829)..(3831): n is a, c, g, or t
  misc_feature (3833)..(3846): n is a, c, g, or t
  misc_feature (3849)..(3849): n is a, c, g, or t
  misc_feature (3851)..(3853): n is a, c, g, or t
  misc_feature (3856)..(3866): n is a, c, g, or t
  misc_feature (3868)..(3875): n is a, c, g, or t
  misc_feature (3877)..(3883): n is a, c, g, or t
  misc_feature (3885)..(3885): n is a, c, g, or t
  misc_feature (3888)..(3888): n is a, c, g, or t
  misc_feature (3890)..(3896): n is a, c, g, or t
  misc_feature (3898)..(3900): n is a, c, g, or t
  misc_feature (3903)..(3904): n is a, c, g, or t
  misc_feature (3906)..(3907): n is a, c, g, or t
  misc_feature (3911)..(3912): n is a, c, g, or t
  misc_feature (3916)..(3919): n is a, c, g, or t
  misc_feature (3921)..(3928): n is a, c, g, or t
  misc_feature (3930)..(3938): n is a, c, g, or t
  misc_feature (3940)..(3941): n is a, c, g, or t
  misc_feature (3943)..(3949): n is a, c, g, or t
  misc_feature (3953)..(3976): n is a, c, g, or t
  misc_feature (3979)..(3982): n is a, c, g, or t
  misc_feature (3984)..(3986): n is a, c, g, or t
  misc_feature (3989)..(3994): n is a, c, g, or t
  misc_feature (3997)..(4000): n is a, c, g, or t
gaggaagaagagtacgaacccgaaaacaatgaagactgtcactgtgaagatgacgactgccattgtcacgatcatggctgccattgccatgatgatgaataaaagaatatgattttaaaaagaaccataagcaaagaagaggtgaaggagatgcccaaagcagcatttcccggacggattcatgtaatacagactgaaagtgaggcgcaaaaagcggtggcttatctgcaatcccaagccatcttgggaatcgacagcgagacacgtccctcattcaccaagggacattctcataaagtagcattacttcagatttcatctgacgagtgttgctttctgtttcgcctgaacatgaccggcctaacccaacctatcatagaactacttgaagatccgaaagtaatcaaagtgggcctttcnctaaaagacgacttcatgatgttacacaaacgngcccctttcaatcaacaggcatgcattgagttacaagantacgtccgtcctttcggcattcaggataagagcctgcaaaagatatacggtatcttgtttagtgagaaaatctcaaaatcacagcgtctttctaattgggaagcagatgtactgacggatgctcaaaagcaatacgcagctacagatgcttgggcctgcctcaacatatatcacttattggaggaactgaaacgaacaggaaactacgaattggctccggaagaggaagccacagagaaagtaaaagtaggttcagatcaacaataaaagtaaaaacaacataataaatttatgcataaagtatatcttaaacccggcaaagaagactcattgaaacggttccacccctggattttttctggtgccatcgcccacttcgacggcgaacccgaggaaggtgaagtagtggaagtgtacacctcaaaaaaagaatttattgccaaagggcatttccagatcggaagtattgctgtacgtgtactttcgttcaaacaagaagagattaaccacgatttctggaaacacaaattggaagtggcctacgacatgcgacgcagtattggcatcgctaccaatccgacnaacaatacctatcgcctggtacatggagaaggcgataatctgcccggactcgttatcgatgtttatgcccggactgctgtgatgcaggcacantctgcaggaatgcatgtagaccgtatggccattgccgaagctttgtccgaagttatgggtgatcagattgaaaatatctattataaatcagaaacgaccctcccatttaaagcngaccttttcccggagaacggtttccttaaaggaggaagcagcgacaacatcgctcaggaatatgggctgaanttccatgtagactggctgaagggacaaaaaacaggnttttttgtagaccagcgtgagaatcgtgctctactggagcgttatgccaaggggcggtcggtattaaatatgttctgttataccggaggcttttccttttacgccatgcgtggaggtgccaaacaggtgcactcggtagacagttctgcaaaagccatcgatctgactaataaaaatgtagaattaaacttcccgggagatacccgtcatgcagcctttgctgaagatgctttcaaatatctcgaccgtatgggtgaccagtacgacttgatcattcttgatcctccggcatttgccaaacataaggatgcgctgcgcaatgcccttcagggctaccgcaagctcaatgccaaagcatttgagaaaatcaaaccgggtggtatcttattcaccttctcatgttcgcaagtagtgaccaaagataatttccgtactgctgtatttactgctgccgccatgtcgggcagaagtgtacgtatactacatcagttgacccagcccgcagaccatccggtgaacatctatcacccggaaggggaatatctcaaaggattggtgctctatgtagaataatcattccataagcataaaagcagcagcctcaaagttaattagagttaacaaanagaagattttcatcaaatcattatgttatataacataaatccctttatctttgcactgtgtttttcatggtattagatttaaggttaataaagattggctgtccgggaggatagccttttttttatttgtatatatgaagagagaatagattactgcgggatcaatgaataaacttagaaataaagatagatattcagccctttaccncctccaatttattcattgactcnatttggttaacaatccntctaataatgnaaaagaaccgtcctgcagcaggtggtggatgacctgnttctttaattaaataagcagtaacctctaccttttatttnttttgttttactaacataatcaccggattntcttcttcattcaacctagaggcnatttctttcaatttaccatctttcagttggtctttcttataaatttcaacaagtcgggctgcatttagacttgtgacgtcttcaatttcacnattaattggtttcgctgtcatagccactgttcttttgtccacatagtcatcattgtatatggtaacttgaaatacngccttttcttctttgtcatacaccagttcatcagcatagaatccgttgcccttttcaaagttaaatacatttttaacggcttccataaagtaataacggtcggtatggatacccatataaagaaaaacttccggttccatggtatgtgcagaaggagttcttacaacaaaaggacttaatgtaccatccgacgcatagttatacaatgtatcagccgatgtatccataagtgtacatttcccgttactcaggcgtatctgataagaataatttgctataaacctatctccatcattcacaattggtgtatcaatcgttttgaaaggaataaaaatatcacgggtgatacttccatcctgttttgataggataatatggtatgatttggttctatcctctcctttactgtgataatctgacatatcatagcaaatcaaattatctttgtcataatcgaaaatagatgaaacttcccgatcaagactcaaacaccgtttgaactttccataaagatcatacactaagattttatttcccggtgactttacgaatatttcaccattgttttcatcaagaataatctcattaatcctcgcatattcttctgctccttgcccccgacgatttatcttcctcactcccttaccggtttttctgtcaaaaataaaaatatccccatcattattcctatttgtngccaatatntattcttttcccacatcctgcaccagaccttgtgtaagaaactcgtcagtggtctccaacgcaacatattctacatccataaagtcctgaagaatcaattcttttttaggataacttttcgaaacgtcaacaatgattaaatcattgtttgactgtttattttctccacaccccnctaataccaccaacagaatgacngctaaaatcgtttttgtttgtttcatttcagttattgtttatttgataaagaagaacctgtttagagcctgtaaaaaaanngnnnaaanntttttnannnaaantttccnnnnnnnncnnannnnttntttntttgnannnaccaaantttaaaaaannnanannnnnnnnnttttnangaaanngngnggnaannnanaanaaaannnttnaancnnnaannaanaaannnaaaannannnnnnnnaannnntnannnnnnnnnnttttnnttnnnnannnnnngnnnncnnnnnnnnnnnnnnnnnnnnnncnnncnnnnnnnnnnnnnngntnnnnnnnnnnnnnnnnannngnnnnnnnnnnnnnnttntnnnttnnnnnnnnnnnannnnnnnnannnnnnntnttncnnnnnnnannnaannannaaannaaannnntnnnnnnnntnnnnnnnnncnntnnnnnnnaaannnnnnnnnnnnnnnnnnnnnnnnttnnnncnnnccnnnnnnccnnnn

SEQ ID NO: 645 - DNA, 4000 bp, Escherichia coli
  misc_feature (1)..(736): n is a, c, g, or t
  misc_feature (1405)..(1406): n is a, c, g, or t
  misc_feature (1409)..(1410): n is a, c, g, or t
  misc_feature (1412)..(1412): n is a, c, g, or t
  misc_feature (1419)..(1422): n is a, c, g, or t
  misc_feature (1428)..(1431): n is a, c, g, or t
  misc_feature (1434)..(1435): n is a, c, g, or t
  misc_feature (1438)..(1438): n is a, c, g, or t
  misc_feature (1441)..(1442): n is a, c, g, or t
  misc_feature (1445)..(1455): n is a, c, g, or t
  misc_feature (1460)..(1469): n is a, c, g, or t
  misc_feature (1473)..(1474): n is a, c, g, or t
  misc_feature (1477)..(1479): n is a, c, g, or t
  misc_feature (1484)..(1486): n is a, c, g, or t
  misc_feature (1493)..(1495): n is a, c, g, or t
  misc_feature (1498)..(1498): n is a, c, g, or t
  misc_feature (1501)..(1506): n is a, c, g, or t
  misc_feature (1509)..(1522): n is a, c, g, or t
  misc_feature (1525)..(1531): n is a, c, g, or t
  misc_feature (1534)..(1542): n is a, c, g, or t
  misc_feature (1546)..(1554): n is a, c, g, or t
  misc_feature (1557)..(1558): n is a, c, g, or t
  misc_feature (1562)..(1570): n is a, c, g, or t
  misc_feature (1573)..(1573): n is a, c, g, or t
  misc_feature (1578)..(1585): n is a, c, g, or t
  misc_feature (1589)..(1592): n is a, c, g, or t
  misc_feature (1595)..(1596): n is a, c, g, or t
  misc_feature (1600)..(1600): n is a, c, g, or t
  misc_feature (1603)..(1603): n is a, c, g, or t
  misc_feature (1607)..(1610): n is a, c, g, or t
  misc_feature (1614)..(1632): n is a, c, g, or t
  misc_feature (1635)..(1643): n is a, c, g, or t
  misc_feature (1646)..(1647): n is a, c, g, or t
  misc_feature (1650)..(1652): n is a, c, g, or t
  misc_feature (1655)..(1656): n is a, c, g, or t
  misc_feature (1663)..(1666): n is a, c, g, or t
  misc_feature (1669)..(1673): n is a, c, g, or t
  misc_feature (1678)..(1681): n is a, c, g, or t
  misc_feature (1683)..(1686): n is a, c, g, or t
  misc_feature (1689)..(1691): n is a, c, g, or t
  misc_feature (1694)..(1705): n is a, c, g, or t
  misc_feature (1710)..(1723): n is a, c, g, or t
  misc_feature (1726)..(1731): n is a, c, g, or t
  misc_feature (1733)..(1735): n is a, c, g, or t
  misc_feature (1738)..(1738): n is a, c, g, or t
  misc_feature (1741)..(1742): n is a, c, g, or t
  misc_feature (1746)..(1751): n is a, c, g, or t
  misc_feature (1753)..(1754): n is a, c, g, or t
  misc_feature (1757)..(1759): n is a, c, g, or t
  misc_feature (1764)..(1764): n is a, c, g, or t
  misc_feature (1768)..(1774): n is a, c, g, or t
  misc_feature (1785)..(1788): n is a, c, g, or t
  misc_feature (1791)..(1799): n is a, c, g, or t
  misc_feature (1802)..(1803): n is a, c, g, or t
  misc_feature (1986)..(1986): n is a, c, g, or t
nnnnnnnnnnnnnnnnnnnnnnnnnnnnnnnnnnnnnnnnnnnnnnnnnnnnnnnnnnnnnnnnnnnnnnnnnnnnnnnnnnnnnnnnnnnnnnnnnnnnnnnnnnnnnnnnnnnnnnnnnnnnnnnnnnnnnnnnnnnnnnnnnnnnnnnnnnnnnnnnnnnnnnnnnnnnnnnnnnnnnnnnnnnnnnnnnnnnnnnnnnnnnnnnnnnnnnnnnnnnnnnnnnnnnnnnnnnnnnnnnnnnnnnnnnnnnnnnnnnnnnnnnnnnnnnnnnnnnnnnnnnnnnnnnnnnnnnnnnnnnnnnnnnnnnnnnnnnnnnnnnnnnnnnnnnnnnnnnnnnnnnnnnnnnnnnnnnnnnnnnnnnnnnnnnnnnnnnnnnnnnnnnnnnnnnnnnnnnnnnnnnnnnnnnnnnnnnnnnnnnnnnnnnnnnnnnnnnnnnnnnnnnnnnnnnnnnnnnnnnnnnnnnnnnnnnnnnnnnnnnnnnnnnnnnnnnnnnnnnnnnnnnnnnnnnnnnnnnnnnnnnnnnnnnnnnnnnnnnnnnnnnnnnnnnnnnnnnnnnnnnnnnnnnnnnnnnnnnnnnnnnnnnnnnnnnnnnnnnnnnnnnnnnnnnnnnnnnnnnnnnnnnnnnnnnnnnnnnnnnnnnnnnnnnnnnnnnnnnnnnnnnnnnnnnnnnnnnnnnnnnnnnnnnnnnnnnnnnnnnnnnnnnnnnnnnnnnnnnnnnnnnnnnnnnnnnnnncgatgcttctctcgcgatcgtcgccgggacgcgggagacgcgcgtcggcgacggcgacgaagaagccggcggaaggggtcgcgccgcggacgagcgccgccgcgcgcccatctccgtcaaggcgccgccgctgctgaaggaacaaatttcgcgtctctcggaagccgagcagcgaaaagtgctcggacgttggaacgcgagactccggggattgaagcggcgcgtcgaagacatgtcgcatcagtttccgacgtcctcgctcgtgctcgtgttcaccaagccgttcagatcgaaggatagacgcgggaaatggtgcgtcgttcgcgatgacgacgcgcggttcgtcgcgcgcgccgctcgatgccacgcaacagaggactgacgttcgatggcgcatcgtccgtctgattcgcagggcggaggaagaatttctcgcgagagggccgattacgtcttcgcgcaccaatcgccccgctgacgccgcggacggctcgctgtcgggattgcaactactccgacgaaccgtggcggaaattttaggtcatagcatgaacgccacgcagctaaagcgcggtgcgatcgacgaactcgcgttggagcggtcatacgagaatgagcgtcgcgtcgccgacgaggccgcgcgcggcgacacgctggaaggattgttcnnagnncnaaggaannnnttcccnnnnaannccnttnnttnnnnnnnnnnnttttnnnnnnnnnnaaannggnnnaaaannngggaaannnggnggnnnnnnaannnnnnnnnnnnnnggnnnnnnnttnnnnnnnnngggnnnnnnnnnggnncccnnnnnnnnnggnggaannnnnnnntttnnnnaannaaanggngggnnnncccnnnnnnnnnnnnnnnnnnnttnnnnnnnnnttnnccnnnccnnttaaaannnnaannnnnccggnnnncnnnnaannnccnnnnnnnnnnnnccaannnnnnnnnnnnnnggnnnnnntnnnaanaanntttnnnnnntnnaannnaaaanaaannnnnnnccaaggaattnnnnaannnnnnnnnccnnaaacgtccggcgcgtgagatgtaatacagttgttgtcctaaatgcgtaccactcgattgactcggcgacaaaaaaagtggagctgccaagtttcgatctcggtacctcgcgcatgctaagcgcgcgctctaccaattgagctacagcccctttgtatacagggacgatgtaacaggacacctngaccaaacctcggccatggtgactctgcgaaagctatgggtcaattttgggcaaaaggggaacggcgcactcgcgacgagtcaggtctcgtcgacggattccccacggtacaccgcgtcgcgcgcgcgcgcgtccgtcgatcgacgcgtcgacatggacgctcgagcgcacggcgacgtcgccgagtcgtggccgacgcgtccacagcgcgatttcgacgcgagcatgcggtgtgggatctgtggtgatttctacgagttgccggtgagctttcgaggatgtcatcacgcgttttgctcggattgcgtgcgcagagcgttgccggtgatggagaagtgtccgacgtgtcgagaaccggccgaggagagggatctcgtgccgaataaggcgttggaacacgcggtggagtgttataagagggtgagagatgagttgttgggaacgacgctcgcggcgagagacgcgcgggcacgaggggaccgggaagggacgacgactacggtggggaggacgggatcgtcggctcacgcgcggtcgttgattgaggctgatgaaccgtctcgtccggtgattgagcgagacgatgagttcgtggacgacgacgacaacgacgacgacgaggacgctgaaaacgacgccatcgtcctggacgcggaggaggaagaattcgcgaattgtccggtgtgcgattcgaaaattttgatcaagaatatgaacgtacatttgaactcgtgcttggtgaagaatgagcgtttgtcgtcgccgggacggcaacagagcaaacgcgcgaggacggcggcgacggcgactttgtcggagatggtaccgaaacgtctgcccaagctcgcgtatcacgtgttcgcgctgaacaaactgcgagagatgtgtaaaaacgtgggattaaattcgagtggcgacaagaagcagctcgaggtgagacacaaagagttcacgacgcgagtgaactcaatcatcgagtacgggagggtgcctgatttgcccgccatcgcgcgagaggtgaacagagaggaacaacgcaagaattgcgcgggagccaaggcgagaattttcaacacgatggcgacgaccaaggaaaaggcgacagcaacgtctgtgaagacgtgcgacgcgacgtttgcccgactcatcgaagaagtgcgaaacagacagagaagtaaaaacggcgacgtccaaccaaagaagaacgtgcccgttgaaaaatttacaatcgatgatgacgacgatgacgacgacgacggttggcacgatgaagaaatcttgcctctgagtcagatggcgcctcgttacgtcccgacggacgatgacgacgacaacgcgtgattgaattgagatgtacagtagacatagcgacgatagaatgaatgagtagcaatacgtgagtgaatcacaaaataactaccttgcctagcgcagctcgcccaccggcgcttctgcgagccaaagatcgtgaatgaaatcgtacaactttgcggagacgctcaccttgtacggcgtcggattcgtgtatcttaaatgatccgatcgcagttgcttgatggcttctttgcagtgcgcgcgagacgtttctaagctcaggtctaagtcagcgggcgcgcctcgtttcccatcccagacgcacgtgaatagcggctgaaccttcgacggcactacgtacgctcgcttactctccaggaacgggtgtctgcacaacatgcgctcacccacttttggcgcgggctcgtccactcgcgtcattacgtccacgatggcctcgcccgtctgcgagaacagtcgataaccattcttacatccaggaatggtgacctttcctaaatcctcggagagcttgatacgaggagttttgtccacctcgacgagtttaaacacgcatccgagcgcgggttgcttgagacacgtcacgagatgcgtaccaattccaaaggcgtcgatttcgtgaccgtgttgtttcaacgaaaacaacacctcctcgtgaatatcattcgacgccgtgatg

SEQ ID NO: 646 - DNA, 4000 bp, Escherichia coli
  misc_feature (235)..(235): n is a, c, g, or t
  misc_feature (585)..(585): n is a, c, g, or t
  misc_feature (610)..(610): n is a, c, g, or t
  misc_feature (612)..(612): n is a, c, g, or t
  misc_feature (628)..(628): n is a, c, g, or t
  misc_feature (641)..(641): n is a, c, g, or t
  misc_feature (652)..(653): n is a, c, g, or t
  misc_feature (656)..(656): n is a, c, g, or t
  misc_feature (662)..(663): n is a, c, g, or t
  misc_feature (665)..(665): n is a, c, g, or t
  misc_feature (669)..(669): n is a, c, g, or t
  misc_feature (676)..(676): n is a, c, g, or t
  misc_feature (680)..(680): n is a, c, g, or t
  misc_feature (685)..(685): n is a, c, g, or t
  misc_feature (687)..(689): n is a, c, g, or t
  misc_feature (695)..(695): n is a, c, g, or t
  misc_feature (1394)..(1394): n is a, c, g, or t
  misc_feature (1397)..(1397): n is a, c, g, or t
  misc_feature (1843)..(1843): n is a, c, g, or t
  misc_feature (3251)..(3251): n is a, c, g, or t
  misc_feature (3333)..(3333): n is a, c, g, or t
  misc_feature (3335)..(3335): n is a, c, g, or t
  misc_feature (3892)..(3892): n is a, c, g, or t
tgtgctgacatcagggtttgttgtatagagataaactttactgacaccacctgctgcaagaatggtttcttgtgccgagaccgtcatgactttaccggttttgttattaagcacataagctcctaagcaacgattggatttaatgtgattaacttttaaagattttttttctgtaatgaggtcgaccgcaatatggttttctagaatcgtgatattcgcgtgcgctttgacttgntcactcaaagttgcctggatcgctcgacccgtagcatcttttgcgtgaaccacacgcctatggctatgaccaccttctttggttaaatgaaattgttgtgttgtttcgtcccggctaaaaggcacctgcaaatcatgaagccactcaatcgcttctttgccgtgagatgccacaaaattcgcaaccttagggtcagttaaaccacccccaacaaattcggtatcctttacatgactttcaatggagtcttcattcgacatgaccgcagccaccccaccttgagcccactggcttgaactatctagaatttctcgcttactgacaatcagtacttttttatggtcagctanctttaaagctgaagtaaggccagcnanaccgctacctataatnagcacgtcacaangtaacattttnngtntttttnntnaacnaattaanaatnaaggngnnngagaantatatatatagtatgtttatgtttttttgacgaacaaaattaagctaaaaacccatgccaatacttaacaataacatagaacaaaagaaattatcactcgttgaagataagtctgccgtgtatacttccgagcatgttaaaccttcgctatcagccgttgtgagtgagaaaatcgaaaatccgaatcgtgcactcgaccaagttttagtcgaaagcgctcagcagggcgataaaaaagcattcggtcttttagtcgaaaaatatcatcgcaagctcggtcgcattctcacccgtatggtgcgtgatcaagccgagattgaagacattgtccaagaaacattcattaaagcgtatcgtgccctccctaattttagaggcgacagtgctttttatacctggctctatcgtattggtatcaataccgcaaagaatcatttagtggcgatgggcaaacgcccgcgcaatatgactgaatttgaaaatgaggatggtgagtttgaagaaacgcaccaagtggcggaagctgaaaatccagagaccacattactcacgaaagaaatcgggattactgtcaatgccgcgattgaatccttaccagaagaattaaaggtggcgattacattacgtgaaattgaaggcttaagttatgaagagattgcagagatgatggagtgtccgattggcactgtgcgctctcgnatntttagagcgcgcgaaacgattgcggaaaaattaaaaccgcttttgtcacaacacaataataaacgttggtaaatttaaatttaaggaaaagttatatgaaagaaaaaatttcaacactcctcgatgatgagctcgatcttaaaagctcaagtcaaacggtaagagacattaacaaagacagccgtttacgtgagcgcttcgaaacttaccaattgattcgtgactccattaaaaatgaattgattgactcaacactttcatccaaatctattttagatgccattgataaagagcctatccagttaaagtttaataagtcctctaagtttcaatctgcgattgcgctccctgcagcgtcatggatgtcttggccggtagcggcatcatttattgctgttctttttgtaggtgcgatgatcacgacaaatacatttcatatgaaaccnacgaatacgattgaaattgctgagaatattccaaatgaatatattgaagcgcatcaaacgttagcgccgactaatgtcgcgttttatgttgaaacacaagctaagtaatttttttatgcagcgagtagtcgttggtttaatcacccttgtcttaagttgttatgcacaagccgctgaggatccttggcttcatctagaaaaagcctctcaagccgccagaaaattaagttacaaaggtatttttctttatcaaaattttcaagatgtccgctcaatcgaaatcacccatcttaataatggcgaggaagaattcgctcgcatggtgactttagatggccagcctcatgaagccttatcacgcggcaaaaatatgatggtgtttaattcgaataaagaaaatgtcatgattcaggaaagacagggtcagaatttatttcctgcgattttgcctccagacatcgaaagtgttaaagcgatttatacccttcgctttgcgaatcaagaaagaattggtggccgcgaagctcaaattgtttaccttgaacccaaagatcagtttcgatatctttacaagttatggctcgataaagaatttggcttgattctgaagatgagcattttagatcatcaacaaaaaatgattgaacaagcaagttttaatcaaattgcattatttagtggtcaagatttaaattggtttaaacccaatgttgatacacataaaaaatacatcatgaatgaagcgcctcaaaataaaatatcccacgaaaaatattgcaccatttctaatttgcctgcggggtataaagaagttagtcacgtgaccagaaccatgggcaatcaaccacaacttgttcatcactgggtattctcagatggactttcctttgtctctttatttgtaaaccctattcctaaagaccagaagtctcgtgtgggggaaacgcgcgtgggctcatcccatgtttatgcgagagtcatgaatggtaatcaaattatggtggtaggtgcagtgccacaagcaaccattcaaaaaatttcgaattcgattcaagatatgaaagcgcattagatgatcgaagagcaagccattgtaatcaaagcttcaaaagagcatgtcacactcgaagtggtgcgaagtaagccttgtggtttatgtggacaggtaaggggatgcggtaattcaatctggggaaaaattttctcacatcaatcaggcctcattgaaaccagaaacaatttgaatgcgaaattaggggatgttgtgattctaggtatcgatgaaacgcttatgctcaaaggttcgctcatgctttacggcgtgccacttcttttaatgtttttaggtatggcgattgcaaatagtttcgtcacacatatgatcgaattttatacgttgatgggtgcngtattaggtttatctttaggtgtcatgatgattaagcgtgccattaacgagaagatgcaaatgttttacaatgaagcgcaantnattcgttttaaataattcatttaaggaatatatagaccatgataagacgtcttttttatgtatgcatatttcagtttttaattctgaccggattagttgctaaagaacttccggactttactgagctcgctgaaaaacaaagtcctgtcgtcgtcaatatcagctcgattcaaaaaaatcgtgcgaatgtgatgggacaaggatcgcctgaagatgagcaaatgcaagaattttttaagcgttttggaattccagtaccgccaggtatgccacctcataatggtcgcggccaacaacctaccccagataaacaagtgtctgccacaggatctggatttattgtgacgacagatggtttcatattaactaatgcgcatgttgtcaaagacgcagatgaagtgatggtaaaacttaatgacaagcgtgaattcaaagcaaaagtgattgggattgatttaagaacggatgttgccgtattaaaggtcaatgcgactagcttaccgaaagtaagtattggaaatcctgacaccattaaagtcggcgaatgggtcgctgcnattggcgctccttttggcttagaaaatacaatgaccgttggtattgtgagcgctaaaggtcgtgcattacctcaagagaattttgtaccttttattcaaaccgatgtg

SEQ ID NO: 647 - DNA, 4000 bp, Escherichia coli
  misc_feature (1985)..(1987): n is a, c, g, or t
  misc_feature (1989)..(1990): n is a, c, g, or t
  misc_feature (1992)..(1998): n is a, c, g, or t
  misc_feature (2000)..(2001): n is a, c, g, or t
  misc_feature (2009)..(2011): n is a, c, g, or t
  misc_feature (2050)..(2050): n is a, c, g, or t
  misc_feature (2052)..(2053): n is a, c, g, or t
  misc_feature (2055)..(2057): n is a, c, g, or t
  misc_feature (2059)..(2059): n is a, c, g, or t
  misc_feature (2061)..(2063): n is a, c, g, or t
  misc_feature (2065)..(2065): n is a, c, g, or t
  misc_feature (2067)..(2067): n is a, c, g, or t
  misc_feature (2069)..(2069): n is a, c, g, or t
  misc_feature (2074)..(2074): n is a, c, g, or t
  misc_feature (2076)..(2076): n is a, c, g, or t
  misc_feature (2078)..(2078): n is a, c, g, or t
  misc_feature (2116)..(2116): n is a, c, g, or t
  misc_feature (2119)..(2121): n is a, c, g, or t
  misc_feature (2123)..(2128): n is a, c, g, or t
  misc_feature (2130)..(2130): n is a, c, g, or t
  misc_feature (2132)..(2133): n is a, c, g, or t
  misc_feature (2137)..(2140): n is a, c, g, or t
  misc_feature (2142)..(2142): n is a, c, g, or t
  misc_feature (2144)..(2144): n is a, c, g, or t
  misc_feature (2182)..(2183): n is a, c, g, or t
  misc_feature (2185)..(2192): n is a, c, g, or t
  misc_feature (2197)..(2200): n is a, c, g, or t
  misc_feature (2203)..(2203): n is a, c, g, or t
  misc_feature (2207)..(2213): n is a, c, g, or t
  misc_feature (2216)..(2222): n is a, c, g, or t
  misc_feature (2224)..(2224): n is a, c, g, or t
  misc_feature (2227)..(2228): n is a, c, g, or t
  misc_feature (2231)..(2240): n is a, c, g, or t
  misc_feature (2242)..(2242): n is a, c, g, or t
  misc_feature (2244)..(2244): n is a, c, g, or t
  misc_feature (2246)..(2246): n is a, c, g, or t
  misc_feature (2251)..(2251): n is a, c, g, or t
  misc_feature (2253)..(2254): n is a, c, g, or t
  misc_feature (2256)..(2258): n is a, c, g, or t
  misc_feature (2261)..(2263): n is a, c, g, or t
  misc_feature (2265)..(2265): n is a, c, g, or t
  misc_feature (2267)..(2269): n is a, c, g, or t
  misc_feature (2323)..(2324): n is a, c, g, or t
  misc_feature (2327)..(2327): n is a, c, g, or t
  misc_feature (2334)..(2334): n is a, c, g, or t
  misc_feature (2716)..(2719): n is a, c, g, or t
  misc_feature (2722)..(2724): n is a, c, g, or t
  misc_feature (2726)..(2726): n is a, c, g, or t
  misc_feature (2730)..(2730): n is a, c, g, or t
  misc_feature (2733)..(2733): n is a, c, g, or t
  misc_feature (2736)..(2737): n is a, c, g, or t
  misc_feature (2739)..(2739): n is a, c, g, or t
  misc_feature (2776)..(2776): n is a, c, g, or t
  misc_feature (2779)..(2780): n is a, c, g, or t
  misc_feature (2782)..(2783): n is a, c, g, or t
  misc_feature (2786)..(2786): n is a, c, g, or t
  misc_feature (2789)..(2791): n is a, c, g, or t
  misc_feature (2793)..(2793): n is a, c, g, or t
  misc_feature (2795)..(2795): n is a, c, g, or t
  misc_feature (2797)..(2797): n is a, c, g, or t
  misc_feature (2799)..(2799): n is a, c, g, or t
  misc_feature (2801)..(2803): n is a, c, g, or t
  misc_feature (2842)..(2846): n is a, c, g, or t
  misc_feature (2848)..(2851): n is a, c, g, or t
  misc_feature (2854)..(2855): n is a, c, g, or t
  misc_feature (2857)..(2862): n is a, c, g, or t
  misc_feature (2864)..(2864): n is a, c, g, or t
  misc_feature (2869)..(2870): n is a, c, g, or t
  misc_feature (2908)..(2909): n is a, c, g, or t
  misc_feature (2911)..(2913): n is a, c, g, or t
  misc_feature (2916)..(2917): n is a, c, g, or t
  misc_feature (2922)..(2922): n is a, c, g, or t
  misc_feature (2925)..(2925): n is a, c, g, or t
  misc_feature (2928)..(2929): n is a, c, g, or t
  misc_feature (2933)..(2935): n is a, c, g, or t
  misc_feature (2937)..(2937): n is a, c, g, or t
  misc_feature (2974)..(2974): n is a, c, g, or t
  misc_feature (2976)..(2978): n is a, c, g, or t
  misc_feature (2980)..(2980): n is a, c, g, or t
  misc_feature (2982)..(2982): n is a, c, g, or t
  misc_feature (2985)..(2987): n is a, c, g, or t
  misc_feature (2990)..(2990): n is a, c, g, or t
  misc_feature (2992)..(2992): n is a, c, g, or t
  misc_feature (2994)..(2994): n is a, c, g, or t
  misc_feature (2999)..(3001): n is a, c, g, or t
  misc_feature (3003)..(3003): n is a, c, g, or t
  misc_feature (3041)..(3042): n is a, c, g, or t
  misc_feature (3044)..(3044): n is a, c, g, or t
  misc_feature (3048)..(3048): n is a, c, g, or t
  misc_feature (3053)..(3055): n is a, c, g, or t
  misc_feature (3057)..(3057): n is a, c, g, or t
  misc_feature (3059)..(3065): n is a, c, g, or t
  misc_feature (3069)..(3070): n is a, c, g, or t
  misc_feature (3073)..(3073): n is a, c, g, or t
  misc_feature (3075)..(3077): n is a, c, g, or t
  misc_feature (3079)..(3082): n is a, c, g, or t
  misc_feature (3084)..(3084): n is a, c, g, or t
  misc_feature (3086)..(3086): n is a, c, g, or t
  misc_feature (3088)..(3088): n is a, c, g, or t
  misc_feature (3091)..(3091): n is a, c, g, or t
  misc_feature (3096)..(3096): n is a, c, g, or t
  misc_feature (3098)..(3101): n is a, c, g, or t
  misc_feature (3103)..(3103): n is a, c, g, or t
  misc_feature (3105)..(3105): n is a, c, g, or t
  misc_feature (3241)..(3241): n is a, c, g, or t
  misc_feature (3243)..(3243): n is a, c, g, or t
  misc_feature (3246)..(3247): n is a, c, g, or t
  misc_feature (3251)..(3251): n is a, c, g, or t
  misc_feature (3255)..(3255): n is a, c, g, or t
  misc_feature (3260)..(3261): n is a, c, g, or t
  misc_feature (3265)..(3265): n is a, c, g, or t
  misc_feature (3296)..(3302): n is a, c, g, or t
  misc_feature (3304)..(3309): n is a, c, g, or t
  misc_feature (3313)..(3316): n is a, c, g, or t
  misc_feature (3318)..(3318): n is a, c, g, or t
  misc_feature (3321)..(3321): n is a, c, g, or t
  misc_feature (3323)..(3335): n is a, c, g, or t
  misc_feature (3337)..(3341): n is a, c, g, or t
  misc_feature (3343)..(3346): n is a, c, g, or t
  misc_feature (3348)..(3350): n is a, c, g, or t
  misc_feature (3352)..(3352): n is a, c, g, or t
  misc_feature (3355)..(3356): n is a, c, g, or t
  misc_feature (3359)..(3367): n is a, c, g, or t
  misc_feature (3369)..(3369): n is a, c, g, or t
  misc_feature (3371)..(3372): n is a, c, g, or t
  misc_feature (3374)..(3374): n is a, c, g, or t
  misc_feature (3376)..(3392): n is a, c, g, or t
  misc_feature (3394)..(3395): n is a, c, g, or t
  misc_feature (3398)..(3401): n is a, c, g, or t
  misc_feature (3403)..(3407): n is a, c, g, or t
  misc_feature (3409)..(3412): n is a, c, g, or t
  misc_feature (3414)..(3416): n is a, c, g, or t
  misc_feature (3418)..(3418): n is a, c, g, or t
  misc_feature (3421)..(3422): n is a, c, g, or t
  misc_feature (3425)..(3433): n is a, c, g, or t
  misc_feature (3435)..(3436): n is a, c, g, or t
  misc_feature (3438)..(3439): n is a, c, g, or t
  misc_feature (3441)..(3441): n is a, c, g, or t
  misc_feature (3443)..(3452): n is a, c, g, or t
  misc_feature (3454)..(3461): n is a, c, g, or t
  misc_feature (3463)..(3464): n is a, c, g, or t
  misc_feature (3467)..(3467): n is a, c, g, or t
  misc_feature (3469)..(3474): n is a, c, g, or t
  misc_feature (3476)..(3476): n is a, c, g, or t
  misc_feature (3478)..(3478): n is a, c, g, or t
  misc_feature (3480)..(3480): n is a, c, g, or t
  misc_feature (3482)..(3482): n is a, c, g, or t
  misc_feature (3484)..(3485): n is a, c, g, or t
  misc_feature (3487)..(3487): n is a, c, g, or t
  misc_feature (3490)..(3491): n is a, c, g, or t
  misc_feature (3493)..(3501): n is a, c, g, or t
  misc_feature (3503)..(3503): n is a, c, g, or t
  misc_feature (3505)..(3505): n is a, c, g, or t
  misc_feature (3507)..(3507): n is a, c, g, or t
  misc_feature (3511)..(3511): n is a, c, g, or t
  misc_feature (3514)..(3514): n is a, c, g, or t
  misc_feature (3516)..(3520): n is a, c, g, or t
  misc_feature (3954)..(4000): n is a, c, g, or t
aagaaattgatggtcaacgccagaggcctatcttaaaccgtgatgttgttagcttcacagatgataaagctaaatcactgaatggctatcgccacgggctacttgagaatggctcccccaaaccttacatgggactgtggagcagaagcaattactgcattgaaatcatcagaacagaaaatgctggatggacggctgaagttatagaacgctaccgtgcataccagattgttgctcaattcggagaggccagactacatcatccgaccttaagcattagtgagcaaccattggtcatgcggttgttgattggcgattatgttcgcgcagaagttgatggaataacgcaattgatgtgcgtactgaaaatcaacagcacaggtgcaattacattcgtgctacacaatgaatcaaatatcagtgcgcgttataccgcaaagcttgcggcacagaagggtcggaaggcgggaaagccattcaatttgtcggcgttagaagacaacttcttccagaaaagtatttcgccagatagtctgcgcggcttcagagcccgacgcgtaaccatctctcccatcggcgagttgcgcgatcccggcttcaaggaataagggaaatgataggccgcatcgtcgaagtggcggatgacaagcggcatctgtttctctcgcgcggttttcttgtggtgcaagataccgaaggtgatcgcaaagagttggggcaggttccgctggatgatatcgctgccgtgatcgctaatgcccacggactgagctataccaacaatctgctggtggcactggcagagcgttgcgccccgtttgtgttatgcgccgccaaccataatgcggtcgggatggtgatgaccatcgacggcaattatcagcaggccaaacggtttgacgcgcaactcgccgccacacaaccattgatcaagcgcatgtgggcagacatcgtcaaatccaaactccagcaacaagccgctgcgcttgaggccgcaggtgctccatttgttccgctgcaagcactggtgcgcaaagttcgctcgggtgacccggagaatttcgaggcgcaaggcgccaagcgctattgggggttattgtttggcgaagactttcgccgtgatcagcaaggtggcggcattaacgccatgctcaactatggatatacagttcttcgtgctgccaccgcacgcgcgatcgtcgcggctgggctgcaccccaccatcgggctgcaccacagcaacgaaggcaacgccatgcgtttggtggacgacttgatggagccgttcaggccggtgattgacttgaaggtttggcaactccagcggcaaggggaaacaatgatcacgcccgaaagcaaacgcgccctggtcaaaactttatatgacgacatgcaaaccagcgcaggtgcaaccccggtgatggtgtgcgcacaaaaacttgcgatctctttggcgcaagttttcatgggagaaaaagacaagctcgatcttccactgccggggctaccgctcaatctcgcgtcgtcattgcaggatgattagcacaagatgctctcggggtatcgccttatgtgggtcgtggtgatgttcgatttgccggttgtcgaaaaggccgaacgcaaagccgccacggactttcgaaatgcactgctcgacatgggtttcgagatgtcacagttttcggtttatatgcgtttttgcagcagtcagagccaagtggacacctattgcacacaggtcgaaaaatccttgcccgcgggcggcaaagtcaacatactgcagttcaccgacaaacagtacgaacgcatcctcacattcagaggaaaagccaaacaacccgctctcaaatcgccggatcaatacgagttattctgatggaacacgttgtttctttcccgcaaaaacacgacaatcacccggtgaatcaggtggttgtcgtgttgcgagtttagcagattgggatttgtgctctgaccggaactannncnngnnnnnnntnnaactttannngagtttagcagattgggatttgtgctctgaccggaactnanncnnnangnnntngnanctatngntnagtttagcagattgggatttgtgctctgaccggaactnaannngnnnnnncnanntttnnnngntnagtttagcagattgggatttgtgctctgaccggaactnnannnnnnnnttcannnngcngttnnnnnnnttnnnnnnntnggnnttnnnnnnnnnncngnanccaancnncnnnttnnntngnnncggagaacagtttagcagattgggatttgtgctctgaccggaaccgaaccgggnnttncttcgcngatgacaaaagtttagcagattgggatttgtgctctgaccggaaccaatatgcatcattcccacgcctttttcggagtttagcagattgggatttgtgctctgaccggaactgttttacaagatgcagacaagggcggggaagtttagcagattgggatttgtgctctgaccggaactaaacccgaattcggctttgattcgctcggagtttagcagattgggatttgtgctctgaccggaaccatctggaaggactggaagaaacggcgcgaagtttagcagattgggatttgtgctctgaccggaacggaatcggcgcggtagttgttgcggctctgagtttagcagattgggatttgtgctctgaccggaactagcgtnnnncgnnngntgtngcngtnnanagtttagcagattgggatttgtgctctgaccggaacnatnntnntcnccnnnangnanangnnnatagtttagcagattgggatttgtgctctgaccggaacnnnnngnnnngcnngnnnnnntnggcgnngagtttagcagattgggatttgtgctctgaccggaacnngnnncanntgctnaanctnnttgnnnanagtttagcagattgggatttgtgctctgaccggaacnannncnantcnnnctngntncgcgnnnanagtttagcagattgggatttgtgctctgaccggaacannanccgnaagtnnnancnnnnnnngcanngtntnnnannnngngntntgngctcngnnnngnanaggatgcgcttcgcgttgaaattacaaacgagtttagcagattgggatttgtgctctgaccggaaccagttcgaactgcgattggatgatcgatttagtttagcagattgggatttgtgctctgaccggaactttngncgnngatnacgnttcgnnggcngaagtttagcagattgggatttgtgctctgnnnnnnncnnnnnntgcnnnntngcntnnnnnnnnnnnnntnnnnnannnngnnntntgnnctnnnnnnnnnantnncncnnnnnnnnnnnnnnnnnanngcnnnntnnnnnannnngnnntntgnnctnnnnnnnnnannanncngnnnnnnnnnncnnnnnnnngnngantnnnnnngntngngntnngngcnntnnnnnnnnngnantncttntgntnnnnngactggttggaagtttagcagattgggatttgtgctctgaccggaacctgcccgacctgtaccggatgcacgccgtgagtttagcagattgggatttgtgctctgaccggaactaaacccaaagacggcttcgattcgctcggagtttagcagattgggatttgtgctctgaccggaacttatggttggtggagtggctgcgttctcgtagtttagcagattgggatttgtgctctgaccggaacacagcgcgcaacagtctcaaaccgccaccaaagtttagcagattgggatttgtgctctgaccggaactcagcatgttctgctgttgatgttctaaatagtttagcagattgggatttgtgctctgaccggaacaagaccctgatgagccaccccgcaagggggtgactcatcagggtcgcgctccgcgnnnnnnnnnnnnnnnnnnnnnnnnnnnnnnnnnnnnnnnnnnnnnnn

SEQ ID NO: 648 - DNA, 4000 bp, Escherichia coli
  misc_feature (2)..(2): n is a, c, g, or t
  misc_feature (183)..(184): n is a, c, g, or t
  misc_feature (683)..(684): n is a, c, g, or t
  misc_feature (687)..(687): n is a, c, g, or t
  misc_feature (689)..(689): n is a, c, g, or t
  misc_feature (691)..(691): n is a, c, g, or t
  misc_feature (693)..(697): n is a, c, g, or t
  misc_feature (699)..(700): n is a, c, g, or t
  misc_feature (702)..(703): n is a, c, g, or t
  misc_feature (705)..(705): n is a, c, g, or t
  misc_feature (707)..(710): n is a, c, g, or t
  misc_feature (712)..(712): n is a, c, g, or t
  misc_feature (716)..(719): n is a, c, g, or t
  misc_feature (722)..(722): n is a, c, g, or t
  misc_feature (724)..(724): n is a, c, g, or t
  misc_feature (726)..(727): n is a, c, g, or t
  misc_feature (729)..(729): n is a, c, g, or t
  misc_feature (733)..(735): n is a, c, g, or t
  misc_feature (737)..(741): n is a, c, g, or t
  misc_feature (743)..(743): n is a, c, g, or t
  misc_feature (746)..(746): n is a, c, g, or t
  misc_feature (748)..(750): n is a, c, g, or t
  misc_feature (752)..(753): n is a, c, g, or t
  misc_feature (755)..(757): n is a, c, g, or t
  misc_feature (761)..(762): n is a, c, g, or t
  misc_feature (765)..(765): n is a, c, g, or t
  misc_feature (767)..(767): n is a, c, g, or t
  misc_feature (769)..(769): n is a, c, g, or t
  misc_feature (771)..(772): n is a, c, g, or t
  misc_feature (774)..(774): n is a, c, g, or t
  misc_feature (776)..(779): n is a, c, g, or t
  misc_feature (783)..(786): n is a, c, g, or t
  misc_feature (789)..(790): n is a, c, g, or t
  misc_feature (792)..(797): n is a, c, g, or t
  misc_feature (799)..(799): n is a, c, g, or t
  misc_feature (801)..(801): n is a, c, g, or t
  misc_feature (803)..(803): n is a, c, g, or t
  misc_feature (806)..(806): n is a, c, g, or t
  misc_feature (808)..(808): n is a, c, g, or t
  misc_feature (813)..(813): n is a, c, g, or t
  misc_feature (815)..(817): n is a, c, g, or t
  misc_feature (819)..(819): n is a, c, g, or t
  misc_feature (822)..(822): n is a, c, g, or t
  misc_feature (825)..(825): n is a, c, g, or t
  misc_feature (828)..(828): n is a, c, g, or t
  misc_feature (830)..(830): n is a, c, g, or t
  misc_feature (832)..(832): n is a, c, g, or t
  misc_feature (839)..(839): n is a, c, g, or t
  misc_feature (843)..(843): n is a, c, g, or t
  misc_feature (848)..(850): n is a, c, g, or t
  misc_feature (852)..(852): n is a, c, g, or t
  misc_feature (867)..(867): n is a, c, g, or t
  misc_feature (1412)..(1412): n is a, c, g, or t
  misc_feature (1588)..(1588): n is a, c, g, or t
  misc_feature (1618)..(1618): n is a, c, g, or t
  misc_feature (1621)..(1621): n is a, c, g, or t
  misc_feature (1633)..(1633): n is a, c, g, or t
  misc_feature (1687)..(1687): n is a, c, g, or t
  misc_feature (1702)..(1702): n is a, c, g, or t
  misc_feature (1777)..(1777): n is a, c, g, or t
  misc_feature (1821)..(1822): n is a, c, g, or t
  misc_feature (1833)..(1833): n is a, c, g, or t
  misc_feature (1868)..(1868): n is a, c, g, or t
  misc_feature (1871)..(1871): n is a, c, g, or t
  misc_feature (1923)..(1923): n is a, c, g, or t
  misc_feature (1926)..(1926): n is a, c, g, or t
  misc_feature (1931)..(1932): n is a, c, g, or t
  misc_feature (1940)..(1941): n is a, c, g, or t
  misc_feature (1944)..(1944): n is a, c, g, or t
  misc_feature (1947)..(1947): n is a, c, g, or t
  misc_feature (1949)..(1950): n is a, c, g, or t
  misc_feature (1965)..(1965): n is a, c, g, or t
  misc_feature (1967)..(1967): n is a, c, g, or t
  misc_feature (1973)..(1974): n is a, c, g, or t
  misc_feature (1982)..(1983): n is a, c, g, or t
  misc_feature (2001)..(2001): n is a, c, g, or t
  misc_feature (2224)..(2224): n is a, c, g, or t
  misc_feature (2233)..(2233): n is a, c, g, or t
  misc_feature (2239)..(2239): n is a, c, g, or t
  misc_feature (2734)..(2734): n is a, c, g, or t
  misc_feature (3805)..(3805): n is a, c, g, or t
  misc_feature (3808)..(3808): n is a, c, g, or t
cnccaaagcaccccatgacataaagggttttgtaattctgcgcaacatctttcagtttcgcaacaaattcacttgctttcataactgccattgtttttcgctccttcgctattattcttcgtgtgcgcgttccagcgtgtcaattcgcttgtgcgcctgctttgcggacgcttcaacggcggnnaggcgcgttacaaactcggtgttcgttttccgctgttccttctgctctgccttgatttcgtccgtattcgctttgatataccctatttccgtaagtacggttgcgtcgtttttcgcctcgctttccgtgtcgcttttccggttgcgggcaaaagccgcatacccgaacacgattgcgcaaaccgtactaaccacggaaagaacggtcaagaactgttccatgcttccaccacctttacactttttcccattgccacaaacccgccgtgtcgggcgggtaaacgcaattcggcatatcggccttcgccagatataccgcgcctttgtagctgtaataaagcccctcaaccacatttacgacgatccccgcggtttccggatacgggatcggatcgtcaagcgtccccgcgtgttccagctcgacaaggcggtaatatgcaaaggtggtttgcacgggatacgcggcggcgttggaagtgtgcggcgcgacgatttcatannaangncngnnnnncnngnnantnnnncntttnnnnttntntnngnggtnnncnnnnnantcngnnnanncnnnaatnnccntngncnnangnnnnattnnnncgnnannnnnntncntnccngnggcgngnnntncgncantcngngntttgaangaangggannnangggcggcggtgcttncgcccgccgccttcacagtttcaacttccttcttcaattcctctgtttcgtttggcttgtccggcctgtatgttacgctcattcaaaattacccccgatcgaagatacccaacacgcggaaatagcgtcgccgcgctccaccgttacccgaatattcatgccgaatttaacggcggtgtttattgtgttctcgaagacatgcgccacgccctgaattacggcatttgtgcaatcctcccacgcgggggaaggatcaaacggattgtttgttgcctcaactttgaaagttgcgcccgctggaatttcccgcgttactttcacatttgcgcgcgtgggctgtgcctgcgcttccagcggtgcggccagcgtgataacaaatccgctgatctgttttgtgaaggtcagcgtgcgcaccgctttatttcccacggtgtccgttgcggtaatggtgattgtgtgcgcgccgttggaaagggcggtgaagtcgtgccccgtaacattcatcgtgttttcttctccaagcgtgggcgtgtagctccgcaagntggtttcgtccaccttttcaaccactgtcaccgtgtcaccgtccggatcggtcacggtgtacttgtaagagaagtcgccgcttttcgttccaagatcggcgttttgtccggaaatgacgggcggttgattgtgaattacgggaaccgcggaagaagtcacatacgcactttcgttnccgtaggtgtcccgcgccttcacgcggtanttnatcgtgttccancttgtagaaacgacttccgtaaaggtgcgggcggcggtttccgttactttcgtntagctcccgttattnaccgaccgttccagaacataggtgatcgcgtcgccgtccggatcggtggaagctccccatgttacggttatgttntgcgtgctgtaacagctttccggcacggaaattccgtccggcgnnctcggtgcggngttccactggaattcatagtttccgcggctgtttntgntatcagataccaaaatatcagatttcaaattacaaagcggacgcacgccccngtngccgnngtacgcgnngtngtngnncaacgcccccgaagngntgacanngcgcacanngtacgagtagccggaatncggcgtgcgaagccaccaataccacgcctgcgaagtcgtcggatcgctcccgtaattacttttgtcaatggccgcttgcgtacaataggcaaggcggcttgtgttgtcgctgaacaaggccagctttgaaccctctgcaatcccgttttcgtttgcaagcccgacttccgttgtgcttgcaaggaacatttttgcggtgaaggtttcatagctcccgccgtcngtaacggtntttttngcaacggtaagcgtggttgtcataagtgccgctacaaaatcgtcgtcaagcatagcaaggaaccccgcccatgtgtcataggggtttacattgtcccatacattcgcgcttgacggcggcgcgtcctgcccgtgcttcgcgctgtaccattttcccgccgcggcgttactgttcagccattgaaggatattggaatgaatgtgcctgttgttgccgtagcttctccggttgctgtcgctgttgtttggctcttttgcgtcggaacaaagcaacgctatgatcttgtcggtaatcagggtaatagctccggacggatagcccgaatggtttttgtctgccattttgaaaacgacataatcacccaagaacgaccgataagccgactttacgggcacttcaaaggttgttcccacgccaagcgtgcttaactttttcgacattctttgccttcctccttttcttcggaaacagcaacgccgccacggtttcccgcgncggcgtactgcccgaataatttgttgtaatgctgatccatgttccggatcaggtgatagcaattccccttcgacgcgtggccgcgccagcttttataagattgttccaccttttccggcgtgatttttccagtttccagcaacccgcgcattttggttaaacggcggcgggcgttgttctttgacttccggcgcaccttgcggatcaccgcgccgctttcggtcaaatacgaatggaagcccaaaaaatcaattccgtttttcaacgggtaaatatttgttttcgcattcagcgaaagccctaattcgtttacatgtctttcaatctccttccagcaatagcgcaaatattctttatcttcgtggatcaaataaaaatcgtccatgtatcggccataaaattttatgcctaacttctcttttaccatgtgatccagcgaagaaagatagagaagggcgaatatttgtgaagactggttgccgatcggaattcctacattgccttcggtgctgtctattatcatatccagcaaccaaagacaatccggatcggaaatatacttgcggattaaggattttaacgcgtcgtgcttgatattatagaaatactttgatatgtcgcatttcaatacccaaccgtcaacacctcgtacacggtaaaacctccgcataaacccttccagccgttcaaggccgaagtgcgttccttttccaacctgtgaagcgtaattgtcttttatgaaggtgcttcgcaccctcggttcaagtacattatcacaaagcgcatgttgcacaaccttgtctttgtagctgttcgacattacaacccgttctttcggttcgtaaaccttgaatgtgttgtagggcgaaagccggtatgtatggctctgtaactgcacgcttaacaggttcagggcttccagcaaattaacttcaaacttcgccgccgctcctttccaccttttgccgcggcgcgccttccggtacgcgcggtataggttttcaaaattatagactttttcaaagtcggtcatgtcaaaaaatctccttgccgtgtataacctcggccatnccngcgggcaatgctccggtatcggcaatcctgtatttgtccccgctgtggatagcaggggacgggaaacgccttcctttgatggtggtacattgctttcggcctgtggcctactcgatcgagtgatccaccgaagcggacgcacgcccctgttgccgttgtacgcgttgttgttgttcaacgcccccgaagtgt

SEQ ID NO: 649 - DNA, 4000 bp, Escherichia coli
  misc_feature (1)..(1): n is a, c, g, or t
  misc_feature (5)..(5): n is a, c, g, or t
  misc_feature (9)..(9): n is a, c, g, or t
  misc_feature (15)..(15): n is a, c, g, or t
  misc_feature (21)..(21): n is a, c, g, or t
  misc_feature (25)..(25): n is a, c, g, or t
  misc_feature (28)..(28): n is a, c, g, or t
  misc_feature (32)..(32): n is a, c, g, or t
  misc_feature (36)..(36): n is a, c, g, or t
  misc_feature (39)..(40): n is a, c, g, or t
  misc_feature (45)..(45): n is a, c, g, or t
  misc_feature (51)..(51): n is a, c, g, or t
  misc_feature (54)..(54): n is a, c, g, or t
  misc_feature (66)..(67): n is a, c, g, or t
  misc_feature (70)..(70): n is a, c, g, or t
  misc_feature (82)..(82): n is a, c, g, or t
  misc_feature (88)..(89): n is a, c, g, or t
  misc_feature (92)..(92): n is a, c, g, or t
  misc_feature (95)..(95): n is a, c, g, or t
  misc_feature (101)..(103): n is a, c, g, or t
  misc_feature (111)..(111): n is a, c, g, or t
  misc_feature (114)..(117): n is a, c, g, or t
  misc_feature (124)..(125): n is a, c, g, or t
  misc_feature (129)..(129): n is a, c, g, or t
  misc_feature (131)..(131): n is a, c, g, or t
  misc_feature (142)..(142): n is a, c, g, or t
  misc_feature (146)..(146): n is a, c, g, or t
  misc_feature (149)..(149): n is a, c, g, or t
  misc_feature (151)..(151): n is a, c, g, or t
  misc_feature (158)..(158): n is a, c, g, or t
  misc_feature (161)..(161): n is a, c, g, or t
  misc_feature (167)..(167): n is a, c, g, or t
  misc_feature (170)..(170): n is a, c, g, or t
  misc_feature (174)..(174): n is a, c, g, or t
  misc_feature (176)..(176): n is a, c, g, or t
  misc_feature (178)..(179): n is a, c, g, or t
  misc_feature (183)..(183): n is a, c, g, or t
  misc_feature (191)..(191): n is a, c, g, or t
  misc_feature (195)..(195): n is a, c, g, or t
  misc_feature (197)..(197): n is a, c, g, or t
  misc_feature (199)..(199): n is a, c, g, or t
  misc_feature (202)..(202): n is a, c, g, or t
  misc_feature (204)..(204): n is a, c, g, or t
  misc_feature (207)..(207): n is a, c, g, or t
  misc_feature (209)..(209): n is a, c, g, or t
  misc_feature (213)..(215): n is a, c, g, or t
  misc_feature (220)..(221): n is a, c, g, or t
  misc_feature (224)..(224): n is a, c, g, or t
  misc_feature (229)..(231): n is a, c, g, or t
  misc_feature (233)..(235): n is a, c, g, or t
  misc_feature (238)..(238): n is a, c, g, or t
  misc_feature (240)..(240): n is a, c, g, or t
  misc_feature (250)..(250): n is a, c, g, or t
  misc_feature (253)..(253): n is a, c, g, or t
  misc_feature (256)..(256): n is a, c, g, or t
  misc_feature (258)..(258): n is a, c, g, or t
  misc_feature (263)..(264): n is a, c, g, or t
  misc_feature (267)..(267): n is a, c, g, or t
  misc_feature (269)..(269): n is a, c, g, or t
  misc_feature (275)..(276): n is a, c, g, or t
  misc_feature (279)..(279): n is a, c, g, or t
  misc_feature (281)..(282): n is a, c, g, or t
  misc_feature (285)..(285): n is a, c, g, or t
  misc_feature (288)..(288): n is a, c, g, or t
  misc_feature (295)..(295): n is a, c, g, or t
  misc_feature (300)..(303): n is a, c, g, or t
  misc_feature (308)..(308): n is a, c, g, or t
  misc_feature (312)..(312): n is a, c, g, or t
  misc_feature (315)..(317): n is a, c, g, or t
  misc_feature (321)..(322): n is a, c, g, or t
  misc_feature (331)..(331): n is a, c, g, or t
  misc_feature (335)..(335): n is a, c, g, or t
  misc_feature (342)..(342): n is a, c, g, or t
  misc_feature (348)..(350): n is a, c, g, or t
  misc_feature (356)..(356): n is a, c, g, or t
  misc_feature (358)..(358): n is a, c, g, or t
  misc_feature (372)..(372): n is a, c, g, or t
  misc_feature (375)..(375): n is a, c, g, or t
  misc_feature (384)..(384): n is a, c, g, or t
  misc_feature (387)..(389): n is a, c, g, or t
  misc_feature (391)..(392): n is a, c, g, or t
  misc_feature (398)..(398): n is a, c, g, or t
  misc_feature (400)..(400): n is a, c, g, or t
  misc_feature (402)..(402): n is a, c, g, or t
  misc_feature (405)..(405): n is a, c, g, or t
  misc_feature (407)..(407): n is a, c, g, or t
  misc_feature (410)..(412): n is a, c, g, or t
  misc_feature (414)..(414): n is a, c, g, or t
  misc_feature (416)..(416): n is a, c, g, or t
  misc_feature (430)..(430): n is a, c, g, or t
  misc_feature (435)..(435): n is a, c, g, or t
  misc_feature (446)..(446): n is a, c, g, or t
  misc_feature (449)..(449): n is a, c, g, or t
  misc_feature (455)..(455): n is a, c, g, or t
  misc_feature (457)..(457): n is a, c, g, or t
  misc_feature (483)..(483): n is a, c, g, or t
  misc_feature (492)..(493): n is a, c, g, or t
  misc_feature (507)..(507): n is a, c, g, or t
  misc_feature (510)..(510): n is a, c, g, or t
  misc_feature (514)..(514): n is a, c, g, or t
  misc_feature (525)..(525): n is a, c, g, or t
  misc_feature (527)..(527): n is a, c, g, or t
  misc_feature (530)..(531): n is a, c, g, or t
  misc_feature (533)..(533): n is a, c, g, or t
  misc_feature (540)..(540): n is a, c, g, or t
  misc_feature (546)..(547): n is a, c, g, or t
  misc_feature (552)..(552): n is a, c, g, or t
  misc_feature (558)..(558): n is a, c, g, or t
  misc_feature (561)..(561): n is a, c, g, or t
  misc_feature (563)..(563): n is a, c, g, or t
  misc_feature (565)..(565): n is a, c, g, or t
  misc_feature (575)..(575): n is a, c, g, or t
  misc_feature (579)..(580): n is a, c, g, or t
  misc_feature (586)..(586): n is a, c, g, or t
  misc_feature (640)..(640): n is a, c, g, or t
  misc_feature (642)..(642): n is a, c, g, or t
  misc_feature (680)..(680): n is a, c, g, or t
  misc_feature (717)..(717): n is a, c, g, or t
  misc_feature (748)..(748): n is a, c, g, or t
  misc_feature (758)..(758): n is a, c, g, or t
  misc_feature (761)..(761): n is a, c, g, or t
  misc_feature (780)..(781): n is a, c, g, or t
  misc_feature (786)..(786): n is a, c, g, or t
  misc_feature (788)..(788): n is a, c, g, or t
  misc_feature (883)..(883): n is a, c, g, or t
  misc_feature (998)..(998): n is a, c, g, or t
  misc_feature (1003)..(1003): n is a, c, g, or t
  misc_feature (1213)..(1213): n is a, c, g, or t
  misc_feature (1218)..(1218): n is a, c, g, or t
  misc_feature (1256)..(1256): n is a, c, g, or t
  misc_feature (1271)..(1271): n is a, c, g, or t
  misc_feature (1378)..(1379): n is a, c, g, or t
  misc_feature (1398)..(1398): n is a, c, g, or t
  misc_feature (1436)..(1436): n is a, c, g, or t
  misc_feature (1467)..(1467): n is a, c, g, or t
  misc_feature (1475)..(1475): n is a, c, g, or t
  misc_feature (1624)..(1624): n is a, c, g, or t
  misc_feature (1825)..(1825): n is a, c, g, or t
  misc_feature (3004)..(3004): n is a, c, g, or t
  misc_feature (3046)..(3046): n is a, c, g, or t
  misc_feature (3052)..(3052): n is a, c, g, or t
  misc_feature (3160)..(3160): n is a, c, g, or t
  misc_feature (3217)..(3217): n is a, c, g, or t
  misc_feature (3286)..(3286): n is a, c, g, or t
  misc_feature (3331)..(3331): n is a, c, g, or t
  misc_feature (3343)..(3343): n is a, c, g, or t
  misc_feature (3367)..(3367): n is a, c, g, or t
  misc_feature (3427)..(3427): n is a, c, g, or t
  misc_feature (3496)..(3496): n is a, c, g, or t
  misc_feature (3502)..(3502): n is a, c, g, or t
  misc_feature (3508)..(3508): n is a, c, g, or t
  misc_feature (3520)..(3520): n is a, c, g, or t
  misc_feature (3535)..(3535): n is a, c, g, or t
  misc_feature (3542)..(3542): n is a, c, g, or t
  misc_feature (3571)..(3571): n is a, c, g, or t
  misc_feature (3589)..(3589): n is a, c, g, or t
  misc_feature (3593)..(3594): n is a, c, g, or t
  misc_feature (3601)..(3601): n is a, c, g, or t
  misc_feature (3605)..(3606): n is a, c, g, or t
  misc_feature (3610)..(3610): n is a, c, g, or t
  misc_feature (3625)..(3625): n is a, c, g, or t
  misc_feature (3628)..(3628): n is a, c, g, or t
  misc_feature (3666)..(3668): n is a, c, g, or t
  misc_feature (3670)..(3670): n is a, c, g, or t
  misc_feature (3672)..(3672): n is a, c, g, or t
  misc_feature (3674)..(3674): n is a, c, g, or t
  misc_feature (3678)..(3678): n is a, c, g, or t
  misc_feature (3680)..(3682): n is a, c, g, or t
  misc_feature (3684)..(3688): n is a, c, g, or t
  misc_feature (3693)..(3693): n is a, c, g, or t
  misc_feature (3695)..(3697): n is a, c, g, or t
  misc_feature (3699)..(3701): n is a, c, g, or t
  misc_feature (3703)..(3703): n is a, c, g, or t
  misc_feature (3708)..(3710): n is a, c, g, or t
  misc_feature (3713)..(3717): n is a, c, g, or t
  misc_feature (3719)..(3720): n is a, c, g, or t
  misc_feature (3725)..(3725): n is a, c, g, or t
  misc_feature (3728)..(3728): n is a, c, g, or t
  misc_feature (3730)..(3730): n is a, c, g, or t
  misc_feature (3737)..(3737): n is a, c, g, or t
  misc_feature (3739)..(3739): n is a, c, g, or t
  misc_feature (3741)..(3741): n is a, c, g, or t
  misc_feature (3744)..(3745): n is a, c, g, or t
  misc_feature (3747)..(3747): n is a, c, g, or t
  misc_feature (3751)..(3752): n is a, c, g, or t
  misc_feature (3754)..(3758): n is a, c, g, or t
  misc_feature (3760)..(3764): n is a, c, g, or t
  misc_feature (3767)..(3768): n is a, c, g, or t
  misc_feature (3770)..(3771): n is a, c, g, or t
  misc_feature (3777)..(3777): n is a, c, g, or t
  misc_feature (3780)..(3782): n is a, c, g, or t
  misc_feature (3786)..(3789): n is a, c, g, or t
  misc_feature (3796)..(3797): n is a, c, g, or t
  misc_feature (3800)..(3803): n is a, c, g, or t
  misc_feature (3805)..(3807): n is a, c, g, or t
  misc_feature (3811)..(3812): n is a, c, g, or t
  misc_feature (3814)..(3814): n is a, c, g, or t
  misc_feature (3819)..(3819): n is a, c, g, or t
  misc_feature (3821)..(3821): n is a, c, g, or t
  misc_feature (3823)..(3823): n is a, c, g, or t
  misc_feature (3825)..(3825): n is a, c, g, or t
  misc_feature (3829)..(3829): n is a, c, g, or t
  misc_feature (3832)..(3832): n is a, c, g, or t
  misc_feature (3835)..(3835): n is a, c, g, or t
  misc_feature (3837)..(3838): n is a, c, g, or t
  misc_feature (3840)..(3845): n is a, c, g, or t
  misc_feature (3847)..(3847): n is a, c, g, or t
  misc_feature (3849)..(3851): n is a, c, g, or t
  misc_feature (3853)..(3853): n is a, c, g, or t
  misc_feature (3856)..(3857): n is a, c, g, or t
  misc_feature (3860)..(3861): n is a, c, g, or t
  misc_feature (3866)..(3868): n is a, c, g, or t
  misc_feature (3870)..(3871): n is a, c, g, or t
  misc_feature (3873)..(3879): n is a, c, g, or t
  misc_feature (3882)..(3882): n is a, c, g, or t
  misc_feature (3884)..(3885): n is a, c, g, or t
  misc_feature (3888)..(3888): n is a, c, g, or t
  misc_feature (3894)..(3894): n is a, c, g, or t
  misc_feature (3896)..(3899): n is a, c, g, or t
  misc_feature (3903)..(3905): n is a, c, g, or t
  misc_feature (3908)..(3908): n is a, c, g, or t
  misc_feature (3912)..(3912): n is a, c, g, or t
  misc_feature (3933)..(3934): n is a, c, g, or t
  misc_feature (3947)..(3947): n is a, c, g, or t
  misc_feature (3953)..(3953): n is a, c, g, or t
  misc_feature (3959)..(3959): n is a, c, g, or t
  misc_feature (3977)..(3977): n is a, c, g, or t
  misc_feature (3983)..(3983): n is a, c, g, or t
  misc_feature (3989)..(3989): n is a, c, g, or t
naatnattntttcgnataatntttntgnggangaanaannaaccnaacaanaanagaaagaggttnnggntaaccttacaanctcccnnttnttntccttnnnaaaaatanaannnnatttaannccananttatttattanttgnganangaattangangaaaanaanaatntngnngaangttcaggntcanangnttntnttntnggannnaatgnngcngcctnnntnnngananaaatttctcnggnaananaactnnatngnatcttnnatnannttnttnattggantggtnnnnaaatntacntannnaaannatttaagtntttnggatttnaaaacnnnaaggangnaaaagaaaaggtanatnttccaacantannngnnaaattngnanagnanaannnantntttattggttattntaagnatggccaaaanggnaagtancnaaaaccaaaactaaacccaccaaaanggaataaanntggtactccaaccnagntaanttttgggtatngngannanattattncaattnnaaatnaaaatnagngntnaatcttaatngtgnntaagcntgtagcttagggtatggttactaatgtatgtgatttatcaatatgatacaattngntgtataagtaattcattaagagagatatattatgtatnatgcaaaaaatagtcaaattaaattctacgatgacanaatcaattatgtttcatttggttatggaaanaagaatttantantgataccaggtttgaatanngagcnantaaaaggaaaagctctacaatttgctttttactatagaaattttttgagagattataaagtttttatatttgatcataaagaacatctcaatganaattatgagattagcgatatggtggaagagattgcttattgtatcaaaaagttgaatttagataaagtagatgttgtaggggtatctcaagggggaatgattgctcaactattanctatnaattaccctgacattgttaaaaaactagttttagtggcaactacatcaagaaataatcctacaacaaacaaggtcgtagatagatggattgttttagctgaaaatggtgagttacaagaactgcaaaaaaatatgattgaaactgtttattcaaaaagatatatagcaaaaaataagtggttatctatattagtacaaattctatttaanccaanattagatcagcttaatagatttattattttagctagancatgcttaaaatttnatgtttttgataaattagataaaattcaatctaaaactctggttataggtgctgcattagatcaagttataccagtagaattttctaatgaacttgctgaaaaaatnnattgtcagaaaattatttntgaaaactctggtcatgcagtacatcaagaagtttctnattttaatagaacagttttaaattttttganaagtagtnattaagaatttaacttttcacttgcgcacggcttagcattcactaaccctttgggtgaggtgtattgaaaactgtacttttaaccattaaaatagaaaggcaggaggtaaacacgaatgctaaataaattaccagagaaattaacactncttagaaaacattacggtctttcacagggtgatgtagcaacaaaaattaatgtgaagtttaccgattatatgaattgggaaaatggtaacagtatcccatcaatatcaaatattcgtaagttatctatgttgtttggtattccggttgaatcttttattgataatcgtaaggaaattgaattgcctgaggtaaaggtagtnccaccagtacaaccagagtcaaaaccagaaccagaacaaaaactagatgaaacattaaagacgggaacaattcatacacaacgagttaattctgttaaaaatgacttaggtagtacacgtgtaatggatgcaggtaagattaagactgccgcaaaggctatcgacacaaaccagcctaaaaaacaagatagtcaaaataatcgtaagaagatttcttatgcgattattgctggatgcttggttgcggttatcgcagttatcgcaattatcctacgctttacagctggtggaaagtcaaatttcactgtagaagtttctgaactaaaccgtatcgcagaaggagatacctatacattatttatcaataagaataatgctttagaagtgtatggtgatttccagtataagaatgagttccaagatgttgtacaggttagtgcgtatggaagtcatgcggttggacttaagaaagatggtacagtcgtaacaaccgataagaatgaggaagttgcgaagtggaagaatatcaaggctatcgctgctggcaaagaccatacggttggtttaacaagtgatggtaaagttctttgtgcgggtagtgaacttgcatgtcaggtcagtgattggacagatgtagagagtgtctacgctggagatgatgtcacatttgcgattgtaaatggacaagtgaaggtgtcaggtaactctgcaaactttagtactattaatgacgcaaagaagttagccgttggagaatcacaagtacttgttttaaagaaagatggcagtgtttctgctgtatccctaaagggaaacagtacaagtgatgtgtctagttgggctaagattgcgtcaattgcggttggtaaaaactatgtagttggtgtacatgaagatggtacagtgagtgttgtttcagaggataaggacttaaaggaaacagttgaagcttggacagatgtgaagtacatcgcagcgtatgatgatacgttagtagctttcaatcgttcgggtaagatgtatggctatggagataactccagtagtcagtacgataattcatttaagacagacgcaaaacagctatctcaagtgaagaacattacattcacagtcacaacagcgaatgtaaatatcgcttgggatccagttgaaaatgcggattactatgaattaacngttaatacgaatccaattacagaacataagaatattatttcnaatagngatagtatcgcatcctcatcgctcaaagatggagagacatacgttgtaacaatcacagcacattccaagaaggaagataagtataagacaagtgagaagacttctatnaactttgcatatagcgcaaagacagtacagcttaactcaccaacagatattactgcnactggattgcagaatgcatggcactttgcatggtctgctgtagagaatgcggataagtataacatctcnattgatggaacagttgcggcatctaatgtagaaggaacatccatnacgattgatggnatctcatttgcggaaggctctgancatgagattagtattacagctctctcatcaaatccagcatacacagaaagtgtgccaacnaaggctaagatgaagtatactatcagcaaaggtaagattaaggttaatcttgaaaaaccagatggtagnagtgcnggttcnaagacatatganctcaatgtaggttcntactatnttcaaaatattatcaaacctagtgatatnccaagtggattcaaactnacanntgaaccngttnnagcngaagttatgaatggncanacaacagaagtaacgattaaattagaagcaaactaatnnnangnanaaanannngnnnnnacttngnnntnnnanaaaannnggnnnnncnnaaaanttngncccattnananatnngnaatnngnnnnntnnnnnaannannaaattnttnnnaagnnnnattatanntgnnnncnnnattnnangaatngntngnaaanatnaantnnannnnnngnannntnttnnccnncttcnnntnnannnnnnnaantnnaangaaaanannnnattnnnagnaaancctataaatacattctttttnnatacatgcattantttctncgaatnctttggagtgttgttgtnccaatnattgtnccaagactaag

SEQ ID NO: 650 - DNA, 4000 bp, Escherichia coli
  misc_feature (1)..(1): n is a, c, g, or t
  misc_feature (4)..(5): n is a, c, g, or t
  misc_feature (9)..(11): n is a, c, g, or t
  misc_feature (13)..(15): n is a, c, g, or t
  misc_feature (17)..(18): n is a, c, g, or t
  misc_feature (20)..(21): n is a, c, g, or t
  misc_feature (24)..(26): n is a, c, g, or t
  misc_feature (29)..(32): n is a, c, g, or t
  misc_feature (35)..(38): n is a, c, g, or t
  misc_feature (40)..(42): n is a, c, g, or t
  misc_feature (44)..(45): n is a, c, g, or t
  misc_feature (47)..(51): n is a, c, g, or t
  misc_feature (53)..(53): n is a, c, g, or t
  misc_feature (55)..(56): n is a, c, g, or t
  misc_feature (58)..(59): n is a, c, g, or t
  misc_feature (61)..(64): n is a, c, g, or t
  misc_feature (66)..(78): n is a, c, g, or t
  misc_feature (80)..(82): n is a, c, g, or t
  misc_feature (84)..(86): n is a, c, g, or t
  misc_feature (89)..(92): n is a, c, g, or t
  misc_feature (94)..(96): n is a, c, g, or t
  misc_feature (98)..(101): n is a, c, g, or t
  misc_feature (104)..(106): n is a, c, g, or t
  misc_feature (108)..(120): n is a, c, g, or t
  misc_feature (122)..(122): n is a, c, g, or t
  misc_feature (124)..(130): n is a, c, g, or t
  misc_feature (132)..(135): n is a, c, g, or t
  misc_feature (137)..(139): n is a, c, g, or t
  misc_feature (141)..(141): n is a, c, g, or t
  misc_feature (144)..(144): n is a, c, g, or t
  misc_feature (147)..(150): n is a, c, g, or t
  misc_feature (152)..(154): n is a, c, g, or t
  misc_feature (156)..(157): n is a, c, g, or t
  misc_feature (159)..(162): n is a, c, g, or t
  misc_feature (165)..(171): n is a, c, g, or t
  misc_feature (173)..(173): n is a, c, g, or t
  misc_feature (175)..(175): n is a, c, g, or t
  misc_feature (177)..(177): n is a, c, g, or t
  misc_feature (179)..(181): n is a, c, g, or t
  misc_feature (184)..(187): n is a, c, g, or t
  misc_feature (189)..(189): n is a, c, g, or t
  misc_feature (191)..(197): n is a, c, g, or t
  misc_feature (199)..(204): n is a, c, g, or t
  misc_feature (206)..(206): n is a, c, g, or t
  misc_feature (208)..(212): n is a, c, g, or t
  misc_feature (214)..(214): n is a, c, g, or t
  misc_feature (216)..(216): n is a, c, g, or t
  misc_feature (218)..(234): n is a, c, g, or t
  misc_feature (236)..(239): n is a, c, g, or t
  misc_feature (241)..(243): n is a, c, g, or t
  misc_feature (245)..(245): n is a, c, g, or t
  misc_feature (252)..(252): n is a, c, g, or t
  misc_feature (254)..(258): n is a, c, g, or t
  misc_feature (260)..(262): n is a, c, g, or t
  misc_feature (264)..(264): n is a, c, g, or t
  misc_feature (266)..(267): n is a, c, g, or t
  misc_feature (269)..(274): n is a, c, g, or t
  misc_feature (276)..(276): n is a, c, g, or t
  misc_feature (279)..(282): n is a, c, g, or t
  misc_feature (285)..(288): n is a, c, g, or t
  misc_feature (290)..(291): n is a, c, g, or t
  misc_feature (293)..(294): n is a, c, g, or t
  misc_feature (296)..(302): n is a, c, g, or t
  misc_feature (304)..(305): n is a, c, g, or t
  misc_feature (307)..(315): n is a, c, g, or t
  misc_feature (317)..(319): n is a, c, g, or t
  misc_feature (321)..(321): n is a, c, g, or t
  misc_feature (323)..(327): n is a, c, g, or t
  misc_feature (330)..(335): n is a, c, g, or t
  misc_feature (338)..(350): n is a, c, g, or t
  misc_feature (352)..(359): n is a, c, g, or t
  misc_feature (361)..(363): n is a, c, g, or t
  misc_feature (365)..(366): n is a, c, g, or t
  misc_feature (369)..(375): n is a, c, g, or t
  misc_feature (377)..(377): n is a, c, g, or t
  misc_feature (379)..(380): n is a, c, g, or t
  misc_feature (382)..(391): n is a, c, g, or t
  misc_feature (393)..(393): n is a, c, g, or t
  misc_feature (395)..(395): n is a, c, g, or t
  misc_feature (397)..(403): n is a, c, g, or t
  misc_feature (405)..(406): n is a, c, g, or t
  misc_feature (408)..(410): n is a, c, g, or t
  misc_feature (412)..(416): n is a, c, g, or t
  misc_feature (418)..(421): n is a, c, g, or t
  misc_feature (423)..(438): n is a, c, g, or t
  misc_feature (440)..(454): n is a, c, g, or t
  misc_feature (459)..(460): n is a, c, g, or t
  misc_feature (463)..(463): n is a, c, g, or t
  misc_feature (465)..(467): n is a, c, g, or t
  misc_feature (469)..(469): n is a, c, g, or t
  misc_feature (471)..(472): n is a, c, g, or t
  misc_feature (475)..(480): n is a, c, g, or t
  misc_feature (482)..(483): n is a, c, g, or t
  misc_feature (485)..(489): n is a, c, g, or t
  misc_feature (492)..(496): n is a, c, g, or t
  misc_feature (499)..(504): n is a, c, g, or t
  misc_feature (506)..(507): n is a, c, g, or t
  misc_feature (509)..(510): n is a, c, g, or t
  misc_feature (512)..(512): n is a, c, g, or t
  misc_feature (515)..(521): n is a, c, g, or t
  misc_feature (523)..(524): n is a, c, g, or t
  misc_feature (526)..(532): n is a, c, g, or t
  misc_feature (537)..(538): n is a, c, g, or t
  misc_feature (541)..(544): n is a, c, g, or t
  misc_feature (546)..(549): n is a, c, g, or t
  misc_feature (551)..(552): n is a, c, g, or t
  misc_feature (556)..(556): n is a, c, g, or t
  misc_feature (558)..(559): n is a, c, g, or t
  misc_feature (561)..(564): n is a, c, g, or t
  misc_feature (566)..(574): n is a, c, g, or t
  misc_feature (576)..(576): n is a, c, g, or t
  misc_feature (578)..(579): n is a, c, g, or t
  misc_feature (581)..(583): n is a, c, g, or t
  misc_feature (585)..(596): n is a, c, g, or t
  misc_feature (598)..(604): n is a, c, g, or t
  misc_feature (606)..(607): n is a, c, g, or t
  misc_feature (609)..(611): n is a, c, g, or t
  misc_feature (613)..(614): n is a, c, g, or t
  misc_feature (616)..(616): n is a, c, g, or t
  misc_feature (618)..(623): n is a, c, g, or t
  misc_feature (625)..(626): n is a, c, g, or t
  misc_feature (628)..(631): n is a, c, g, or t
  misc_feature (633)..(634): n is a, c, g, or t
  misc_feature (636)..(641): n is a, c, g, or t
  misc_feature (644)..(646): n is a, c, g, or t
  misc_feature (649)..(650): n is a, c, g, or t
  misc_feature (653)..(655): n is a, c, g, or t
  misc_feature (657)..(661): n is a, c, g, or t
  misc_feature (663)..(663): n is a, c, g, or t
  misc_feature (666)..(666): n is a, c, g, or t
  misc_feature (669)..(678): n is a, c, g, or t
  misc_feature (681)..(681): n is a, c, g, or t
  misc_feature (683)..(683): n is a, c, g, or t
  misc_feature (685)..(685): n is a, c, g, or t
  misc_feature (687)..(687): n is a, c, g, or t
  misc_feature (690)..(690): n is a, c, g, or t
  misc_feature (692)..(697): n is a, c, g, or t
  misc_feature (699)..(701): n is a, c, g, or t
  misc_feature (703)..(703): n is a, c, g, or t
  misc_feature (705)..(706): n is a, c, g, or t
  misc_feature (709)..(712): n is a, c, g, or t
  misc_feature (716)..(717): n is a, c, g, or t
  misc_feature (720)..(725): n is a, c, g, or t
  misc_feature (727)..(730): n is a, c, g, or t
  misc_feature (732)..(738): n is a, c, g, or t
  misc_feature (740)..(740): n is a, c, g, or t
  misc_feature (742)..(747): n is a, c, g, or t
  misc_feature (749)..(752): n is a, c, g, or t
  misc_feature (754)..(755): n is a, c, g, or t
  misc_feature (758)..(759): n is a, c, g, or t
  misc_feature (761)..(761): n is a, c, g, or t
  misc_feature (764)..(765): n is a, c, g, or t
  misc_feature (767)..(772): n is a, c, g, or t
  misc_feature (774)..(777): n is a, c, g, or t
  misc_feature (779)..(781): n is a, c, g, or t
  misc_feature (783)..(790): n is a, c, g, or t
  misc_feature (792)..(796): n is a, c, g, or t
  misc_feature (800)..(804): n is a, c, g, or t
  misc_feature (806)..(809): n is a, c, g, or t
  misc_feature (811)..(813): n is a, c, g, or t
  misc_feature (816)..(819): n is a, c, g, or t
  misc_feature (822)..(825): n is a, c, g, or t
  misc_feature (827)..(832): n is a, c, g, or t
  misc_feature (836)..(836): n is a, c, g, or t
  misc_feature (838)..(839): n is a, c, g, or t
  misc_feature (841)..(843): n is a, c, g, or t
  misc_feature (845)..(851): n is a, c, g, or t
  misc_feature (854)..(856): n is a, c, g, or t
  misc_feature (858)..(858): n is a, c, g, or t
  misc_feature (861)..(863): n is a, c, g, or t
  misc_feature (868)..(868): n is a, c, g, or t
  misc_feature (871)..(881): n is a, c, g, or t
  misc_feature (884)..(885): n is a, c, g, or t
  misc_feature (887)..(888): n is a, c, g, or t
  misc_feature (892)..(893): n is a, c, g, or t
  misc_feature (897)..(900): n is a, c, g, or t
  misc_feature (902)..(905): n is a, c, g, or t
  misc_feature (907)..(907): n is a, c, g, or t
  misc_feature (909)..(912): n is a, c, g, or t
  misc_feature (917)..(920): n is a, c, g, or t
  misc_feature (922)..(922): n is a, c, g, or t
  misc_feature (924)..(927): n is a, c, g, or t
  misc_feature (929)..(930): n is a, c, g, or t
  misc_feature (932)..(937): n is a, c, g, or t
  misc_feature (941)..(944): n is a, c, g, or t
  misc_feature (946)..(953): n is a, c, g, or t
  misc_feature (955)..(961): n is a, c, g, or t
  misc_feature (963)..(965): n is a, c, g, or t
  misc_feature (967)..(968): n is a, c, g, or t
  misc_feature (970)..(971): n is a, c, g, or t
  misc_feature (973)..(974): n is a, c, g, or t
  misc_feature (977)..(979): n is a, c, g, or t
  misc_feature (981)..(983): n is a, c, g, or t
  misc_feature (985)..(987): n is a, c, g, or t
  misc_feature (989)..(995): n is a, c, g, or t
  misc_feature (997)..(999): n is a, c, g, or t
  misc_feature (1001)..(1004): n is a, c, g, or t
  misc_feature (1006)..(1014): n is a, c, g, or t
  misc_feature (1016)..(1018): n is a, c, g, or t
  misc_feature (1021)..(1021): n is a, c, g, or t
  misc_feature (1023)..(1032): n is a, c, g, or t
  misc_feature (1034)..(1034): n is a, c, g, or t
  misc_feature (1036)..(1040): n is a, c, g, or t
  misc_feature (1042)..(1046): n is a, c, g, or t
  misc_feature (1048)..(1049): n is a, c, g, or t
  misc_feature (1051)..(1051): n is a, c, g, or t
  misc_feature (1053)..(1056): n is a, c, g, or t
  misc_feature (1059)..(1060): n is a, c, g, or t
  misc_feature (1062)..(1065): n is a, c, g, or t
  misc_feature (1067)..(1069): n is a, c, g, or t
  misc_feature (1071)..(1073): n is a, c, g, or t
  misc_feature (1075)..(1079): n is a, c, g, or t
  misc_feature (1082)..(1086): n is a, c, g, or t
  misc_feature (1088)..(1094): n is a, c, g, or t
  misc_feature (1099)..(1099): n is a, c, g, or t
  misc_feature (1101)..(1106): n is a, c, g, or t
  misc_feature (1108)..(1108): n is a, c, g, or t
  misc_feature (1112)..(1115): n is a, c, g, or t
  misc_feature (1117)..(1121): n is a, c, g, or t
  misc_feature (1123)..(1123): n is a, c, g, or t
  misc_feature (1126)..(1129): n is a, c, g, or t
  misc_feature (1132)..(1132): n is a, c, g, or t
  misc_feature (1134)..(1136): n is a, c, g, or t
  misc_feature (1139)..(1143): n is a, c, g, or t
  misc_feature (1145)..(1149): n is a, c, g, or t
  misc_feature (1151)..(1153): n is a, c, g, or t
  misc_feature (1157)..(1159): n is a, c, g, or t
  misc_feature (1161)..(1163): n is a, c, g, or t
  misc_feature (1165)..(1166): n is a, c, g, or t
  misc_feature (1168)..(1168): n is a, c, g, or t
  misc_feature (1170)..(1177): n is a, c, g, or t
  misc_feature (1179)..(1180): n is a, c, g, or t
  misc_feature (1182)..(1184): n is a, c, g, or t
  misc_feature (1186)..(1188): n is a, c, g, or t
  misc_feature (1190)..(1205): n is a, c, g, or t
  misc_feature (1207)..(1209): n is a, c, g, or t
  misc_feature (1211)..(1211): n is a, c, g, or t
  misc_feature (1213)..(1219): n is a, c, g, or t
  misc_feature (1221)..(1227): n is a, c, g, or t
  misc_feature (1229)..(1230): n is a, c, g, or t
  misc_feature (1232)..(1234): n is a, c, g, or t
  misc_feature (1236)..(1236): n is a, c, g, or t
  misc_feature (1238)..(1246): n is a, c, g, or t
  misc_feature (1248)..(1252): n is a, c, g, or t
  misc_feature (1254)..(1258): n is a, c, g, or t
  misc_feature (1260)..(1261): n is a, c, g, or t
  misc_feature (1263)..(1265): n is a, c, g, or t
  misc_feature (1267)..(1270): n is a, c, g, or t
  misc_feature (1272)..(1279): n is a, c, g, or t
  misc_feature (1282)..(1282): n is a, c, g, or t
  misc_feature (1284)..(1284): n is a, c, g, or t
  misc_feature (1286)..(1289): n is a, c, g, or t
  misc_feature (1291)..(1305): n is a, c, g, or t
  misc_feature (1307)..(1316): n is a, c, g, or t
  misc_feature (1319)..(1326): n is a, c, g, or t
  misc_feature (1328)..(1329): n is a, c, g, or t
  misc_feature (1332)..(1338): n is a, c, g, or t
  misc_feature (1341)..(1345): n is a, c, g, or t
  misc_feature (1347)..(1353): n is a, c, g, or t
  misc_feature (1355)..(1355): n is a, c, g, or t
  misc_feature (1357)..(1357): n is a, c, g, or t
  misc_feature (1361)..(1363): n is a, c, g, or t
  misc_feature (1365)..(1369): n is a, c, g, or t
  misc_feature (1372)..(1374): n is a, c, g, or t
  misc_feature (1376)..(1377): n is a, c, g, or t
  misc_feature (1379)..(1379): n is a, c, g, or t
  misc_feature (1382)..(1384): n is a, c, g, or t
  misc_feature (1386)..(1390): n is a, c, g, or t
  misc_feature (1392)..(1398): n is a, c, g, or t
  misc_feature (1400)..(1405): n is a, c, g, or t
  misc_feature (1407)..(1410): n is a, c, g, or t
  misc_feature (1412)..(1414): n is a, c, g, or t
  misc_feature (1417)..(1417): n is a, c, g, or t
  misc_feature (1419)..(1422): n is a, c, g, or t
  misc_feature (1424)..(1425): n is a, c, g, or t
  misc_feature (1427)..(1432): n is a, c, g, or t
  misc_feature (1435)..(1441): n is a, c, g, or t
  misc_feature (1444)..(1454): n is a, c, g, or t
  misc_feature (1456)..(1457): n is a, c, g, or t
  misc_feature (1459)..(1459): n is a, c, g, or t
  misc_feature (1461)..(1463): n is a, c, g, or t
  misc_feature (1465)..(1467): n is a, c, g, or t
  misc_feature (1469)..(1469): n is a, c, g, or t
  misc_feature (1471)..(1473): n is a, c, g, or t
  misc_feature (1475)..(1476): n is a, c, g, or t
  misc_feature (1479)..(1486): n is a, c, g, or t
  misc_feature (1489)..(1495): n is a, c, g, or t
  misc_feature (1497)..(1497): n is a, c, g, or t
  misc_feature (1499)..(1501): n is a, c, g, or t
  misc_feature (1503)..(1506): n is a, c, g, or t
  misc_feature (1509)..(1513): n is a, c, g, or t
  misc_feature (1515)..(1519): n is a, c, g, or t
  misc_feature (1521)..(1521): n is a, c, g, or t
  misc_feature (1524)..(1527): n is a, c, g, or t
  misc_feature (1529)..(1532): n is a, c, g, or t
  misc_feature (1534)..(1545): n is a, c, g, or t
  misc_feature (1547)..(1562): n is a, c, g, or t
  misc_feature (1564)..(1564): n is a, c, g, or t
  misc_feature (1566)..(1566): n is a, c, g, or t
  misc_feature (1568)..(1579): n is a, c, g, or t
  misc_feature (1581)..(1581): n is a, c, g, or t
  misc_feature (1583)..(1593): n is a, c, g, or t
  misc_feature (1597)..(1598): n is a, c, g, or t
  misc_feature (1600)..(1605): n is a, c, g, or t
  misc_feature (1608)..(1610): n is a, c, g, or t
  misc_feature (1612)..(1615): n is a, c, g, or t
  misc_feature (1617)..(1623): n is a, c, g, or t
  misc_feature (1625)..(1632): n is a, c, g, or t
  misc_feature (1636)..(1636): n is a, c, g, or t
  misc_feature (1638)..(1646): n is a, c, g, or t
  misc_feature (1649)..(1651): n is a, c, g, or t
  misc_feature (1655)..(1656): n is a, c, g, or t
  misc_feature (1658)..(1660): n is a, c, g, or t
  misc_feature (1662)..(1668): n is a, c, g, or t
  misc_feature (1670)..(1673): n is a, c, g, or t
  misc_feature (1675)..(1679): n is a, c, g, or t
  misc_feature (1681)..(1685): n is a, c, g, or t
  misc_feature (1687)..(1690): n is a, c, g, or t
  misc_feature (1692)..(1692): n is a, c, g, or t
  misc_feature (1695)..(1696): n is a, c, g, or t
  misc_feature (1698)..(1701): n is a, c, g, or t
  misc_feature (1705)..(1707): n is a, c, g, or t
  misc_feature (1710)..(1712): n is a, c, g, or t
  misc_feature (1714)..(1715): n is a, c, g, or t
  misc_feature (1717)..(1717): n is a, c, g, or t
  misc_feature (1721)..(1722): n is a, c, g, or t
  misc_feature (1724)..(1728): n is a, c, g, or t
  misc_feature (1730)..(1735): n is a, c, g, or t
  misc_feature (1737)..(1746): n is a, c, g, or t
  misc_feature (1748)..(1758): n is a, c, g, or t
  misc_feature (1760)..(1763): n is a, c, g, or t
  misc_feature (1765)..(1766): n is a, c, g, or t
  misc_feature (1772)..(1774): n is a, c, g, or t
  misc_feature (1776)..(1783): n is a, c, g, or t
  misc_feature (1785)..(1786): n is a, c, g, or t
  misc_feature (1788)..(1789): n is a, c, g, or t
  misc_feature (1791)..(1797): n is a, c, g, or t
  misc_feature (1799)..(1805): n is a, c, g, or t
  misc_feature (1808)..(1808): n is a, c, g, or t
  misc_feature (1810)..(1811): n is a, c, g, or t
  misc_feature (1813)..(1814): n is a, c, g, or t
  misc_feature (1816)..(1821): n is a, c, g, or t
  misc_feature (1826)..(1834): n is a, c, g, or t
  misc_feature (1988)..(1988): n is a, c, g, or t
  misc_feature (1990)..(1990): n is a, c, g, or t
  misc_feature (2006)..(2006): n is a, c, g, or t
  misc_feature (2010)..(2010): n is a, c, g, or t
  misc_feature (2012)..(2012): n is a, c, g, or t
  misc_feature (2857)..(2857): n is a, c, g, or t
  misc_feature (2975)..(2975): n is a, c, g, or t
  misc_feature (3090)..(3090): n is a, c, g, or t
  misc_feature (3092)..(3092): n is a, c, g, or t
  misc_feature (3335)..(3335): n is a, c, g, or t
  misc_feature (3340)..(3340): n is a, c, g, or t
  misc_feature (3416)..(3416): n is a, c, g, or t
  misc_feature (3425)..(3425): n is a, c, g, or t
  misc_feature (3466)..(3466): n is a, c, g, or t
  misc_feature (3539)..(3539): n is a, c, g, or t
  misc_feature (3803)..(3803): n is a, c, g, or t
  misc_feature (3968)..(3968): n is a, c, g, or t
naanncccnnntnnncnncnnggnnnccnnnnccnnnntnnngnngnnnnncnannanntnnnnannnnnnnnnnnnncnnnannnccnnnngnnncnnnnccnnncnnnnnnnnnnnnncntnnnnnnngnnnngnnnanccnggnnnncnnngnnannnnccnnnnnnngntnangnnnggnnnncnannnnnnnannnnnncntnnnnngntncnnnnnnnnnnnnnnnnncnnnngnnngnttttttncnnnnncnnncngnnannnnnnanccnnnncgnnnncnncnncnnnnnnnannannnnnnnnngnnnangnnnnnggnnnnnnaannnnnnnnnnnnngnnnnnnnntnnntnnttnnnnnnntntnngnnnnnnnnnngnangnnnnnnngnntnnntnnnnncnnnncnnnnnnnnnnnnnnnngnnnnnnnnnnnnnnnttttnnaantnnntncnnaannnnnncnncnnnnnggnnnnnaannnnnncnncnncnggnnnnnnncnntnnnnnnnaaaannggnnnntnnnncnntttngnnannnncnnnnnnnnntncnntnnncnnnnnnnnnnnngnnnnnnngnngnnnanncnannnnnntnntnnnnannannnnnnaannnccnnccnnncnnnnngnccnggnnnnnnnnnnttngnangnttncnnnnnnannncntnnccnnnnaaannagnnnnnncnnnnannnnnnntngnnnnnncnnnntnnccnncnggnncnnnnnncnnnncnnncnnnnnnnnannnnncccnnnnncnnnngnnnaannnnttnnnngnnnnnngggntnnannncnnnnnnnaannnanctnnnccccnggnnnnnnnnnnnttnnannaaanncctnnnngnnnntnannnnccccnnnncnannnnanncnnnnnncccnnnnannnnnnnnannnnnnntnnngnntnntnnccnnnannntnnncnnnnnnntnnngnnnncnnnnnnnnncnnnccnannnnnnnnnncntnnnnncnnnnncnncnannnnttnnannnncnnngnnnannnnnggnnnnngnnnnnnnccccntnnnnnncnaaannnntnnnnncnggnnnnttngnnnccnnnnnannnnncnnncccnnngnnncnntnannnnnnnnannannntnnngnnnnnnnnnnnnnnnnannncngnnnnnnncnnnnnnncnncnnncngnnnnnnnnncnnnnncnnnnntnngnnntnnnnannnnnnnnaantncnnnncnnnnnnnnnnnnnnnannnnnnnnnnaannnnnnnngnnttnnnnnnnggnnnnntnnnnnnngncnaaannngnnnnnccnnncnngnaannngnnnnnannnnnnncnnnnnnannnngnnnaangnnnngnncnnnnnnggnnnnnnnggnnnnnnnnnnnanncnannngnnncnannnannccnnnnnnnnccnnnnnnncngnnngnnnnaannnnntnnnnnanccnnnncnnnntnnnnnnnnnnnncnnnnnnnnnnnnnnnntngncnnnnnnnnnnnngntnnnnnnnnnnntttnncnnnnnnggnnnannnntnnnnnnngnnnnnnnngggnannnnnnnnnaannncccnncnnngnnnnnnncnnnngnnnnntnnnnnannnntnccnncnnnngggnnnaannncnntngggnncnnnnngnnnnnntnnnnnnnnnncnnnnnnnnnnncnnnntnncccccnnnannnnnnnngnngnncnnnnnnncnnnnnnnccngnnanngnnnnnnttttnnnnnnnnnccccccttattgcgccgatggcgctcgaaacgccctttttctcagtcaagctaggcagagcgcggagcctatagtacgagaaaaaaggcgggggtgcccctgataacgctttgtcagcgaaataagaagcgcgcattaaggcgcttgtaggatntnatataaatataagttntatntnttataaccactgaagagcacgatatgatcagtgggaatggggattattcaggtggcccgactcagcaacatactccgaatgtgccctatcgcttttgtgggattcagccccttgggacacacgttcacgcagttctgaatcccgtggcagcgaaatacgctgaagggatcgtctaactttgccaaacgctcatccgtcgctgtatcccgactatcggccaggaaccggtaagcttgcaaaaggcctgcggggccgatgaaccgatcggggttccaccagaacgaggggcaactggtggaacagcaggcacacaaaatacattcgtagaggccgtcgagttgcgcccgctcctcagggctttgcagtcgttctattgctggcgcgggtgagggattctgtaagtacggttgaaccttctcgtactgggcgtagaagagactcatgtccacgaccagatctctaatcaccggcagcccaggtaaaggccgaatgactaatttattattttttaccgactctgacagggccgagatgcacgccaacccatttttcccgttcatgttgagcccgtccgagccgcaaacaccttcccgacagctcctgcggtaggtcacgctgccatcgtgctcggcttttatcatctccaatacgtctagcaccatcaggtcacgcccgcccgtgtcaaccgaaaagtcctgcatatatggggcgtcgtcggtctctgggttatagcgataaatactcacctgtagcatctttctgaactcctagcttgctcagtaacttcgggctttcggctggaacgtttcaaccgtatgaggcgtaaagttgacgccccgcttcgnaacctttttcccttggctgtaatacagcgagtgacacaaccaattgtcgtcgtcgcgctccgtgtaatcttcccgcgcgtgcgcgccgcggctctcgtcacgcgcctctgccaccacngcagtcgcttcagcggtctcaaacaggttttgcaattccaggcactcaatacgcgaggtgttgaacgaggaagagcgatctgcgagctcaaccgcctccactcgctcccttaaancngctaatttggcgatcccctcgcgcataaattcgccggttctgaatacgccaaagtggttctgcatgatctcctgcagttcgcggcgcaagggcgctactgcctcaccaccggtgcgatcatttaacgcttgcagccgttcgctggcagcttcgacgtcagactgcgacgcgtcccgcaactcaatgccctcacgtagcgccttctcgatgaacaagcctgaggctcgaccaaaaacgaccagntccancaaagagttaccaccgaggcgattggcgccgtgaacagacacgcacgcgacctcgccacaggcataaagacctggnatgacctgntcctgcccatcattatcgaccgtgagcgcttgcccatgaanattcgttgggatccctcccatcatgtaatgacaggttggcactaccggaatcggctctttcactggatcgacntgtgcaaatgttcggctcaattcgcaaatcccaggcagccttgactccaacacctcttcaccgagatggtctagcttgagtttgacgtggtctccattaggcccacagccacgaccctccagaatctccaagaccattgatcgcgcaaccacatctcgccctgccagatccttggcattaggcgcataccgctccataaagcgctcgccgtctttattaatcaggtagccgccctcaccgcgacacccctcagtgaccaaggtnccagcaccgtaaatgcccgtaggatggaactgccacatttccatatcctgagcaggcacaccggctctcagcgccatacccatcccgtctccggtgttaatgtgggcattagtagttgacgcataaatgcgaccagcaccgccagtcgcaaataccgttgccttngatttgacatacaccgtctcgccggtttcgat

SEQ ID NO: 651 - DNA, 4000 bp, Escherichia coli
  misc_feature (393)..(393): n is a, c, g, or t
  misc_feature (1985)..(1985): n is a, c, g, or t
  misc_feature (1990)..(1990): n is a, c, g, or t
  misc_feature (2013)..(2013): n is a, c, g, or t
  misc_feature (2812)..(2812): n is a, c, g, or t
cactgcggccatgttctgggattttttgatctgatccccctcctctcttttgcggtccttcggggacgctgtcgctattgccacaaacctctaagctggcagtatcctctcgtcgagggtgcgaccggattgctctttgcggctttggcagcgacccaattaacaagtattttggggttggtttttctactggtgagtgtctccaccctgatcgtgattttcatcaccgatttttcggcccaggtgatctttgaccaaactctctggattgccggaggagcagccttcttctatcgcctttttctcgggggatttcaaccggccgagatagtccccgacctgataaccgcgttcctggtttttctcttccttctttcgatccgtttgattacnaaaaagaaaggcctgggggatggtgatcccctcctcggttttgcagcggcgcttttggtggggttcccgaatgccctggtggaactctttctagcgttcgttttgggaggagcaatcggtgcggtcttcgttctatcaggcaaacggcagctcaaagatcgaatcgcctttggcccttttctggtgaccgcaaccttcctaacgatcttcttcggcgatcgtctgcttgactggtacctaagatttctgggattatagactagttatgaaaagaggttttactttacttgagcttctggtggtgatcacgatcatcggcttgctggcttcggttggtctggcttcctacactcgggcccaggcccgggcgcgggatgcgaagcggcagagcgacctcagttcccttcgaaattctctggaaatttactattccgaaaacaacagctatgttgacaccggcggatcttggcaatctccagagacggctctggccggtttggttccggattacgccaaggtcttgccaaccgatcccggcggcgagggtttggactacaaatatcgctccgttaccaatcaggggtactgcttagaagcgaagttggaaacggccgaatcaccgacgaccacctgtaccgtttcgctggataccaattacaactatggtgttgggaatccctaacccgtgaaccgtgaaccgtcaacttttaactaggcgacccgctttctccctcatcgaacttctcgtcgtgatcacgatcgtggctcttttaacgagtgtgaccgcggcggccttcaataacttttcccgccgccaacggctgactcaggcggccaaaaaaatggacgagatcctgcgggatgctcagacccgggccctctcttcggtggatggcctgaactggggagtgcacctggagaaagaccagggaaattcctcgattttttcaaccggttccgattttgccagtgcctctcagatcctgaaccggaatttggaatccgagataatcgtctccgatctgacgattacggagaacgaccacgtgaatatcatctttacggtcttgaacggttcggtggtctttgcggcggacgacggatcctgcttgggtggttcggccgattcctcctgtggagctgatcccgaccgctgtttggcgattggaattaacttgcaaggaacgacagataaacgctatcttaaagtgaatgaaaggaacatctttgaaagcgatgcgcttaccccttgcccgtagcggccaatctctagttgaagccattgtcgcagtgggaattacccttttggtgatcaccgggttagtagttttggcggtgggagcggttcgttccgccactctcgcccgcaaccgttccttggcggtacagtacgcccaggaagggctggaggcgcttcgttccgttcgggaccgtagcttctccgagcttccaagcagcggaacaagtcgcgtcgtttggacaggatcggaatggggagttttggcagggacggaaacaatcggcacttacaccaggagctttacccccgagcagatttcggcgggaaaactcaagattctgctctcggtggnttggncagattcggccggcgaccatacngttgatctgaccacttacttgaccgattggcaatgaaacgaggattcatctctgaacttgtgaagagacaaagctatcgagcgaagcgagatgggtttatccccgagtttgcgaggggacgaaatcctcaagcaaagcgaagaggtttcacactactagaacttttggtcgtgatcgggattgttgcgattgtcggcgtgattgcggccgatatctttgccaacgtcacccgttcttacaacaaggccgatatcatcactcgggtgcagcgaagcggaaattcgatcctagcgcagatgagcggcgaaatccggaattcccgcggggtggtctcccctgcccctggatcggtggggacctctctaacgattgaggacgcttccggaaaccaagtcacctttgatttctccccggcggcaggagggaacaacggcgatgtctcccgaaacggggtggcgatttcggatagcgatctttccaccggagtaaatattaccaatctcgcttttaccgtcctcgataccagaccgttggtggtcggaatcagcttgagcttggaacagccgttgggggtgccgggacggattgacttccaggccgggaccacaatgcagacatcggtttccctccgcacctatgagtaagcaaataagttaaaatgattaaagtgaaaaaaggacaagctctaatcctcattcttttggtgatggcgatttccctgactctgggtgtttcggtcgcttcccgctcgatcaccaccttaaaacaggtttctttttcggcccaatcggcccaggcnttggcctttgccgagggagggattgaagaggcgctcaaatgcctggatgacgggagttgcgcggttccttccgatccagcggcggtcgatctaactggagacggcaccaacgacttcgattatcggattacggctctgggcggggcggttttggattcgttccctcctcttagccgcgacgaggcgatcgaattgagtctgagcggttatccctccagcactccgatgtacatctcctgggtcaacaccgccaagccatcggaggtggccgatccggcggcggtcgagttcgccgcaatatatcaggaggcaggggtctacaaggttctgcgttacgcctatgatccggatgcgtcccgggccagcgagaacggcttcttcacaccgtttaccggaggtttcagcgtcaacggcgtaacctacgcctaccgtgtttcgatttcggtcccctttacaccgatcgctctccggatccggccgctttactcgacgactgcttcttccttcgttttctcggcggaaaccggtcggaccttgccgaccaccggttcacggatcgaatcaaccggcacttcgggatcggtccagcgcaagatcgaagtcctgcggaccaactcctccctctcggaactatttgatttcgcgctcttctccggatctgaaacaagtcccctatccaaataatttccatctgttagaatttccccgtgcagtcctcgcttaactcggttgcaatttttcgctttcgtgaaaaggtgcagccgttaattttcgcgaagcgaaaaactagatcgccaaaagcgatcgtccttttcgacatcgattccactcttttgaatgggaccaaggtctactctgctaccttgactcatttgattcgtaagtttaatcgggccgatctgacggctttaaggtacctgctttttaggcgtccaaaaggattcctcggttctccggcggccaagaacagcttcctggcgccgcagcactaccgggacgcgctgtttgaagacgttctaccgacgctccaaaaattgaaaggaaaggcctccctgggcattttttcgcagggcccgggtcggctgcagcgggcaaagctctacttgagcgggattgagagctatttttcgcccgaactcacatttatctttcctccgcgcaagattttaaaggcgaaacggatcctgg

SEQ ID NO: 652 - DNA, 4000 bp, Escherichia coli
  misc_feature (1)..(5): n is a, c, g, or t
  misc_feature (7)..(9): n is a, c, g, or t
  misc_feature (11)..(15): n is a, c, g, or t
  misc_feature (17)..(21): n is a, c, g, or t
  misc_feature (23)..(25): n is a, c, g, or t
  misc_feature (30)..(32): n is a, c, g, or t
  misc_feature (35)..(39): n is a, c, g, or t
  misc_feature (41)..(47): n is a, c, g, or t
  misc_feature (49)..(51): n is a, c, g, or t
  misc_feature (53)..(54): n is a, c, g, or t
  misc_feature (56)..(60): n is a, c, g, or t
  misc_feature (62)..(68): n is a, c, g, or t
  misc_feature (70)..(71): n is a, c, g, or t
  misc_feature (73)..(73): n is a, c, g, or t
  misc_feature (76)..(78): n is a, c, g, or t
  misc_feature (80)..(82): n is a, c, g, or t
  misc_feature (85)..(87): n is a, c, g, or t
  misc_feature (90)..(100): n is a, c, g, or t
  misc_feature (102)..(108): n is a, c, g, or t
  misc_feature (110)..(115): n is a, c, g, or t
  misc_feature (118)..(122): n is a, c, g, or t
  misc_feature (124)..(125): n is a, c, g, or t
  misc_feature (127)..(127): n is a, c, g, or t
  misc_feature (130)..(130): n is a, c, g, or t
  misc_feature (132)..(134): n is a, c, g, or t
  misc_feature (137)..(137): n is a, c, g, or t
  misc_feature (139)..(141): n is a, c, g, or t
  misc_feature (143)..(145): n is a, c, g, or t
  misc_feature (147)..(149): n is a, c, g, or t
  misc_feature (151)..(151): n is a, c, g, or t
  misc_feature (153)..(156): n is a, c, g, or t
  misc_feature (158)..(162): n is a, c, g, or t
  misc_feature (164)..(169): n is a, c, g, or t
  misc_feature (171)..(184): n is a, c, g, or t
  misc_feature (187)..(189): n is a, c, g, or t
  misc_feature (191)..(192): n is a, c, g, or t
  misc_feature (195)..(197): n is a, c, g, or t
  misc_feature (199)..(200): n is a, c, g, or t
  misc_feature (202)..(210): n is a, c, g, or t
  misc_feature (212)..(215): n is a, c, g, or t
  misc_feature (217)..(221): n is a, c, g, or t
  misc_feature (223)..(225): n is a, c, g, or t
  misc_feature (227)..(237): n is a, c, g, or t
  misc_feature (239)..(243): n is a, c, g, or t
  misc_feature (245)..(246): n is a, c, g, or t
  misc_feature (249)..(250): n is a, c, g, or t
  misc_feature (255)..(256): n is a, c, g, or t
  misc_feature (258)..(258): n is a, c, g, or t
  misc_feature (260)..(264): n is a, c, g, or t
  misc_feature (266)..(273): n is a, c, g, or t
  misc_feature (275)..(286): n is a, c, g, or t
  misc_feature (289)..(289): n is a, c, g, or t
  misc_feature (291)..(297): n is a, c, g, or t
  misc_feature (299)..(300): n is a, c, g, or t
  misc_feature (302)..(302): n is a, c, g, or t
  misc_feature (304)..(308): n is a, c, g, or t
  misc_feature (310)..(316): n is a, c, g, or t
  misc_feature (318)..(318): n is a, c, g, or t
  misc_feature (320)..(327): n is a, c, g, or t
  misc_feature (329)..(331): n is a, c, g, or t
  misc_feature (333)..(333): n is a, c, g, or t
  misc_feature (335)..(349): n is a, c, g, or t
  misc_feature (352)..(352): n is a, c, g, or t
  misc_feature (354)..(355): n is a, c, g, or t
  misc_feature (359)..(364): n is a, c, g, or t
  misc_feature (367)..(367): n is a, c, g, or t
  misc_feature (370)..(370): n is a, c, g, or t
  misc_feature (372)..(373): n is a, c, g, or t
  misc_feature (376)..(377): n is a, c, g, or t
  misc_feature (379)..(380): n is a, c, g, or t
  misc_feature (382)..(382): n is a, c, g, or t
  misc_feature (387)..(387): n is a, c, g, or t
  misc_feature (389)..(392): n is a, c, g, or t
  misc_feature (394)..(395): n is a, c, g, or t
  misc_feature (398)..(399): n is a, c, g, or t
  misc_feature (402)..(402): n is a, c, g, or t
  misc_feature (404)..(407): n is a, c, g, or t
  misc_feature (411)..(420): n is a, c, g, or t
  misc_feature (422)..(422): n is a, c, g, or t
  misc_feature (424)..(425): n is a, c, g, or t
  misc_feature (427)..(430): n is a, c, g, or t
  misc_feature (432)..(433): n is a, c, g, or t
  misc_feature (436)..(436): n is a, c, g, or t
  misc_feature (441)..(441): n is a, c, g, or t
  misc_feature (443)..(443): n is a, c, g, or t
  misc_feature (445)..(448): n is a, c, g, or t
  misc_feature (452)..(452): n is a, c, g, or t
  misc_feature (456)..(458): n is a, c, g, or t
  misc_feature (460)..(463): n is a, c, g, or t
  misc_feature (465)..(467): n is a, c, g, or t
  misc_feature (469)..(470): n is a, c, g, or t
  misc_feature (472)..(473): n is a, c, g, or t
  misc_feature (475)..(475): n is a, c, g, or t
  misc_feature (478)..(478): n is a, c, g, or t
  misc_feature (480)..(480): n is a, c, g, or t
  misc_feature (483)..(484): n is a, c, g, or t
  misc_feature (487)..(487): n is a, c, g, or t
  misc_feature (492)..(493): n is a, c, g, or t
  misc_feature (497)..(499): n is a, c, g, or t
  misc_feature (501)..(504): n is a, c, g, or t
  misc_feature (506)..(506): n is a, c, g, or t
  misc_feature (508)..(510): n is a, c, g, or t
  misc_feature (512)..(516): n is a, c, g, or t
  misc_feature (520)..(526): n is a, c, g, or t
  misc_feature (529)..(529): n is a, c, g, or t
  misc_feature (531)..(532): n is a, c, g, or t
  misc_feature (538)..(543): n is a, c, g, or t
  misc_feature (546)..(546): n is a, c, g, or t
  misc_feature (548)..(548): n is a, c, g, or t
  misc_feature (551)..(552): n is a, c, g, or t
  misc_feature (554)..(554): n is a, c, g, or t
  misc_feature (557)..(557): n is a, c, g, or t
  misc_feature (563)..(566): n is a, c, g, or t
  misc_feature (568)..(568): n is a, c, g, or t
  misc_feature (574)..(574): n is a, c, g, or t
  misc_feature (576)..(576): n is a, c, g, or t
  misc_feature (579)..(579): n is a, c, g, or t
  misc_feature (582)..(582): n is a, c, g, or t
  misc_feature (584)..(584): n is a, c, g, or t
  misc_feature (586)..(587): n is a, c, g, or t
  misc_feature (591)..(592): n is a, c, g, or t
  misc_feature (595)..(595): n is a, c, g, or t
  misc_feature (597)..(597): n is a, c, g, or t
  misc_feature (599)..(599): n is a, c, g, or t
  misc_feature (602)..(602): n is a, c, g, or t
  misc_feature (604)..(606): n is a, c, g, or t
  misc_feature (610)..(614): n is a, c, g, or t
  misc_feature (616)..(616): n is a, c, g, or t
  misc_feature (620)..(623): n is a, c, g, or t
  misc_feature (625)..(626): n is a, c, g, or t
  misc_feature (628)..(628): n is a, c, g, or t
  misc_feature (631)..(633): n is a, c, g, or t
  misc_feature (635)..(635): n is a, c, g, or t
  misc_feature (637)..(637): n is a, c, g, or t
  misc_feature (639)..(644): n is a, c, g, or t
  misc_feature (647)..(647): n is a, c, g, or t
  misc_feature (649)..(651): n is a, c, g, or t
  misc_feature (656)..(656): n is a, c, g, or t
  misc_feature (658)..(659): n is a, c, g, or t
  misc_feature (661)..(661): n is a, c, g, or t
  misc_feature (665)..(665): n is a, c, g, or t
  misc_feature (669)..(677): n is a, c, g, or t
  misc_feature (681)..(681): n is a, c, g, or t
  misc_feature (683)..(685): n is a, c, g, or t
  misc_feature (687)..(689): n is a, c, g, or t
  misc_feature (691)..(692): n is a, c, g, or t
  misc_feature (694)..(694): n is a, c, g, or t
  misc_feature (699)..(700): n is a, c, g, or t
  misc_feature (702)..(702): n is a, c, g, or t
  misc_feature (706)..(709): n is a, c, g, or t
  misc_feature (711)..(718): n is a, c, g, or t
  misc_feature (721)..(722): n is a, c, g, or t
  misc_feature (725)..(726): n is a, c, g, or t
  misc_feature (729)..(729): n is a, c, g, or t
  misc_feature (735)..(735): n is a, c, g, or t
  misc_feature (738)..(738): n is a, c, g, or t
  misc_feature (741)..(741): n is a, c, g, or t
  misc_feature (746)..(747): n is a, c, g, or t
  misc_feature (750)..(751): n is a, c, g, or t
  misc_feature (754)..(755): n is a, c, g, or t
  misc_feature (757)..(761): n is a, c, g, or t
  misc_feature (763)..(765): n is a, c, g, or t
  misc_feature (769)..(771): n is a, c, g, or t
  misc_feature (773)..(773): n is a, c, g, or t
  misc_feature (775)..(775): n is a, c, g, or t
  misc_feature (778)..(779): n is a, c, g, or t
  misc_feature (782)..(782): n is a, c, g, or t
  misc_feature (784)..(785): n is a, c, g, or t
  misc_feature (788)..(788): n is a, c, g, or t
  misc_feature (790)..(790): n is a, c, g, or t
  misc_feature (793)..(794): n is a, c, g, or t
  misc_feature (796)..(796): n is a, c, g, or t
  misc_feature (798)..(799): n is a, c, g, or t
  misc_feature (804)..(804): n is a, c, g, or t
  misc_feature (812)..(812): n is a, c, g, or t
  misc_feature (815)..(815): n is a, c, g, or t
  misc_feature (817)..(820): n is a, c, g, or t
  misc_feature (822)..(822): n is a, c, g, or t
  misc_feature (825)..(825): n is a, c, g, or t
  misc_feature (827)..(827): n is a, c, g, or t
  misc_feature (830)..(833): n is a, c, g, or t
  misc_feature (836)..(840): n is a, c, g, or t
  misc_feature (843)..(843): n is a, c, g, or t
  misc_feature (845)..(845): n is a, c, g, or t
  misc_feature (850)..(851): n is a, c, g, or t
  misc_feature (854)..(861): n is a, c, g, or t
  misc_feature (863)..(863): n is a, c, g, or t
  misc_feature (869)..(869): n is a, c, g, or t
  misc_feature (872)..(873): n is a, c, g, or t
  misc_feature (877)..(878): n is a, c, g, or t
  misc_feature (881)..(885): n is a, c, g, or t
  misc_feature (887)..(890): n is a, c, g, or t
  misc_feature (892)..(894): n is a, c, g, or t
  misc_feature (897)..(901): n is a, c, g, or t
  misc_feature (904)..(904): n is a, c, g, or t
  misc_feature (906)..(907): n is a, c, g, or t
  misc_feature (909)..(913): n is a, c, g, or t
  misc_feature (915)..(915): n is a, c, g, or t
  misc_feature (917)..(917): n is a, c, g, or t
  misc_feature (919)..(920): n is a, c, g, or t
  misc_feature (923)..(923): n is a, c, g, or t
  misc_feature (925)..(928): n is a, c, g, or t
  misc_feature (931)..(933): n is a, c, g, or t
  misc_feature (936)..(937): n is a, c, g, or t
  misc_feature (939)..(939): n is a, c, g, or t
  misc_feature (941)..(945): n is a, c, g, or t
  misc_feature (948)..(952): n is a, c, g, or t
  misc_feature (955)..(957): n is a, c, g, or t
  misc_feature (959)..(962): n is a, c, g, or t
  misc_feature (964)..(965): n is a, c, g, or t
  misc_feature (967)..(972): n is a, c, g, or t
  misc_feature (974)..(978): n is a, c, g, or t
  misc_feature (981)..(983): n is a, c, g, or t
  misc_feature (985)..(989): n is a, c, g, or t
  misc_feature (991)..(995): n is a, c, g, or t
  misc_feature (998)..(999): n is a, c, g, or t
  misc_feature (1002)..(1006): n is a, c, g, or t
  misc_feature (1009)..(1009): n is a, c, g, or t
  misc_feature (1011)..(1016): n is a, c, g, or t
  misc_feature (1018)..(1024): n is a, c, g, or t
  misc_feature (1026)..(1027): n is a, c, g, or t
  misc_feature (1029)..(1032): n is a, c, g, or t
  misc_feature (1035)..(1036): n is a, c, g, or t
  misc_feature (1039)..(1039): n is a, c, g, or t
  misc_feature (1042)..(1042): n is a, c, g, or t
  misc_feature (1044)..(1051): n is a, c, g, or t
  misc_feature (1054)..(1056): n is a, c, g, or t
  misc_feature (1058)..(1059): n is a, c, g, or t
  misc_feature (1062)..(1063): n is a, c, g, or t
  misc_feature (1066)..(1066): n is a, c, g, or t
  misc_feature (1068)..(1071): n is a, c, g, or t
  misc_feature (1073)..(1078): n is a, c, g, or t
  misc_feature (1080)..(1080): n is a, c, g, or t
  misc_feature (1085)..(1085): n is a, c, g, or t
  misc_feature (1087)..(1088): n is a, c, g, or t
  misc_feature (1091)..(1094): n is a, c, g, or t
  misc_feature (1097)..(1098): n is a, c, g, or t
  misc_feature (1100)..(1102): n is a, c, g, or t
  misc_feature (1104)..(1104): n is a, c, g, or t
  misc_feature (1106)..(1110): n is a, c, g, or t
  misc_feature (1112)..(1117): n is a, c, g, or t
  misc_feature (1119)..(1119): n is a, c, g, or t
  misc_feature (1121)..(1125): n is a, c, g, or t
  misc_feature (1127)..(1132): n is a, c, g, or t
  misc_feature (1135)..(1135): n is a, c, g, or t
  misc_feature (1138)..(1140): n is a, c, g, or t
  misc_feature (1143)..(1148): n is a, c, g, or t
  misc_feature (1150)..(1150): n is a, c, g, or t
  misc_feature (1152)..(1152): n is a, c, g, or t
  misc_feature (1156)..(1160): n is a, c, g, or t
  misc_feature (1163)..(1163): n is a, c, g, or t
  misc_feature (1165)..(1165): n is a, c, g, or t
  misc_feature (1167)..(1172): n is a, c, g, or t
  misc_feature (1174)..(1175): n is a, c, g, or t
  misc_feature (1177)..(1177): n is a, c, g, or t
  misc_feature (1179)..(1179): n is a, c, g, or t
  misc_feature (1181)..(1181): n is a, c, g, or t
  misc_feature (1184)..(1184): n is a, c, g, or t
  misc_feature (1186)..(1187): n is a, c, g, or t
  misc_feature (1191)..(1192): n is a, c, g, or t
  misc_feature (1194)..(1194): n is a, c, g, or t
  misc_feature (1197)..(1204): n is a, c, g, or t
  misc_feature (1206)..(1206): n is a, c, g, or t
  misc_feature (1215)..(1215): n is a, c, g, or t
  misc_feature (1221)..(1221): n is a, c, g, or t
  misc_feature (1258)..(1258): n is a, c, g, or t
  misc_feature (1357)..(1357): n is a, c, g, or t
  misc_feature (1360)..(1361): n is a, c, g, or t
  misc_feature (1370)..(1370): n is a, c, g, or t
  misc_feature (1372)..(1372): n is a, c, g, or t
  misc_feature (1376)..(1376): n is a, c, g, or t
  misc_feature (1378)..(1378): n is a, c, g, or t
  misc_feature (1387)..(1387): n is a, c, g, or t
  misc_feature (1394)..(1394): n is a, c, g, or t
  misc_feature (1398)..(1398): n is a, c, g, or t
  misc_feature (1401)..(1401): n is a, c, g, or t
  misc_feature (1408)..(1410): n is a, c, g, or t
  misc_feature (1413)..(1419): n is a, c, g, or t
  misc_feature (1422)..(1422): n is a, c, g, or t
  misc_feature (1431)..(1431): n is a, c, g, or t
  misc_feature (1438)..(1438): n is a, c, g, or t
  misc_feature (1440)..(1440): n is a, c, g, or t
  misc_feature (1450)..(1450): n is a, c, g, or t
  misc_feature (1460)..(1460): n is a, c, g, or t
  misc_feature (1466)..(1466): n is a, c, g, or t
  misc_feature (1468)..(1469): n is a, c, g, or t
  misc_feature (1480)..(1481): n is a, c, g, or t
  misc_feature (1483)..(1483): n is a, c, g, or t
  misc_feature (1499)..(1499): n is a, c, g, or t
  misc_feature (1578)..(1578): n is a, c, g, or t
  misc_feature (1888)..(1888): n is a, c, g, or t
  misc_feature (1949)..(1949): n is a, c, g, or t
  misc_feature (1951)..(1951): n is a, c, g, or t
  misc_feature (1975)..(1976): n is a, c, g, or t
  misc_feature (1980)..(1980): n is a, c, g, or t
  misc_feature (1990)..(1991): n is a, c, g, or t
  misc_feature (2485)..(2485): n is a, c, g, or t
  misc_feature (2504)..(2504): n is a, c, g, or t
  misc_feature (2582)..(2582): n is a, c, g, or t
  misc_feature (2593)..(2593): n is a, c, g, or t
  misc_feature (2609)..(2609): n is a, c, g, or t
  misc_feature (2615)..(2619): n is a, c, g, or t
  misc_feature (2621)..(2621): n is a, c, g, or t
  misc_feature (2623)..(2623): n is a, c, g, or t
  misc_feature (2626)..(2626): n is a, c, g, or t
  misc_feature (2629)..(2629): n is a, c, g, or t
  misc_feature (2632)..(2636): n is a, c, g, or t
  misc_feature (2639)..(2639): n is a, c, g, or t
  misc_feature (2641)..(2642): n is a, c, g, or t
  misc_feature (2644)..(2648): n is a, c, g, or t
  misc_feature (2650)..(2651): n is a, c, g, or t
  misc_feature (2654)..(2654): n is a, c, g, or t
  misc_feature (2656)..(2660): n is a, c, g, or t
  misc_feature (2662)..(2666): n is a, c, g, or t
  misc_feature (2668)..(2670): n is a, c, g, or t
  misc_feature (2674)..(2678): n is a, c, g, or t
  misc_feature (2680)..(2680): n is a, c, g, or t
  misc_feature (2682)..(2682): n is a, c, g, or t
  misc_feature (2684)..(2684): n is a, c, g, or t
  misc_feature (2686)..(2686): n is a, c, g, or t
  misc_feature (2689)..(2689): n is a, c, g, or t
  misc_feature (2691)..(2698): n is a, c, g, or t
  misc_feature (2700)..(2705): n is a, c, g, or t
  misc_feature (2707)..(2711): n is a, c, g, or t
  misc_feature (2714)..(2718): n is a, c, g, or t
  misc_feature (2722)..(2724): n is a, c, g, or t
  misc_feature (2727)..(2736): n is a, c, g, or t
  misc_feature (2738)..(2739): n is a, c, g, or t
  misc_feature (2741)..(2746): n is a, c, g, or t
  misc_feature (2748)..(2750): n is a, c, g, or t
  misc_feature (2752)..(2752): n is a, c, g, or t
  misc_feature (2754)..(2756): n is a, c, g, or t
  misc_feature (2758)..(2761): n is a, c, g, or t
  misc_feature (2764)..(2773): n is a, c, g, or t
  misc_feature (2776)..(2777): n is a, c, g, or t
  misc_feature (2779)..(2792): n is a, c, g, or t
  misc_feature (2794)..(2799): n is a, c, g, or t
  misc_feature (2801)..(2803): n is a, c, g, or t
  misc_feature (2805)..(2805): n is a, c, g, or t
  misc_feature (2808)..(2811): n is a, c, g, or t
  misc_feature (2813)..(2813): n is a, c, g, or t
  misc_feature (2817)..(2817): n is a, c, g, or t
  misc_feature (2821)..(2823): n is a, c, g, or t
  misc_feature (2825)..(2828): n is a, c, g, or t
  misc_feature (2830)..(2831): n is a, c, g, or t
  misc_feature (2833)..(2834): n is a, c, g, or t
  misc_feature (2836)..(2840): n is a, c, g, or t
  misc_feature (2845)..(2845): n is a, c, g, or t
  misc_feature (2847)..(2847): n is a, c, g, or t
  misc_feature (2849)..(2849): n is a, c, g, or t
  misc_feature (2851)..(2851): n is a, c, g, or t
  misc_feature (2853)..(2853): n is a, c, g, or t
  misc_feature (2855)..(2856): n is a, c, g, or t
  misc_feature (2859)..(2860): n is a, c, g, or t
  misc_feature (2864)..(2867): n is a, c, g, or t
  misc_feature (2870)..(2875): n is a, c, g, or t
  misc_feature (2877)..(2879): n is a, c, g, or t
  misc_feature (2882)..(2884): n is a, c, g, or t
  misc_feature (2886)..(2886): n is a, c, g, or t
  misc_feature (2888)..(2893): n is a, c, g, or t
  misc_feature (2895)..(2899): n is a, c, g, or t
  misc_feature (2902)..(2904): n is a, c, g, or t
  misc_feature (2907)..(2908): n is a, c, g, or t
  misc_feature (2910)..(2910): n is a, c, g, or t
  misc_feature (2914)..(2914): n is a, c, g, or t
  misc_feature (2916)..(2916): n is a, c, g, or t
  misc_feature (2918)..(2919): n is a, c, g, or t
  misc_feature (2921)..(2924): n is a, c, g, or t
  misc_feature (2926)..(2926): n is a, c, g, or t
  misc_feature (2928)..(2941): n is a, c, g, or t
  misc_feature (2943)..(2944): n is a, c, g, or t
  misc_feature (2947)..(2949): n is a, c, g, or t
  misc_feature (2951)..(2952): n is a, c, g, or t
  misc_feature (2955)..(2955): n is a, c, g, or t
  misc_feature (2957)..(2957): n is a, c, g, or t
  misc_feature (2959)..(2959): n is a, c, g, or t
  misc_feature (2964)..(2965): n is a, c, g, or t
  misc_feature (2969)..(2971): n is a, c, g, or t
  misc_feature (2973)..(2973): n is a, c, g, or t
  misc_feature (2975)..(2979): n is a, c, g, or t
  misc_feature (2981)..(2981): n is a, c, g, or t
  misc_feature (2983)..(2983): n is a, c, g, or t
  misc_feature (2986)..(2988): n is a, c, g, or t
  misc_feature (2990)..(2992): n is a, c, g, or t
  misc_feature (2996)..(2997): n is a, c, g, or t
  misc_feature (3002)..(3003): n is a, c, g, or t
  misc_feature (3008)..(3008): n is a, c, g, or t
  misc_feature (3010)..(3012): n is a, c, g, or t
  misc_feature (3016)..(3019): n is a, c, g, or t
  misc_feature (3022)..(3024): n is a, c, g, or t
  misc_feature (3026)..(3027): n is a, c, g, or t
  misc_feature (3029)..(3030): n is a, c, g, or t
  misc_feature (3037)..(3037): n is a, c, g, or t
  misc_feature (3039)..(3039): n is a, c, g, or t
  misc_feature (3042)..(3043): n is a, c, g, or t
  misc_feature (3046)..(3053): n is a, c, g, or t
  misc_feature (3056)..(3057): n is a, c, g, or t
  misc_feature (3060)..(3060): n is a, c, g, or t
  misc_feature (3062)..(3064): n is a, c, g, or t
  misc_feature (3066)..(3067): n is a, c, g, or t
  misc_feature (3069)..(3069): n is a, c, g, or t
  misc_feature (3074)..(3075): n is a, c, g, or t
  misc_feature (3077)..(3078): n is a, c, g, or t
  misc_feature (3080)..(3082): n is a, c, g, or t
  misc_feature (3084)..(3085): n is a, c, g, or t
  misc_feature (3087)..(3091): n is a, c, g, or t
  misc_feature (3093)..(3093): n is a, c, g, or t
  misc_feature (3096)..(3096): n is a, c, g, or t
  misc_feature (3101)..(3102): n is a, c, g, or t
  misc_feature (3104)..(3104): n is a, c, g, or t
  misc_feature (3106)..(3106): n is a, c, g, or t
  misc_feature (3109)..(3120): n is a, c, g, or t
  misc_feature (3123)..(3127): n is a, c, g, or t
  misc_feature (3129)..(3136): n is a, c, g, or t
  misc_feature (3138)..(3139): n is a, c, g, or t
  misc_feature (3141)..(3142): n is a, c, g, or t
  misc_feature (3144)..(3144): n is a, c, g, or t
  misc_feature (3146)..(3147): n is a, c, g, or t
  misc_feature (3151)..(3153): n is a, c, g, or t
  misc_feature (3155)..(3155): n is a, c, g, or t
  misc_feature (3157)..(3159): n is a, c, g, or t
  misc_feature (3161)..(3161): n is a, c, g, or t
  misc_feature (3163)..(3163): n is a, c, g, or t
  misc_feature (3165)..(3165): n is a, c, g, or t
  misc_feature (3168)..(3168): n is a, c, g, or t
  misc_feature (3170)..(3170): n is a, c, g, or t
  misc_feature (3172)..(3175): n is a, c, g, or t
  misc_feature (3177)..(3178): n is a, c, g, or t
  misc_feature (3182)..(3189): n is a, c, g, or t
  misc_feature (3191)..(3191): n is a, c, g, or t
  misc_feature (3194)..(3194): n is a, c, g, or t
  misc_feature (3196)..(3197): n is a, c, g, or t
  misc_feature (3200)..(3200): n is a, c, g, or t
  misc_feature (3202)..(3208): n is a, c, g, or t
  misc_feature (3210)..(3219): n is a, c, g, or t
  misc_feature (3222)..(3223): n is a, c, g, or t
  misc_feature (3225)..(3225): n is a, c, g, or t
  misc_feature (3227)..(3228): n is a, c, g, or t
  misc_feature (3230)..(3233): n is a, c, g, or t
  misc_feature (3235)..(3237): n is a, c, g, or t
  misc_feature (3240)..(3245): n is a, c, g, or t
  misc_feature (3249)..(3252): n is a, c, g, or t
  misc_feature (3254)..(3254): n is a, c, g, or t
  misc_feature (3256)..(3256): n is a, c, g, or t
  misc_feature (3259)..(3264): n is a, c, g, or t
  misc_feature (3266)..(3266): n is a, c, g, or t
  misc_feature (3268)..(3268): n is a, c, g, or t
  misc_feature (3270)..(3273): n is a, c, g, or t
  misc_feature (3275)..(3277): n is a, c, g, or t
  misc_feature (3279)..(3287): n is a, c, g, or t
  misc_feature (3289)..(3298): n is a, c, g, or t
  misc_feature (3300)..(3308): n is a, c, g, or t
  misc_feature (3310)..(3310): n is a, c, g, or t
  misc_feature (3312)..(3321): n is a, c, g, or t
  misc_feature (3323)..(3331): n is a, c, g, or t
  misc_feature (3333)..(3340): n is a, c, g, or t
  misc_feature (3342)..(3343): n is a, c, g, or t
  misc_feature (3345)..(3347): n is a, c, g, or t
  misc_feature (3349)..(3351): n is a, c, g, or t
  misc_feature (3354)..(3354): n is a, c, g, or t
  misc_feature (3356)..(3363): n is a, c, g, or t
  misc_feature (3365)..(3368): n is a, c, g, or t
  misc_feature (3370)..(3372): n is a, c, g, or t
  misc_feature (3374)..(3376): n is a, c, g, or t
  misc_feature (3378)..(3379): n is a, c, g, or t
  misc_feature (3383)..(3386): n is a, c, g, or t
  misc_feature (3388)..(3389): n is a, c, g, or t
  misc_feature (3391)..(3393): n is a, c, g, or t
  misc_feature (3395)..(3401): n is a, c, g, or t
  misc_feature (3403)..(3406): n is a, c, g, or t
  misc_feature (3408)..(3414): n is a, c, g, or t
  misc_feature (3416)..(3416): n is a, c, g, or t
  misc_feature (3418)..(3418): n is a, c, g, or t
  misc_feature (3421)..(3424): n is a, c, g, or t
  misc_feature (3426)..(3429): n is a, c, g, or t
  misc_feature (3434)..(3435): n is a, c, g, or t
  misc_feature (3437)..(3439): n is a, c, g, or t
  misc_feature (3441)..(3450): n is a, c, g, or t
  misc_feature (3452)..(3456): n is a, c, g, or t
  misc_feature (3458)..(3474): n is a, c, g, or t
  misc_feature (3476)..(3487): n is a, c, g, or t
  misc_feature (3489)..(3492): n is a, c, g, or t
  misc_feature (3494)..(3495): n is a, c, g, or t
  misc_feature (3497)..(3499): n is a, c, g, or t
  misc_feature (3502)..(3503): n is a, c, g, or t
  misc_feature (3505)..(3505): n is a, c, g, or t
  misc_feature (3507)..(3509): n is a, c, g, or t
  misc_feature (3513)..(3516): n is a, c, g, or t
  misc_feature (3518)..(3524): n is a, c, g, or t
  misc_feature (3527)..(3527): n is a, c, g, or t
  misc_feature (3529)..(3530): n is a, c, g, or t
  misc_feature (3533)..(3533): n is a, c, g, or t
  misc_feature (3535)..(3536): n is a, c, g, or t
  misc_feature (3540)..(3541): n is a, c, g, or t
  misc_feature (3543)..(3548): n is a, c, g, or t
  misc_feature (3551)..(3556): n is a, c, g, or t
  misc_feature (3558)..(3570): n is a, c, g, or t
  misc_feature (3573)..(3575): n is a, c, g, or t
  misc_feature (3577)..(3580): n is a, c, g, or t
  misc_feature (3582)..(3582): n is a, c, g, or t
  misc_feature (3584)..(3597): n is a, c, g, or t
  misc_feature (3599)..(3613): n is a, c, g, or t
  misc_feature (3615)..(3624): n is a, c, g, or t
  misc_feature (3627)..(3628): n is a, c, g, or t
  misc_feature (3630)..(3630): n is a, c, g, or t
  misc_feature (3632)..(3633): n is a, c, g, or t
  misc_feature (3636)..(3642): n is a, c, g, or t
  misc_feature (3644)..(3644): n is a, c, g, or t
  misc_feature (3646)..(3649): n is a, c, g, or t
  misc_feature (3651)..(3651): n is a, c, g, or t
  misc_feature (3653)..(3657): n is a, c, g, or t
  misc_feature (3660)..(3664): n is a, c, g, or t
  misc_feature (3666)..(3667): n is a, c, g, or t
  misc_feature (3669)..(3670): n is a, c, g, or t
  misc_feature (3673)..(3673): n is a, c, g, or t
  misc_feature (3675)..(3685): n is a, c, g, or t
  misc_feature (3687)..(3695): n is a, c, g, or t
  misc_feature (3697)..(3702): n is a, c, g, or t
  misc_feature (3704)..(3704): n is a, c, g, or t
  misc_feature (3707)..(3707): n is a, c, g, or t
  misc_feature (3710)..(3711): n is a, c, g, or t
  misc_feature (3714)..(3714): n is a, c, g, or t
  misc_feature (3716)..(3720): n is a, c, g, or t
  misc_feature (3722)..(3724): n is a, c, g, or t
  misc_feature (3726)..(3729): n is a, c, g, or t
  misc_feature (3731)..(3734): n is a, c, g, or t
  misc_feature (3737)..(3737): n is a, c, g, or t
  misc_feature (3739)..(3739): n is a, c, g, or t
  misc_feature (3742)..(3746): n is a, c, g, or t
  misc_feature (3748)..(3753): n is a, c, g, or t
  misc_feature (3755)..(3756): n is a, c, g, or t
  misc_feature (3758)..(3758): n is a, c, g, or t
  misc_feature (3760)..(3761): n is a, c, g, or t
  misc_feature (3763)..(3763): n is a, c, g, or t
  misc_feature (3765)..(3768): n is a, c, g, or t
  misc_feature (3770)..(3772): n is a, c, g, or t
  misc_feature (3774)..(3775): n is a, c, g, or t
  misc_feature (3777)..(3781): n is a, c, g, or t
  misc_feature (3784)..(3784): n is a, c, g, or t
  misc_feature (3787)..(3787): n is a, c, g, or t
  misc_feature (3789)..(3791): n is a, c, g, or t
  misc_feature (3794)..(3794): n is a, c, g, or t
  misc_feature (3798)..(3798): n is a, c, g, or t
  misc_feature (3800)..(3800): n is a, c, g, or t
  misc_feature (3802)..(3808): n is a, c, g, or t
  misc_feature (3811)..(3811): n is a, c, g, or t
  misc_feature (3813)..(3813): n is a, c, g, or t
  misc_feature (3815)..(3815): n is a, c, g, or t
  misc_feature (3819)..(3819): n is a, c, g, or t
  misc_feature (3825)..(3826): n is a, c, g, or t
  misc_feature (3828)..(3830): n is a, c, g, or t
  misc_feature (3832)..(3834): n is a, c, g, or t
  misc_feature (3836)..(3836): n is a, c, g, or t
  misc_feature (3840)..(3843): n is a, c, g, or t
  misc_feature (3845)..(3846): n is a, c, g, or t
  misc_feature (3848)..(3848): n is a, c, g, or t
  misc_feature (3851)..(3852): n is a, c, g, or t
  misc_feature (3854)..(3855): n is a, c, g, or t
  misc_feature (3857)..(3859): n is a, c, g, or t
  misc_feature (3861)..(3865): n is a, c, g, or t
  misc_feature (3867)..(3868): n is a, c, g, or t
  misc_feature (3873)..(3876): n is a, c, g, or t
  misc_feature (3878)..(3880): n is a, c, g, or t
  misc_feature (3882)..(3882): n is a, c, g, or t
  misc_feature (3884)..(3886): n is a, c, g, or t
  misc_feature (3888)..(3888): n is a, c, g, or t
  misc_feature (3890)..(3890): n is a, c, g, or t
  misc_feature (3893)..(3893): n is a, c, g, or t
  misc_feature (3895)..(3905): n is a, c, g, or t
  misc_feature (3908)..(3911): n is a, c, g, or t
  misc_feature (3914)..(3914): n is a, c, g, or t
  misc_feature (3916)..(3917): n is a, c, g, or t
  misc_feature (3921)..(3922): n is a, c, g, or t
  misc_feature (3925)..(3925): n is a, c, g, or t
  misc_feature (3927)..(3929): n is a, c, g, or t
  misc_feature (3931)..(3934): n is a, c, g, or t
  misc_feature (3936)..(3940): n is a, c, g, or t
  misc_feature (3942)..(3943): n is a, c, g, or t
  misc_feature (3946)..(3949): n is a, c, g, or t
  misc_feature (3952)..(3965): n is a, c, g, or t
  misc_feature (3967)..(3974): n is a, c, g, or t
  misc_feature (3977)..(3979): n is a, c, g, or t
  misc_feature (3981)..(3983): n is a, c, g, or t
  misc_feature (3986)..(3987): n is a, c, g, or t
  misc_feature (3989)..(3990): n is a, c, g, or t
  misc_feature (3992)..(3994): n is a, c, g, or t
  misc_feature (3996)..(3998): n is a, c, g, or t
  misc_feature (4000)..(4000): n is a, c, g, or t
nnnnngnnntnnnnnannnnnannngaaannnaannnnnannnnnnncnnngnnannnnngnnnnnnncnnanttnnntnnngcnnnacnnnnnnnnnnnannnnnnntnnnnnntgnnnnngnnanagngnnnacntnnngnnncnnnanannnngnnnnntnnnnnngnnnnnnnnnnnnnnagnnnannctnnngnngnnnnnnnnngnnnntnnnnngnnnannnnnnnnnnnannnnngnntannggggnnanannnnnannnnnnnntnnnnnnnnnnnntcncnnnnnnntnncncnnnnnannnnnnncncnnnnnnnngnnntntnnnnnnnnnnnnnnnatnannagannnnnnggngangnnacnncnncnacctntnnnnannctnnaantnnnnaagnnnnnnnnnncngnntnnnngnngtnggacnangnnnncgantgcnnngnnnncnnntnntnntnagnanaannggngctgnnggannnannnnangnnnannnnnggtnnnnnnngcngnngctcannnnnnacnanaanngntgntggttnnnntngacagnanganggngncnntggnngtngnantcngnnnaggnnnnngnaacnnnncnncngcnnnancnannnnnnctnannntggangnngntggngcgnnnnnnnnntacncnnncnnnannanaatannancacnnnngnnnnnnnntcnngannagnaggagngcngcngcggnngcnnagnngnnnnngnnntgannncngntgnngcngnngcngncgnngntnntggtngtagtagnaantnnnnanatnanaannnngannnnngangnggagnnggnnnnnnnntnaacagnagnngaanntgnnnnngnnnntnnnaannnnnagngnnannnnntncngnnggngnnnntannnctnnantnnnnntgnnnnntcnnntnnnnanngnnnnnngnnnnnatnnncnnnnncnnnnncgnngannnnngtntnnnnnncnnnnnnngnnannnnaannaanccngnnnnnnnnggnnnannccnnggnannnntnnnnnntnttttntnnggnnnnaanncnnngnannnnntnnnnnngngnnnnngnnnnnnttnccnnnaannnnnncngntttnnnnngtncngnnnnnntnntntngnccntnnaaanncnggnnnnnnnntntgattttcncgccgnatcgtacccatatccgcagcaggtctccaaggtgaanagcctctagtctttgaacaatgtaggcaagggaagtcggcaaattagatccgtaacttcgggaaaaggattggctctaagggctgggccgttcgagctncgnntagaagcgntngtcnangcgtagganctgggtnaacnggncgcaagnnnggnnnnnnnggnccttagttnttgtgcngncgtggaaggncgaagctacntcgtgngnntcttcacgggnntntcgatttcgggcggcnctaagcagccaacttagaactggtacggacacggggaatccgactgtctaattaaaacaaagcattgcgatggcctganaaggtgttgacgcaatgtgatttctgcccagtgctctgaatgtcaacgtgaagaaattcaatcaagcgcgggtaaacggcgggagtaactatgactctcttaaggtagccaaatgcctcgtcatctaattagtgacgcgcatgaatggattaacgagattcccactgtccctgcctactatctagcgaaaccacagccaagggaacgggcttggcggaatcagcggggaaagaagaccctgttgagcttgactctagtctgacgttgtgaagagacatgagaggtgtagaataagtgggagcgcaagcancagtgaaataccactacttttatcgtttctttacttactcgatgaagcggaaggcggcctnanggccacacttctagatttaagcgnnggtnctcgtgactnntgcgatccgctttgacgacagcgtcaggcggggagtttgactggggcggtacatctgtcaaaaagtaacgcaggtgtcctaaggcgagctcagcgaggacagaaacctcgcgtagagcaaaagggcaaatgctcgcttgattttgattttcagtacgaatacagaccgtgaaagcgcggcctatcgatccttttgattttacgagttttaagcaagaggtgtcagaaaagttaccacagggataactggcttgtggcggccaagcgttcatagcgacgtcgctttttgatccttcgatgtcggctcttcctatcattgtgaagcagacttcaccaattgttggattgttcacccactaatagggaacgtgagctgggtttagaccgtcgtgagacaggttagttttaccctactgatgacttgttgttgctatagtaatcctgctcagtacgagaggaaccgcaggttcggacatttggtttacgtgctcggcngaacggccgatggtgcgangctaccatccgagggcttacggttgaacgcctctaaatcggaatcccatctaaacatgcaacgatattctcggcgtcntcgcgtttttnggtatcgataagcgantaaagnnnnntntnttnggnggnnnnnccncnncnnnnngnntcncnnnnnannnnnannnatannnnngngncncnatncnnnnnnnntnnnnnnannnnnagnnnnnaaannnttnnnnnnnnnncnnannnnnngnnnangnnntnnnnttnnnnnnnnnnccnncnnnnnnnnnnnnnntnnnnnntnnncnttnnnncngggntttnnncnnnntnnanngnnnnnttccntncngntnanntannattnnnnttnnnnnntnnnatnnnanannnnnntnnnnnttnnnatnntntttntntnnannnntntnnnnnnnnnnnnnntnnttnnntnnatntnantaaanntttnnntntnnnnntnanatnnnannntttnnttttnntatanannnaaannnnttnnntnnanntctaaananatnnatnnnnnnnnaannttntnnnanntnaattnnannannnannannnnngnaantaaanntnanttnnnnnnnnnnnnaannnnnannnnnnnntnntnnanannaaannntnannntnananttnangnnnnanntttnnnnnnnntnttntnnaantnnnnnnntnnnnnnnnnnaannantnnannnntnnngtnnnnnnttannnnananatnnnnnnananannnntnnntnnnnnnnnntnnnnnnnnnnannnnnnnnnanannnnnnnnnntnnnnnnnnnannnnnnnnannannnannnttnannnnnnnnannnntnnnannnanntttnnnnannannntnnnnnnnannnnannnnnnnananttnnnnannnnatttnnannnannnnnnnnnnannnnnannnnnnnnnnnnnnnnnannnnnnnnnnnntnnnntnnannnttnnantnnnattnnnnannnnnnnttntnnaantnnaatnnannnnnntannnnnnannnnnnnnnnnnntcnnntnnnntntnnnnnnnnnnnnnntnnnnnnnnnnnnnnnannnnnnnnnntannanannaannnnnnntnannnntntnnnnnaannnnntnntnnatntnnnnnnnnnnnannnnnnnnntnnnnnntnatnttnnttntnnnnntnnnannnntnnnnatntnttnnnnntnnnnnnanntntnnantnnnnannntnncnnnnnttnttntnnnttnaagnanannnnnnntgntntnttgncaaatnngnnntnnntnttannnnanngnttnncnntnnntnnnnntnnttcannnntnnntntnnnananttnannnnnnnnnnnctnnnnaantnnattnntantnnntnnnntnnnnngnnttnnnnatnnnnnnnnnnnnnntnnnnnnnnatnnntnnntanncnntnnntnnnan

SEQ ID NO: 653 - DNA, 4000 bp, Escherichia coli
  misc_feature (1)..(361): n is a, c, g, or t
  misc_feature (1031)..(1038): n is a, c, g, or t
  misc_feature (1040)..(1040): n is a, c, g, or t
  misc_feature (1042)..(1043): n is a, c, g, or t
  misc_feature (1045)..(1045): n is a, c, g, or t
  misc_feature (1047)..(1048): n is a, c, g, or t
  misc_feature (1052)..(1058): n is a, c, g, or t
  misc_feature (1060)..(1060): n is a, c, g, or t
  misc_feature (1062)..(1067): n is a, c, g, or t
  misc_feature (1071)..(1074): n is a, c, g, or t
  misc_feature (1076)..(1080): n is a, c, g, or t
  misc_feature (1082)..(1082): n is a, c, g, or t
  misc_feature (1085)..(1093): n is a, c, g, or t
  misc_feature (1095)..(1098): n is a, c, g, or t
  misc_feature (1100)..(1103): n is a, c, g, or t
  misc_feature (1105)..(1107): n is a, c, g, or t
  misc_feature (1109)..(1112): n is a, c, g, or t
  misc_feature (1114)..(1123): n is a, c, g, or t
  misc_feature (1125)..(1137): n is a, c, g, or t
  misc_feature (1140)..(1141): n is a, c, g, or t
  misc_feature (1143)..(1152): n is a, c, g, or t
  misc_feature (1154)..(1157): n is a, c, g, or t
  misc_feature (1159)..(1172): n is a, c, g, or t
  misc_feature (1174)..(1177): n is a, c, g, or t
  misc_feature (1180)..(1184): n is a, c, g, or t
  misc_feature (1188)..(1193): n is a, c, g, or t
  misc_feature (1195)..(1204): n is a, c, g, or t
  misc_feature (1206)..(1219): n is a, c, g, or t
  misc_feature (1221)..(1223): n is a, c, g, or t
  misc_feature (1226)..(1228): n is a, c, g, or t
  misc_feature (1230)..(1236): n is a, c, g, or t
  misc_feature (1238)..(1240): n is a, c, g, or t
  misc_feature (1243)..(1255): n is a, c, g, or t
  misc_feature (1257)..(1257): n is a, c, g, or t
  misc_feature (1259)..(1260): n is a, c, g, or t
  misc_feature (1263)..(1264): n is a, c, g, or t
  misc_feature (1266)..(1281): n is a, c, g, or t
  misc_feature (1284)..(1284): n is a, c, g, or t
  misc_feature (1286)..(1287): n is a, c, g, or t
  misc_feature (1289)..(1289): n is a, c, g, or t
  misc_feature (1291)..(1291): n is a, c, g, or t
  misc_feature (1293)..(1297): n is a, c, g, or t
  misc_feature (1299)..(1301): n is a, c, g, or t
  misc_feature (1303)..(1312): n is a, c, g, or t
  misc_feature (1314)..(1314): n is a, c, g, or t
  misc_feature (1316)..(1322): n is a, c, g, or t
  misc_feature (1325)..(1325): n is a, c, g, or t
  misc_feature (1327)..(1329): n is a, c, g, or t
  misc_feature (1332)..(1333): n is a, c, g, or t
  misc_feature (1335)..(1343): n is a, c, g, or t
  misc_feature (1345)..(1345): n is a, c, g, or t
  misc_feature (1347)..(1351): n is a, c, g, or t
  misc_feature (1353)..(1360): n is a, c, g, or t
  misc_feature (1362)..(1363): n is a, c, g, or t
  misc_feature (1365)..(1366): n is a, c, g, or t
  misc_feature (1368)..(1372): n is a, c, g, or t
  misc_feature (1375)..(1378): n is a, c, g, or t
  misc_feature (1380)..(1380): n is a, c, g, or t
  misc_feature (1382)..(1382): n is a, c, g, or t
  misc_feature (1384)..(1389): n is a, c, g, or t
  misc_feature (1391)..(1391): n is a, c, g, or t
  misc_feature (1393)..(1394): n is a, c, g, or t
  misc_feature (1396)..(1397): n is a, c, g, or t
  misc_feature (1399)..(1407): n is a, c, g, or t
  misc_feature (1410)..(1411): n is a, c, g, or t
  misc_feature (1414)..(1418): n is a, c, g, or t
  misc_feature (1421)..(1424): n is a, c, g, or t
  misc_feature (1426)..(1429): n is a, c, g, or t
  misc_feature (1432)..(1443): n is a, c, g, or t
  misc_feature (1445)..(1450): n is a, c, g, or t
  misc_feature (1452)..(1455): n is a, c, g, or t
  misc_feature (1457)..(1459): n is a, c, g, or t
  misc_feature (1526)..(1529): n is a, c, g, or t
  misc_feature (1987)..(1987): n is a, c, g, or t
  misc_feature (1989)..(1989): n is a, c, g, or t
nnnnnnnnnnnnnnnnnnnnnnnnnnnnnnnnnnnnnnnnnnnnnnnnnnnnnnnnnnnnnnnnnnnnnnnnnnnnnnnnnnnnnnnnnnnnnnnnnnnnnnnnnnnnnnnnnnnnnnnnnnnnnnnnnnnnnnnnnnnnnnnnnnnnnnnnnnnnnnnnnnnnnnnnnnnnnnnnnnnnnnnnnnnnnnnnnnnnnnnnnnnnnnnnnnnnnnnnnnnnnnnnnnnnnnnnnnnnnnnnnnnnnnnnnnnnnnnnnnnnnnnnnnnnnnnnnnnnnnnnnnnnnnnnnnnnnnnnnnnnnnnnnnnnnnnnnnnnnnnnnnnnnnnnnnnnnnnnnnnnnnnnnnnnnnnnnnnnnnnnnttgcctttgacttcttgaataatcaagttctacaatatacatagttactctccaagtgtgtggttagtttcatgatctatgttagtaaacttcaatgcacaatacacattgatataatgcttggtgctgacccaaaagcgtacacgattagcatgtagttcgaattgaagttgatagttgcgtatgagtttgaatgcagtctttatgtccttggtgttacttgtataagcacagtattgtctaagcatagtatactccaaatgggtctacagcccaaaaaaattgtgtgcgtaaaaaatttacgaagtacttaacgtattaagagggaactttttgatcctgttcttaatagtagcaaccttgcccgtagactcacactcatgatattcagtatagaactcttcaacaacagactcgagacgctcacgtatgtgtagaatgcgttgtgtactgtactcgtagtttatagaaggctctgtcttgttcataactgtatttactgtgaaatggggtctgtacccttttatatagaactgcgaaaaatttaactgaagtacttaggtctttgaggtggtgattctgtgacccctgccctgctcaaactgcttttccattttgtattactatgccccgacccctcgaaaatatttttttattttttctatgcccnnnnnnnnanannanannaaannnnnnngncnnnnnncccnnnncnnnnncnacnnnnnnnnntnnnntnnnntnnntnnnncnnnnnnnnnncnnnnnnnnnnnnnaanncnnnnnnnnnnannnncnnnnnnnnnnnnnnannnnccnnnnncttnnnnnncnnnnnnnnnncnnnnnnnnnnnnnngnnnccnnnannnnnnngnnnttnnnnnnnnnnnnntncnnaanncnnnnnnnnnnnnnnnnttngnntncntnnnnntnnntnnnnnnnnnncnannnnnnnccnannnaanncnnnnnnnnntngnnnnncnnnnnnnntnncnncnnnnnttnnnntncnannnnnnangnnanncnnnnnnnnnttnnttnnnnnaannnntnnnnttnnnnnnnnnnnntnnnnnntnnnntnnntatgccctctttgttagtttatattaatatattacagtctatcatccaataagtcaacccctaattnnnnggggctaactgttcgaatccaaatgatgcaactacatggaatgcatcttcactctctactacatcgcctacactcacagagtgcattggcttgaatcttgtgtaagcactctctgggcctacattgcctatgtggaatacttcttccaatgaatctgcttctatgttggctacatgagtataatagcctctacgcatagcatctgctgatacagccgctgtgtcgttcttgcgtaggttcatatcaagtttaaggctctgcttgtgtacagcatcgtggcccttttcattgataagatctatttctgcgtctgttagtgtaatttggtgtattttgtattgcattttttgccctcttttttatttaatatactatgtattatagagccttttggtgaagaagtcaaccaaaatcacgtctttttttcaagtttttttcacttatttttggtggggttntngtcaaagtgaacccctgaatcgagggcacaatccaggggttctaatacagtgttggagcgtgagggctatgctcgtgttaacactgtactctcagccattgcttcccagtttgttggaaatgctttagcgagatctgctaccttgagcactgttcttagactcagttccctcaacttagacttattaatgtctatgaagtctaccactgactcgtgttgctcttcggtaaaaccgtattcgttcaacatgccatccttgactatctgcttgatacgtagcatcttctctcgctctgtgtcaattgtcaagtctatgtaatgacatctactctcaatagccgccaaatgatctctcatcttcttgctcttaacgttgtcgaacttgatgttggtaatgaatatcgcactacctttgaattggaaactgtctggcacaccttcgtttcgtaacttgaatgaatcagtgttccagtgaatggtcctgttcttcttagaatcaagtgcggccttcaagatgtttagtgaaaggtcttcttgtagtatactatcacagtcatcaaacaccaatacattgtccttgtctgcatagttgtacagtttacagtagagtcctattgcactcatcgcgcccttgaccacttgatacttgggtggacgttctccgagtgtagcgatcatgtcgtgcttacccagcactttctctacaccaaaactcttaccaacccctggagggcctgtaacgatcattgcacgtacatcacctttcttacatgcacgggtcatgtcttcaagtatgttgaatctttctctaagacgctcaatggtctcttcatctgactcttcacgttttgtgatcttagtactgctgttcacatgtgtgtatgcatcctcagcgtcaaccttgatcttgatgttacgatctgggaagcctgcaactgctgtaccatctactgttacgtagccgccttgtgcgcctactttaaattcttcaacaagcggaaacaccatgccagcaagttctacgtccttgcctctgatcttgtaactgcctgatagtatttttatcttctgtgtcatattgccctctttcataattaaaaattaatgccctaattgttcttacagtatagcattgactgctacagttgtcaacccctaatttaccaaaccatcaagccatgtttgatcaacttcagtgcctacgtccttgccaccgaggtatgcgttgatgtgtttgcttgtggttacactgtacttggttgaagtacggaatgcaccttgctctgtccaagccgctactggtgtctcatatgagtacagcacacggttgccttttgctgttgtgatttctgtttggttactgccgatttgtgatagtttcatattgccctcgctttgttaattgttattatataatacactaaaaggattcaaaagtcaacccctaaagtgtttctttttcaccaaaatcttctacttctctgccttgggcaaagtcaagcaagtcagccgctactgccgccgcctgtgctcgtgtaagggacaaagaatcaaagaacaagtctgctggtcctgagtctcccttgtggaatttcttggtagttagttgtacgcatgatcctttggtgcctccagagaatcttgtaaggtgaacaccctgtgcgtgtgatttaagatctgttgccattttgccctctgctttctaattgttatacttacagtatacagtcattcaaaccaaaagtcaaccattattttgactttttttaaaaaaagatggcggtctttctcgagggcacccaccattcccgccttgcttttgtcgtcgacacggtgcaaggtctaacagggtttctactccctaccaattggcccgctctacaggattcgaacctgtgacctacggtttagaagaccgttgctctatcctgctgagctaagagcggattggtgcgagcggaggggatcgaacccacacaccatatactgataacggattttaagtccgttg

SEQ ID NO: 654 - DNA, 4000 bp, Escherichia coli
  misc_feature (1)..(6): n is a, c, g, or t
  misc_feature (8)..(11): n is a, c, g, or t
  misc_feature (13)..(13): n is a, c, g, or t
  misc_feature (16)..(16): n is a, c, g, or t
  misc_feature (19)..(26): n is a, c, g, or t
  misc_feature (28)..(32): n is a, c, g, or t
  misc_feature (34)..(41): n is a, c, g, or t
  misc_feature (43)..(43): n is a, c, g, or t
  misc_feature (45)..(47): n is a, c, g, or t
  misc_feature (49)..(52): n is a, c, g, or t
  misc_feature (55)..(60): n is a, c, g, or t
  misc_feature (62)..(64): n is a, c, g, or t
  misc_feature (66)..(73): n is a, c, g, or t
  misc_feature (75)..(75): n is a, c, g, or t
  misc_feature (79)..(84): n is a, c, g, or t
  misc_feature (86)..(86): n is a, c, g, or t
  misc_feature (88)..(90): n is a, c, g, or t
  misc_feature (96)..(97): n is a, c, g, or t
  misc_feature (99)..(99): n is a, c, g, or t
  misc_feature (103)..(103): n is a, c, g, or t
  misc_feature (105)..(107): n is a, c, g, or t
  misc_feature (110)..(114): n is a, c, g, or t
  misc_feature (117)..(122): n is a, c, g, or t
  misc_feature (124)..(126): n is a, c, g, or t
  misc_feature (128)..(133): n is a, c, g, or t
  misc_feature (135)..(136): n is a, c, g, or t
  misc_feature (138)..(138): n is a, c, g, or t
  misc_feature (140)..(145): n is a, c, g, or t
  misc_feature (147)..(150): n is a, c, g, or t
  misc_feature (152)..(152): n is a, c, g, or t
  misc_feature (155)..(155): n is a, c, g, or t
  misc_feature (157)..(163): n is a, c, g, or t
  misc_feature (166)..(170): n is a, c, g, or t
  misc_feature (173)..(176): n is a, c, g, or t
  misc_feature (180)..(183): n is a, c, g, or t
  misc_feature (185)..(187): n is a, c, g, or t
  misc_feature (189)..(190): n is a, c, g, or t
  misc_feature (192)..(195): n is a, c, g, or t
  misc_feature (197)..(205): n is a, c, g, or t
  misc_feature (207)..(207): n is a, c, g, or t
  misc_feature (210)..(212): n is a, c, g, or t
  misc_feature (215)..(219): n is a, c, g, or t
  misc_feature (221)..(230): n is a, c, g, or t
  misc_feature (233)..(241): n is a, c, g, or t
  misc_feature (243)..(245): n is a, c, g, or t
  misc_feature (247)..(247): n is a, c, g, or t
  misc_feature (249)..(254): n is a, c, g, or t
  misc_feature (256)..(257): n is a, c, g, or t
  misc_feature (259)..(259): n is a, c, g, or t
  misc_feature (262)..(264): n is a, c, g, or t
  misc_feature (266)..(266): n is a, c, g, or t
  misc_feature (268)..(270): n is a, c, g, or t
  misc_feature (274)..(277): n is a, c, g, or t
  misc_feature (281)..(284): n is a, c, g, or t
  misc_feature (286)..(286): n is a, c, g, or t
  misc_feature (288)..(289): n is a, c, g, or t
  misc_feature (291)..(293): n is a, c, g, or t
  misc_feature (295)..(300): n is a, c, g, or t
  misc_feature (302)..(304): n is a, c, g, or t
  misc_feature (306)..(306): n is a, c, g, or t
  misc_feature (309)..(311): n is a, c, g, or t
  misc_feature (314)..(314): n is a, c, g, or t
  misc_feature (318)..(318): n is a, c, g, or t
  misc_feature (320)..(320): n is a, c, g, or t
  misc_feature (322)..(322): n is a, c, g, or t
  misc_feature (324)..(324): n is a, c, g, or t
  misc_feature (326)..(326): n is a, c, g, or t
  misc_feature (330)..(333): n is a, c, g, or t
  misc_feature (338)..(338): n is a, c, g, or t
  misc_feature (340)..(344): n is a, c, g, or t
  misc_feature (346)..(346): n is a, c, g, or t
  misc_feature (348)..(349): n is a, c, g, or t
  misc_feature (351)..(351): n is a, c, g, or t
  misc_feature (353)..(354): n is a, c, g, or t
  misc_feature (356)..(356): n is a, c, g, or t
  misc_feature (358)..(363): n is a, c, g, or t
  misc_feature (366)..(368): n is a, c, g, or t
  misc_feature (370)..(374): n is a, c, g, or t
  misc_feature (377)..(380): n is a, c, g, or t
  misc_feature (382)..(383): n is a, c, g, or t
  misc_feature (385)..(393): n is a, c, g, or t
  misc_feature (397)..(398): n is a, c, g, or t
  misc_feature (400)..(403): n is a, c, g, or t
  misc_feature (408)..(409): n is a, c, g, or t
  misc_feature (411)..(411): n is a, c, g, or t
  misc_feature (413)..(416): n is a, c, g, or t
  misc_feature (418)..(418): n is a, c, g, or t
  misc_feature (420)..(423): n is a, c, g, or t
  misc_feature (425)..(425): n is a, c, g, or t
  misc_feature (427)..(432): n is a, c, g, or t
  misc_feature (434)..(435): n is a, c, g, or t
  misc_feature (438)..(442): n is a, c, g, or t
  misc_feature (444)..(454): n is a, c, g, or t
  misc_feature (456)..(458): n is a, c, g, or t
  misc_feature (461)..(462): n is a, c, g, or t
  misc_feature (465)..(471): n is a, c, g, or t
  misc_feature (474)..(474): n is a, c, g, or t
  misc_feature (476)..(482): n is a, c, g, or t
  misc_feature (484)..(489): n is a, c, g, or t
  misc_feature (491)..(492): n is a, c, g, or t
  misc_feature (494)..(495): n is a, c, g, or t
  misc_feature (498)..(500): n is a, c, g, or t
  misc_feature (502)..(502): n is a, c, g, or t
  misc_feature (504)..(506): n is a, c, g, or t
  misc_feature (509)..(510): n is a, c, g, or t
  misc_feature (513)..(519): n is a, c, g, or t
  misc_feature (521)..(522): n is a, c, g, or t
  misc_feature (527)..(528): n is a, c, g, or t
  misc_feature (531)..(533): n is a, c, g, or t
  misc_feature (536)..(544): n is a, c, g, or t
  misc_feature (547)..(547): n is a, c, g, or t
  misc_feature (550)..(553): n is a, c, g, or t
  misc_feature (556)..(558): n is a, c, g, or t
  misc_feature (560)..(560): n is a, c, g, or t
  misc_feature (562)..(563): n is a, c, g, or t
  misc_feature (570)..(576): n is a, c, g, or t
  misc_feature (578)..(581): n is a, c, g, or t
  misc_feature (583)..(583): n is a, c, g, or t
  misc_feature (585)..(586): n is a, c, g, or t
  misc_feature (589)..(589): n is a, c, g, or t
  misc_feature (591)..(594): n is a, c, g, or t
  misc_feature (596)..(602): n is a, c, g, or t
  misc_feature (604)..(605): n is a, c, g, or t
  misc_feature (607)..(617): n is a, c, g, or t
  misc_feature (619)..(619): n is a, c, g, or t
  misc_feature (621)..(621): n is a, c, g, or t
  misc_feature (623)..(631): n is a, c, g, or t
  misc_feature (633)..(644): n is a, c, g, or t
  misc_feature (646)..(647): n is a, c, g, or t
  misc_feature (650)..(651): n is a, c, g, or t
  misc_feature (653)..(654): n is a, c, g, or t
  misc_feature (656)..(657): n is a, c, g, or t
  misc_feature (659)..(661): n is a, c, g, or t
  misc_feature (664)..(668): n is a, c, g, or t
  misc_feature (670)..(675): n is a, c, g, or t
  misc_feature (678)..(679): n is a, c, g, or t
  misc_feature (681)..(683): n is a, c, g, or t
  misc_feature (686)..(686): n is a, c, g, or t
  misc_feature (690)..(695): n is a, c, g, or t
  misc_feature (700)..(701): n is a, c, g, or t
  misc_feature (704)..(706): n is a, c, g, or t
  misc_feature (708)..(709): n is a, c, g, or t
  misc_feature (711)..(716): n is a, c, g, or t
  misc_feature (718)..(720): n is a, c, g, or t
  misc_feature (722)..(727): n is a, c, g, or t
  misc_feature (729)..(729): n is a, c, g, or t
  misc_feature (731)..(731): n is a, c, g, or t
  misc_feature (735)..(737): n is a, c, g, or t
  misc_feature (739)..(741): n is a, c, g, or t
  misc_feature (743)..(743): n is a, c, g, or t
  misc_feature (746)..(748): n is a, c, g, or t
  misc_feature (750)..(756): n is a, c, g, or t
  misc_feature (758)..(758): n is a, c, g, or t
  misc_feature (763)..(763): n is a, c, g, or t
  misc_feature (765)..(767): n is a, c, g, or t
  misc_feature (769)..(769): n is a, c, g, or t
  misc_feature (772)..(774): n is a, c, g, or t
  misc_feature (777)..(777): n is a, c, g, or t
  misc_feature (779)..(779): n is a, c, g, or t
  misc_feature (781)..(781): n is a, c, g, or t
  misc_feature (784)..(792): n is a, c, g, or t
  misc_feature (794)..(796): n is a, c, g, or t
  misc_feature (798)..(798): n is a, c, g, or t
  misc_feature (800)..(800): n is a, c, g, or t
  misc_feature (802)..(805): n is a, c, g, or t
  misc_feature (808)..(808): n is a, c, g, or t
  misc_feature (811)..(813): n is a, c, g, or t
  misc_feature (815)..(815): n is a, c, g, or t
  misc_feature (818)..(819): n is a, c, g, or t
  misc_feature (821)..(823): n is a, c, g, or t
  misc_feature (826)..(830): n is a, c, g, or t
  misc_feature (832)..(836): n is a, c, g, or t
  misc_feature (838)..(842): n is a, c, g, or t
  misc_feature (844)..(844): n is a, c, g, or t
  misc_feature (846)..(848): n is a, c, g, or t
  misc_feature (851)..(854): n is a, c, g, or t
  misc_feature (856)..(861): n is a, c, g, or t
  misc_feature (863)..(863): n is a, c, g, or t
  misc_feature (865)..(865): n is a, c, g, or t
  misc_feature (868)..(872): n is a, c, g, or t
  misc_feature (874)..(876): n is a, c, g, or t
  misc_feature (879)..(887): n is a, c, g, or t
  misc_feature (890)..(890): n is a, c, g, or t
  misc_feature (893)..(893): n is a, c, g, or t
  misc_feature (896)..(896): n is a, c, g, or t
  misc_feature (901)..(902): n is a, c, g, or t
  misc_feature (904)..(907): n is a, c, g, or t
  misc_feature (910)..(913): n is a, c, g, or t
  misc_feature (917)..(925): n is a, c, g, or t
  misc_feature (929)..(931): n is a, c, g, or t
  misc_feature (936)..(936): n is a, c, g, or t
  misc_feature (938)..(938): n is a, c, g, or t
  misc_feature (944)..(946): n is a, c, g, or t
  misc_feature (949)..(949): n is a, c, g, or t
  misc_feature (951)..(951): n is a, c, g, or t
  misc_feature (953)..(956): n is a, c, g, or t
  misc_feature (962)..(964): n is a, c, g, or t
  misc_feature (966)..(975): n is a, c, g, or t
  misc_feature (977)..(990): n is a, c, g, or t
  misc_feature (992)..(992): n is a, c, g, or t
  misc_feature (994)..(994): n is a, c, g, or t
  misc_feature (998)..(999): n is a, c, g, or t
  misc_feature (1002)..(1003): n is a, c, g, or t
  misc_feature (1005)..(1007): n is a, c, g, or t
  misc_feature (1009)..(1013): n is a, c, g, or t
  misc_feature (1016)..(1016): n is a, c, g, or t
  misc_feature (1019)..(1027): n is a, c, g, or t
  misc_feature (1031)..(1038): n is a, c, g, or t
  misc_feature (1040)..(1040): n is a, c, g, or t
  misc_feature (1048)..(1049): n is a, c, g, or t
  misc_feature (1051)..(1052): n is a, c, g, or t
  misc_feature (1056)..(1058): n is a, c, g, or t
  misc_feature (1060)..(1060): n is a, c, g, or t
  misc_feature (1062)..(1065): n is a, c, g, or t
  misc_feature (1067)..(1075): n is a, c, g, or t
  misc_feature (1080)..(1083): n is a, c, g, or t
  misc_feature (1086)..(1091): n is a, c, g, or t
  misc_feature (1093)..(1102): n is a, c, g, or t
  misc_feature (1104)..(1104): n is a, c, g, or t
  misc_feature (1106)..(1106): n is a, c, g, or t
  misc_feature (1110)..(1111): n is a, c, g, or t
  misc_feature (1113)..(1115): n is a, c, g, or t
  misc_feature (1117)..(1127): n is a, c, g, or t
  misc_feature (1130)..(1131): n is a, c, g, or t
  misc_feature (1134)..(1135): n is a, c, g, or t
  misc_feature (1137)..(1140): n is a, c, g, or t
  misc_feature (1143)..(1147): n is a, c, g, or t
  misc_feature (1149)..(1149): n is a, c, g, or t
  misc_feature (1151)..(1152): n is a, c, g, or t
  misc_feature (1154)..(1154): n is a, c, g, or t
  misc_feature (1157)..(1159): n is a, c, g, or t
  misc_feature (1161)..(1162): n is a, c, g, or t
  misc_feature (1165)..(1165): n is a, c, g, or t
  misc_feature (1167)..(1170): n is a, c, g, or t
  misc_feature (1172)..(1174): n is a, c, g, or t
  misc_feature (1176)..(1176): n is a, c, g, or t
  misc_feature (1178)..(1181): n is a, c, g, or t
  misc_feature (1183)..(1183): n is a, c, g, or t
  misc_feature (1185)..(1192): n is a, c, g, or t
  misc_feature (1195)..(1196): n is a, c, g, or t
  misc_feature (1198)..(1198): n is a, c, g, or t
  misc_feature (1200)..(1201): n is a, c, g, or t
  misc_feature (1203)..(1203): n is a, c, g, or t
  misc_feature (1205)..(1205): n is a, c, g, or t
  misc_feature (1207)..(1210): n is a, c, g, or t
  misc_feature (1212)..(1212): n is a, c, g, or t
  misc_feature (1215)..(1217): n is a, c, g, or t
  misc_feature (1268)..(1268): n is a, c, g, or t
nnnnnncnnnncntcntcnnnnnnnntnnnnncnnnnnnnncncnnncnnnnccnnnnnncnnncnnnnnnnncncttnnnnnncncnnnctcgtnncncgcncnnncgnnnnnccnnnnnntnnncnnnnnntnntntnnnnnntnnnngncgncnnnnnnncgnnnnncgnnnncgcnnnngnnncnngnnnncnnnnnnnnncntcnnncgnnnnncnnnnnnnnnncgnnnnnnnnncnnncntnnnnnnanntnttnnngncnnnttcnnnnccgnnnncncnncnnncnnnnnncnnncntcnnncgntcgncncncncncgcnnnnctcgngnnnnncncnngngnnancnnnnnnccnnncnnnnnccnnnncnncnnnnnnnnncccnncnnnnccccnncntnnnncncnnnncncnnnnnnannccnnnnncnnnnnnnnnnncnnncgnngcnnnnnnnccncnnnnnnncnnnnnncnncnncgnnncntnnncgnngcnnnnnnncnncgcgnngcnnncgnnnnnnnnncgncgnnnnttnnncntnngtcttcnnnnnnncnnnncncnngcncnnnncnnnnnnngnncnnnnnnnnnnntnancnnnnnnnnncnnnnnnnnnnnncnnccnncnncnncnnnccnnnnncnnnnnncgnncnnntcncgtnnnnnnctcgnntcnnncnngnnnnnngnnngnnnnnngntngcgnnncnnncncgnnncnnnnnnncncctcncnnncnccnnnccnancnccnnnnnnnnncnnnancncnnnngcnccnnncncgnncnnntcnnnnncnnnnncnnnnncntnnncgnnnncnnnnnncncncgnnnnncnnncgnnnnnnnnncgngcncgncgcgnncnnnncgnnnnccgnnnnnnnnncgtnnncgcancnttcgcnnngcntncnnnncgcgtnnngnnnnnnnnnngnnnnnnnnnnnnnngngngcgnncgnngnnngnnnnncgncgnnnnnnnnncgcnnnnnnnncncgcgcgcnncnngcgnnncncnnnngnnnnnnnnnggcgnnnncgnnnnnntnnnnnnnnnntncnccgnngnnncnnnnnnnnnnngtnnctnntnnnncannnnntntnnanacnnnanntanannnnannnanannnnantnnnnnnnnaanncntnntnanannnntntannntatagatatagatttcgttcggacgcgcggcggttcgcgcgccgcagcacngcgccgcagaaccgcgcgccgcacgcgagcgagcgaagatggccatcgatgcgggcaccaccgcgttcatgatcgtctccatggcgctcgtgaacctcatgacgccgggactggcgttcttctacggcggtctcgtgcgatcgtccaacgtgctgacgatcatgatgcaaaattacgtgtcgatgggattgatcacgctggtttgggtcgtctgggggtactcgctgtgcttcgggacgtcgaagaacggcgtgatcggcagcgcgcgcacgcactacttcctggaaaacttggcgacgcaagaatcgccgtacgccgaggggttgccggggctcgtgttcgcgggattccaaggcatgttcgccgtcatcgcgccgagcctgatgacgggcgcgttcgcggatcgcgtgcgattcgtgccgtacgtcctgttcatcttcttctgggtgcacttggtgtacttcccgttcgcccactgggtgtggggcgggggctggatggctcgcaacggcgtcaaggatttcgccggcggcatcgtcgtgcacatcaccgcgggcttctccgccttggccaccgtcgtggcgctgcccaaccgccgaaagctcgagggtgaagacgtcgacaccaacccgcacaacatccctttcgttgccctcggcaccggtcttctctggttcggctggttcggtttcaacggcggctccgcccttgcggcgaacgagcaagccgcgctcgccgcgatgaactctgaaatctccgcctccgccgctctcttcttctggctcatgctcgagtggaagatggaaggcaagcccacccttgttggcgcctgcgtcggcgctatcgctggtttggccaccatcacgccgtgcgccgcgtacgtcaagccgtgggccgcgctcaccatcggtacgctctgcgtgccgtggtgctacgcgtgcatcgaactcacgaagaagtacaacctcgacgacgcgctcgatgtgtgggccgtgcacggtatgggtggtttcttcggtaccctctgcgtcggcatcttctccagcgccgccatgactgggaatgacttcgaagctggcggtaagctcttcggcaagcagctgctcgccgccgtcggctgcgccgcgtactccttcgtcatgggctacgccatcatcaaggttctcgaaaagttcatggatgtcgtcccccgcgaaggcgaccgcaggatgggcttggacgtctccatgcacggcgcgaaggcgtacagtgaagacccgagcggctccaagaagggcggcgccgtcaacgtctaacgatattactcccctcaataaccggcgtcgaacagtcgtcgtcgttaacagtcaataacgtcaataacgcactccttcggtcgtccgaagcgatgttgcgacttaatatgcgctttcgtatactttactacttatcacggcgcgcgacgcgtcgcgtaggggcctcggcgccgcggcgttgaaataataacaagcaaccttgcgtctcgccgcctcgccggcgcattctcgccccgcgatcgtgcgccagtcgcgcgcgcgcgtcacgaccgaccgaccgacgcgcgcggtctcgcgacgaagacgaaggtaaagacgctttcagcgccgcgcccttcgtgcgaacgacgacgccgacgacgacggaagagagacgcgaaccatgcgcatccaaatcaaaggcggcgtgtggaaaaacaccgaagatgagatcttaaaggcggcggtgatgaagtacggcaagaaccagtggccgagaatcgcgtcgctgttgaatcggaagtcggcgaagcagtgcaaagcgcgatggttcgaatggctcgatccgagcatcaaaaagacggagtggacgcgggaggaggacgaaaagctgctgcacctggcgaaattgatgccgacgcagtggagaacgatcgcgcccgtggtcggacggacgccgagtcagtgcttggagagatatgagaagttactcgatgcggcgtgcgcgaaggatgacgattacgacgccggagatgatccgagaagactgcgtccgggggaaattgaccctaacccagagacgaagccggcgaaaccggatgcggtggatatggatgaagacgagaaggagatgctcgctgaggctcgagcgagacttgcgaacacgaagggtaaaaaagcgaagcgaaaagcacgggagaagcagttggaggaggcgagaaggttggctgagttgcaaaagaagcgcgaactgaaggcggcaggaatcgcacacgtgcggcgcgcaaagcgcgttcgaggcgtggattacaacgccgaaatcgcgtttgaacgaaagccggacgcagtgatgtacgatacgcgcgaagaagacgaagcatttgcaaagcagcaatctgcaaaggtgtttaaaccaatttcgctcgccgagctcgaagggaagaagagcgcaaagcaattagacgaagagagcaagaagcgtgaggcggcgaaacagaagatgcaagagcgtcgcgatatgcccggtgcagtacaacaagcgctcaaagtgaacgacgcgtcgttttttcgacgatcgaagctcatgttaccgacgccgcaagtgtctgaccgagagctggaggacatcgcaaagattggcaaaggaggcgtcggcttgctcgacgacggcagcgcgacgcctgcatctgggctattaggatcatacgggcaaacgccggcgacctcgtccggattagc

SEQ ID NO: 655 - DNA, 4000 bp, Escherichia coli
  misc_feature (48)..(48): n is a, c, g, or t
  misc_feature (120)..(120): n is a, c, g, or t
  misc_feature (280)..(280): n is a, c, g, or t
  misc_feature (282)..(285): n is a, c, g, or t
  misc_feature (1326)..(1326): n is a, c, g, or t
  misc_feature (1404)..(1404): n is a, c, g, or t
  misc_feature (1459)..(1459): n is a, c, g, or t
  misc_feature (1989)..(1989): n is a, c, g, or t
  misc_feature (1991)..(1991): n is a, c, g, or t
  misc_feature (2426)..(2426): n is a, c, g, or t
  misc_feature (2446)..(2446): n is a, c, g, or t
  misc_feature (3102)..(3102): n is a, c, g, or t
  misc_feature (3106)..(3106): n is a, c, g, or t
  misc_feature (3253)..(3253): n is a, c, g, or t
  misc_feature (3502)..(3502): n is a, c, g, or t
tgctcaatgccaagcgctttgagcctgaccctcaggggcgcagagtcncggcccgtgatgatcaccggcgtgatgccagcttgttttaaaagttttaaaccatggccatctagggtgctnaaacgtttgagtgtttcaccctgctcagaaaagtacaagccgccgtctgttaaaacaccatccacatcaaaaaagaccactttgatgccttgcgcttgaagcagcagctctggggggaaatggagcgcgggttgaatgatttgcatggtgttggggcggncnnnnaaaagtgcttagatgactttagcgcgcatgaggtcattgctgttgagggcgccacacaaggcgccagaatcattgaccaccaaaacgctggtaatttggaattgctccatgagttcggccgcctctacagccaatgcatcgtgcagaacagttcgcggattggcatgcatcacctctttggcatgcagtgcgcgcaagtcaacacctttttcgatgaggcgccttaaatcaccatctgtgaagattcccaagatgttgtgatgttcgtcgacgatggcggaggcgcccaaacctttttggctcatttcacgcatgagctcggtaaagctcgcatcagctaagacatgcggcacctgatcgcccttgcgcatgacgtcttcaacatgcgtcagcaagcgacgacccaaagagccacccgggtgtgaacgcgcaaagtcttcggctttgaaaccgcgagcgtctagcagcgcgacagccaaagcatcacctaaggccaattgcgccgtggtgctggcagtgggtgccaaattcaaaggacaagcctctttgtcgacactgctgtctaaaaccacatcggcgtgtttggccagcgccgagttcatgccgccggtcatggcaatcaagggcacgccttgtcgtttcaagacgggcaggatggaaacaagctcgtcgctttctccgctgttagagatggccaatacgatgtcgacggctttgatcatgccgaggtcgccgtggctggcctcgcccgggtgaacaaacatggccggtgtgcctgtagacgccaaggtggctgcaattttggagccaatgtgcccgctcttgcccatgccggtgaccaccacgcggcctttgacgttgagcatcatctgaacggcttgtgaaaagcgatggtccaaacgggatttgagtccgatcagggcttgtgcctcaatgtccaaagtctcgcgtgcgagttggagggcttggtctgggttgaatgacatgggcctattttagcgagtgatggccaaaagcgtgactatgatgttgctttcgacnggttgtcgtcgtggagtgcgcaagatgagtcaaggattgggttcaatgaggggtgagcgggcaatgggtgccaccgangaaatggcattgtcggtgaatgattatttacgcaagaacattcgcaccgtgcccnattggccggtagcgggcgtgcagtttcgagacatcacacccttgcttcaaaatccaagggtgtttcgtgtgctgatcgatgcctttgtccatcgctacatgtcacctgccatgcggcccgatgtggtggccggcctcgatgcgcgcggctttattttgggggctgtggtggcctatgaattgaacgttggcttcgtacctgttcgcaaaaaaggaaagttgcctttcaccacggtggaagaaacctatgaattggaatacggcacggccaccgttgagttgcacaccgatgcggtcaagccaggtcaaagagtcttgttgattgatgatttgatcgcaaccggtggcaccatgatggcgggcatgaagctcctcgaaaaactgggagctgaagtgattgaaggtgcggccattgtggatttgccagaactaggcggatcagaaaaactgaaagccgcaggattgcccttgttcacattggtgaactttgaggggcactgaaactgaaattgaagcctagaagcaaacacncnccccgggcttgaagaccccagccgcttatcaagcgttgaactgaagcgcagccaagccggcataaacaccgcccatttcaaccagcgccgcatgcttaccttgctctaccaagcggccatgctccaagaccaaaatgttgtcagcttgttgcaccgtggcaagtcggtgcgcaatcaccaaggtggttcgaccgcgcatggccgactccaaagcggcttgaaccatgcgctcactgtgtgcatccaaggcactggtggcctcgtccaacagcaagagcggtggatttttgagcatggcacgcgcaatcgcaatgcgttgacgctgaccgcctgataaacgcacgccgcgctcacccagaaacgtgttgtatccctctggcaggtcgacgatgaattcttcagcaaatgcagccacggccgcagccttcacctccncgtcgcttgcatctggtttnccgtagcggatgttgtccatggcactgcttgaaaaaagaacaggctcttgcggcacgatgccaatgcgttgtcgaagatcgtgcaggctgaggttttgaatgggcacaccatccaacacaatgcgtccttgttgcggatcgtaataacgaagcagcaatccaaacaaagtggttttgcccgcaccactcgggccaaccagtgccactgtttggcccgcttcaatggccactgaaaagtcttgcagtgccaactgagaaggacgagaggggtaatgaaattggagtgattcaaatttcaaagtgctgccagtcgatggtgcgatagaggtaacgggctttgcaggtgattgcacgggcgatacgctgctgagcaactccatgagtcgctctgtggcgcctgcagcacgcagcaagtcgccataggtttcacccagcacagccacagcaccagcaaaaataatcacatacaaaacggcttggcccaactgacctgctgaaagattgcctgccagaactgcttgtgtgccctgatacaagccccacagcaagaaagcagcattggcaatgatgatgaaggcgaccagcaccgagcgtgcgcgcgtgcgccgaatggctgtttgaaagccttgttctgtagcgctagcaaaacgcgctgnttcncggttctcggccgtgtagctttgcaccactggcatggcatttaagatttcagtggcaatgctgctggcatcggccacgcggtcttggctggcgcgtgacaaacggcgcacacggcgaccatagagggtggctggccatacaaccaanaccacggtcacaaccaattgcagcatgacagtggggtgagcccataccaacatggccaaagcacccacacccatgaccgcattgcgcaatcccatggacaatgaactgccaaccactgtttgcaccaaggtggtgtcggccaccaggcggctgatgacttcgccagtgggggtggtttcaaaaaaagcggggctttgctgtaagacatggctgtaaacagcattgcgcagatcggtggtaacgcgctcncccagccaactgactgtgaagaagcgcgcagcagaaaacaaacccagtgcaacggcaacgccaaacagcatcatgaaattgccttgcaatgccatggcctgtgcgccagggtcggggtgctgcaaaccgttgtctatcaattgacgcaatgcaactggaaaaatcaaggtagaggctgcagccaagaccaagaagaccatggccaaaccaatttgcaacttataaggttttaaaaaaggcagcaagccactcaatgactttggattttggggtgcaggtcgatcgatgatgggcgtcttggccatgtgttatttaccaatgcaaaagctggagaaaataacgcccagcaaatcgtcggcgttgaactcgcctgtaatttcattcaaagccgtttgcgacaagcgcaactcttcagccaacaagtccagtgattgggcttgcgcgcgcaaatgcgcatcggccatttcaatgtgcgactgaacacgtttgagtgcttga

SEQ ID NO: 656 - DNA, 4000 bp, Escherichia coli
  misc_feature (1166)..(1166): n is a, c, g, or t
  misc_feature (1986)..(1986): n is a, c, g, or t
aacccgctgcctctgcagaaggccgtgcaccgatcgcccgctggtacgccgtgcaggtggcctcgagctgcgagaaaaaggtgaaagccacccttgagcagcgggccgtgacccttggggtggacagccggatcctcgagatcgagatcccccagacacccgccgtcaagctcaagaaagacggcagccgcaccagcaccgaggagaaggtgttccccggctacgtgctcgtgcggatggtcctcgatgaggacacgatgatggccgtgcgcagcaccccgaacgtcatcaacttcgtgggtgcggaagatcgccgcgccaccggtaaggctcgcgggcacatcaagcctcgccccctgagtcgtcaggaggtggatcgcatcttcaagcgcgccgctgagaagaagcctgtggtgaaggtcgatctcaccgaaggcgatcaaatccttgtcaccgctggccccttcaaagacttccaaggggaagtcatcgaggtgtcgggcgaccgcaacaagctcaaggctctgctctcgatctttggtcgggagaccccggtggaactcgagttctcccagatcagcaaacaaagctgatcacactgcggccgtctccctgcggagggcggcctcaggtggtgctcggtttccgggcccccgcagtcgctgccctagggtcgcggatccgcagattgctcaagccgccaggacgatggcaaaaaaagttgtagctgtgatcaagctggcactcgatgccggcaaagccaaccccgcgccgccggtgggccctgccctcggtcagcacggcgtcaacatcatggcgttctgcaaggagtacaacgctcggacgcaggacaaggccggatacgtgattccggtggagatctcggtcttcgaagaccgcagcttcaccttcatcaccaaaacccctcccgcttctgtgctgatcgtgaaggcagccggaatcgccaagggtgccgccacctcttccaagggttccgtgggcgccatcagccgcgcgcaactcgaagagatcgccaaaaccaagctgcccgacctcaactgcaccagcgttgagtcggccatgcgcatcatcgaaggcaccgcccgcaacatgggcgttgctgtgaaggactgaagctcagggcctcgcccaacgctttcttccgntcactctgttctttaccgggggagagctcagagctcgtctgcaccccatccctgacatgcccaaaatttccaagcgctacaccgctgtcgccaacaaggttgaagagcgcgtctacgcccccctggaggccgtggaactggtgaaggccaacgccaccgccaagttcgacgagaccgttgaggcccacgcccgcctcggcattgatcccaagtacaccgaccagcagctgcgcaccaccgtggcgctgccccacggcaccggtcagagcatccgtatcgccgtgattgcccgcggtgaaaaggtggccgaggccaaagccgccggtgccgacctggccggtgatgacgaactggtggacaccatcgccaaaggcgaaatggagttcgatctgctgatcgccacccccgacatgatgcccaaagtggccaagcttggccgggtgcttggtccccgtggtctgatgccgaaccccaaggccggcacggtcaccaccgacctcgcctccgccatcaacgaattcaaggccggcaaacttgaattccgcgcagatcgcaccggcatcgtgcacgtgcgcttcggcaaggccagcttcgatcccgccaagctgctcgacaacctcaaggccctgcaggagaccatcgaccgcaacaagcccagcggtgcgaagggtcgctactggaagagcctgtacatcacctccaccatgggcccctccgtggaagtggatgtgaccgccctgcaggacatcaagcaagagggctgatcgtccctgtccctctggcgcaaagcccccgccccggcgggggctttgttgtatgntgtgtaactggcttactgccagaagggttacgcgccctacccaagacagcaggtcgatgtcattggtctggtttccagatccctgacccgtaaatcctgccgaggtgcacgcgccggttttgttgcgacgatcccttctcgggttcgatcaggcaaagcaagctgcagcccctcgaatgccccccggcattggggttgcgtacccggcttgttcccctgatccgttccttttccatgggccgcactctggagaacaagcaacagatcgtcgaagagctcaagcagctccttggcgaggccgaaatggcgctggtccttgattacaagggtctctccatcaaggaaatgtctgatctgcggacccgtctgcaggccagcaacggcatttgcaaggtgaccaaaaacaccttgatgcgccgtgccattgatggcgacagcgtttggtcggaactcgattccctgctcaccggcaccaatgcctttgtgctcgtcaagggcgacatcggcagcgcggtgaaggccgttcagtccttccagaaggacacgaagaagtctgaggtgaagggtggccttttcgaaggcaaactcctttcccagtccgaaatcaaggccatcggggatctgccctccaaggaggtgctcatggcccagatcgccggtgcgatcaacgccgtggccaccaaggtggctgtgggcatcaacgaagttccttccggtcttgctcgggcgctcaagcagcacgccgatggcgagggttcggcctcctgaggccggctctgctgaagctctccgatccgactgttttcacagatctgttgctgattcccaaccatgtctgctactaccgacaaaattctcgagcaactgaagtcgctctctctgctggaagcctctgagcttgtcaagcagatcgaagaggccttcggtgtgtccgccgccgcttctgctggcgtcgtgatggctgcccccgccgctggtggtggtggtgaagccgctgaagagaagaccgaattcgacgtcatgctcgacggcttcgacgcagctgccaagatcaaggtcctcaaggccgtccgcgaagccaccggcctcggcctgggcgaagccaaggccctcgtggaaggcgccccttgcgctgtcaaggaaggcgtgtccaaggctgatgccgaggccatgaagaaggccatcgaagaggccggcggcaaggtcaccctcaagtgatcccgctgcgggtcgcttttggcggcctgcaccccttcagctccacaccggtccttcgggaccggtttttttgtgcctcagatcagagcggcaataaaaaagccccgccgaaggcagggctttgagttcggaacgcttctgggagtctgtcctcgtttcgaccccggaagtggtgttccgcactcctcacacgcacagaccataccgccagaggaaaaacgccagcaagcagggcgggccgctgtctcaactggcctagggcctgtaggggatcacctgcagggcgatcgggccgttgccgcggaggtggggagcgctctccaaagggcgcagaggcggacggtcctgaccaccgcccgaggctcgggcgatcagggtggccatgggggtggtgttggcgaaatacacgtggctcaggctgcgctcgccatacatccggcgttccagctgccagcccggctcgagtttcagctcaacaaagccatcgcgatcccgccggggcacgctgccctgccccaccagcagttcggtgggttggctgctggacatggccaacagggccaggcgttcaccctggtgctcgaggcgcaggcggtaccgcggggccatgtcttcctcgccaacccgcagggaatagccgttgctgtcgatgtagcggctgcagatccccgtgaaatcaaagcggttgagggctggatcgatcaggccgtcggggcgctgctcccagcacttcggggccgcggtgatctgctcgagcaccagcagtttccaatcactgcgtccgaccggttgtccg

SEQ ID NO: 657 - DNA, 4000 bp, Escherichia coli
  misc_feature (1)..(14): n is a, c, g, or t
  misc_feature (16)..(24): n is a, c, g, or t
  misc_feature (26)..(29): n is a, c, g, or t
  misc_feature (31)..(54): n is a, c, g, or t
  misc_feature (56)..(56): n is a, c, g, or t
  misc_feature (59)..(64): n is a, c, g, or t
  misc_feature (66)..(67): n is a, c, g, or t
  misc_feature (70)..(72): n is a, c, g, or t
  misc_feature (75)..(85): n is a, c, g, or t
  misc_feature (87)..(87): n is a, c, g, or t
  misc_feature (89)..(92): n is a, c, g, or t
  misc_feature (94)..(101): n is a, c, g, or t
  misc_feature (103)..(104): n is a, c, g, or t
  misc_feature (106)..(107): n is a, c, g, or t
  misc_feature (109)..(109): n is a, c, g, or t
  misc_feature (111)..(113): n is a, c, g, or t
  misc_feature (115)..(123): n is a, c, g, or t
  misc_feature (125)..(126): n is a, c, g, or t
  misc_feature (128)..(128): n is a, c, g, or t
  misc_feature (130)..(130): n is a, c, g, or t
  misc_feature (132)..(133): n is a, c, g, or t
  misc_feature (135)..(140): n is a, c, g, or t
  misc_feature (143)..(143): n is a, c, g, or t
  misc_feature (145)..(145): n is a, c, g, or t
  misc_feature (148)..(152): n is a, c, g, or t
  misc_feature (155)..(157): n is a, c, g, or t
  misc_feature (159)..(163): n is a, c, g, or t
  misc_feature (165)..(166): n is a, c, g, or t
  misc_feature (169)..(171): n is a, c, g, or t
  misc_feature (173)..(175): n is a, c, g, or t
  misc_feature (177)..(185): n is a, c, g, or t
  misc_feature (187)..(189): n is a, c, g, or t
  misc_feature (192)..(200): n is a, c, g, or t
  misc_feature (202)..(204): n is a, c, g, or t
  misc_feature (206)..(224): n is a, c, g, or t
  misc_feature (226)..(226): n is a, c, g, or t
  misc_feature (228)..(232): n is a, c, g, or t
  misc_feature (234)..(238): n is a, c, g, or t
  misc_feature (240)..(246): n is a, c, g, or t
  misc_feature (248)..(249): n is a, c, g, or t
  misc_feature (252)..(254): n is a, c, g, or t
  misc_feature (256)..(269): n is a, c, g, or t
  misc_feature (271)..(274): n is a, c, g, or t
  misc_feature (276)..(276): n is a, c, g, or t
  misc_feature (278)..(286): n is a, c, g, or t
  misc_feature (288)..(292): n is a, c, g, or t
  misc_feature (294)..(304): n is a, c, g, or t
  misc_feature (307)..(309): n is a, c, g, or t
  misc_feature (311)..(315): n is a, c, g, or t
  misc_feature (317)..(332): n is a, c, g, or t
  misc_feature (334)..(341): n is a, c, g, or t
  misc_feature (343)..(344): n is a, c, g, or t
  misc_feature (346)..(351): n is a, c, g, or t
  misc_feature (353)..(353): n is a, c, g, or t
  misc_feature (357)..(359): n is a, c, g, or t
  misc_feature (361)..(365): n is a, c, g, or t
  misc_feature (367)..(369): n is a, c, g, or t
  misc_feature (371)..(371): n is a, c, g, or t
  misc_feature (374)..(380): n is a, c, g, or t
  misc_feature (382)..(382): n is a, c, g, or t
  misc_feature (384)..(393): n is a, c, g, or t
  misc_feature (395)..(397): n is a, c, g, or t
  misc_feature (399)..(401): n is a, c, g, or t
  misc_feature (404)..(405): n is a, c, g, or t
  misc_feature (407)..(407): n is a, c, g, or t
  misc_feature (409)..(409): n is a, c, g, or t
  misc_feature (411)..(412): n is a, c, g, or t
  misc_feature (414)..(414): n is a, c, g, or t
  misc_feature (416)..(416): n is a, c, g, or t
  misc_feature (418)..(421): n is a, c, g, or t
  misc_feature (423)..(441): n is a, c, g, or t
  misc_feature (445)..(450): n is a, c, g, or t
  misc_feature (452)..(452): n is a, c, g, or t
  misc_feature (454)..(457): n is a, c, g, or t
  misc_feature (459)..(459): n is a, c, g, or t
  misc_feature (461)..(461): n is a, c, g, or t
  misc_feature (463)..(464): n is a, c, g, or t
  misc_feature (467)..(473): n is a, c, g, or t
  misc_feature (475)..(478): n is a, c, g, or t
  misc_feature (480)..(480): n is a, c, g, or t
  misc_feature (482)..(482): n is a, c, g, or t
  misc_feature (487)..(487): n is a, c, g, or t
  misc_feature (489)..(494): n is a, c, g, or t
  misc_feature (496)..(498): n is a, c, g, or t
  misc_feature (500)..(503): n is a, c, g, or t
  misc_feature (505)..(505): n is a, c, g, or t
  misc_feature (507)..(507): n is a, c, g, or t
  misc_feature (509)..(511): n is a, c, g, or t
  misc_feature (513)..(516): n is a, c, g, or t
  misc_feature (518)..(524): n is a, c, g, or t
  misc_feature (526)..(529): n is a, c, g, or t
  misc_feature (531)..(536): n is a, c, g, or t
  misc_feature (538)..(539): n is a, c, g, or t
  misc_feature (541)..(544): n is a, c, g, or t
  misc_feature (546)..(553): n is a, c, g, or t
  misc_feature (555)..(592): n is a, c, g, or t
  misc_feature (594)..(594): n is a, c, g, or t
  misc_feature (596)..(599): n is a, c, g, or t
  misc_feature (602)..(618): n is a, c, g, or t
  misc_feature (620)..(622): n is a, c, g, or t
  misc_feature (625)..(635): n is a, c, g, or t
  misc_feature (638)..(649): n is a, c, g, or t
  misc_feature (651)..(653): n is a, c, g, or t
  misc_feature (655)..(656): n is a, c, g, or t
  misc_feature (658)..(658): n is a, c, g, or t
  misc_feature (660)..(662): n is a, c, g, or t
  misc_feature (664)..(668): n is a, c, g, or t
  misc_feature (670)..(679): n is a, c, g, or t
  misc_feature (681)..(684): n is a, c, g, or t
  misc_feature (686)..(687): n is a, c, g, or t
  misc_feature (691)..(692): n is a, c, g, or t
  misc_feature (694)..(694): n is a, c, g, or t
  misc_feature (696)..(697): n is a, c, g, or t
  misc_feature (699)..(708): n is a, c, g, or t
  misc_feature (710)..(712): n is a, c, g, or t
  misc_feature (714)..(717): n is a, c, g, or t
  misc_feature (719)..(720): n is a, c, g, or t
  misc_feature (722)..(722): n is a, c, g, or t
  misc_feature (724)..(725): n is a, c, g, or t
  misc_feature (728)..(728): n is a, c, g, or t
  misc_feature (730)..(734): n is a, c, g, or t
  misc_feature (736)..(737): n is a, c, g, or t
  misc_feature (739)..(741): n is a, c, g, or t
  misc_feature (744)..(746): n is a, c, g, or t
  misc_feature (748)..(751): n is a, c, g, or t
  misc_feature (753)..(761): n is a, c, g, or t
  misc_feature (764)..(764): n is a, c, g, or t
  misc_feature (766)..(770): n is a, c, g, or t
  misc_feature (772)..(795): n is a, c, g, or t
  misc_feature (797)..(799): n is a, c, g, or t
  misc_feature (801)..(814): n is a, c, g, or t
  misc_feature (816)..(816): n is a, c, g, or t
  misc_feature (818)..(819): n is a, c, g, or t
  misc_feature (821)..(821): n is a, c, g, or t
  misc_feature (823)..(825): n is a, c, g, or t
  misc_feature (827)..(827): n is a, c, g, or t
  misc_feature (829)..(829): n is a, c, g, or t
  misc_feature (832)..(836): n is a, c, g, or t
  misc_feature (838)..(840): n is a, c, g, or t
  misc_feature (842)..(867): n is a, c, g, or t
  misc_feature (869)..(873): n is a, c, g, or t
  misc_feature (876)..(879): n is a, c, g, or t
  misc_feature (881)..(885): n is a, c, g, or t
  misc_feature (887)..(899): n is a, c, g, or t
  misc_feature (901)..(902): n is a, c, g, or t
  misc_feature (904)..(911): n is a, c, g, or t
  misc_feature (913)..(913): n is a, c, g, or t
  misc_feature (915)..(916): n is a, c, g, or t
  misc_feature (919)..(920): n is a, c, g, or t
  misc_feature (922)..(927): n is a, c, g, or t
  misc_feature (929)..(931): n is a, c, g, or t
  misc_feature (933)..(938): n is a, c, g, or t
  misc_feature (941)..(950): n is a, c, g, or t
  misc_feature (952)..(954): n is a, c, g, or t
  misc_feature (956)..(967): n is a, c, g, or t
  misc_feature (969)..(975): n is a, c, g, or t
  misc_feature (977)..(978): n is a, c, g, or t
  misc_feature (980)..(987): n is a, c, g, or t
  misc_feature (989)..(990): n is a, c, g, or t
  misc_feature (993)..(994): n is a, c, g, or t
  misc_feature (996)..(998): n is a, c, g, or t
  misc_feature (1000)..(1003): n is a, c, g, or t
  misc_feature (1006)..(1008): n is a, c, g, or t
  misc_feature (1010)..(1026): n is a, c, g, or t
  misc_feature (1028)..(1028): n is a, c, g, or t
  misc_feature (1031)..(1034): n is a, c, g, or t
  misc_feature (1036)..(1037): n is a, c, g, or t
  misc_feature (1039)..(1039): n is a, c, g, or t
  misc_feature (1041)..(1041): n is a, c, g, or t
  misc_feature (1043)..(1044): n is a, c, g, or t
  misc_feature (1046)..(1050): n is a, c, g, or t
  misc_feature (1052)..(1053): n is a, c, g, or t
  misc_feature (1056)..(1062): n is a, c, g, or t
  misc_feature (1064)..(1065): n is a, c, g, or t
  misc_feature (1068)..(1071): n is a, c, g, or t
  misc_feature (1073)..(1080): n is a, c, g, or t
  misc_feature (1082)..(1083): n is a, c, g, or t
  misc_feature (1086)..(1091): n is a, c, g, or t
  misc_feature (1099)..(1100): n is a, c, g, or t
  misc_feature (1104)..(1104): n is a, c, g, or t
  misc_feature (1106)..(1106): n is a, c, g, or t
  misc_feature (1109)..(1109): n is a, c, g, or t
  misc_feature (1111)..(1111): n is a, c, g, or t
  misc_feature (1113)..(1113): n is a, c, g, or t
  misc_feature (1115)..(1118): n is a, c, g, or t
  misc_feature (1122)..(1124): n is a, c, g, or t
  misc_feature (1129)..(1130): n is a, c, g, or t
  misc_feature (1132)..(1132): n is a, c, g, or t
  misc_feature (1135)..(1136): n is a, c, g, or t
  misc_feature (1139)..(1140): n is a, c, g, or t
  misc_feature (1142)..(1143): n is a, c, g, or t
  misc_feature (1145)..(1145): n is a, c, g, or t
  misc_feature (1148)..(1148): n is a, c, g, or t
  misc_feature (1150)..(1151): n is a, c, g, or t
  misc_feature (1154)..(1154): n is a, c, g, or t
  misc_feature (1158)..(1158): n is a, c, g, or t
  misc_feature (1160)..(1160): n is a, c, g, or t
  misc_feature (1162)..(1162): n is a, c, g, or t
  misc_feature (1164)..(1166): n is a, c, g, or t
  misc_feature (1168)..(1168): n is a, c, g, or t
  misc_feature (1172)..(1173): n is a, c, g, or t
  misc_feature (1175)..(1178): n is a, c, g, or t
  misc_feature (1180)..(1180): n is a, c, g, or t
  misc_feature (1182)..(1183): n is a, c, g, or t
  misc_feature (1186)..(1187): n is a, c, g, or t
  misc_feature (1189)..(1192): n is a, c, g, or t
  misc_feature (1195)..(1198): n is a, c, g, or t
  misc_feature (1202)..(1202): n is a, c, g, or t
  misc_feature (1204)..(1205): n is a, c, g, or t
  misc_feature (1208)..(1209): n is a, c, g, or t
  misc_feature (1211)..(1211): n is a, c, g, or t
  misc_feature (1214)..(1214): n is a, c, g, or t
  misc_feature (1216)..(1216): n is a, c, g, or t
  misc_feature (1218)..(1218): n is a, c, g, or t
  misc_feature (1220)..(1220): n is a, c, g, or t
  misc_feature (1226)..(1231): n is a, c, g, or t
  misc_feature (1233)..(1233): n is a, c, g, or t
  misc_feature (1237)..(1238): n is a, c, g, or t
  misc_feature (1240)..(1241): n is a, c, g, or t
  misc_feature (1245)..(1245): n is a, c, g, or t
  misc_feature (1247)..(1249): n is a, c, g, or t
  misc_feature (1255)..(1256): n is a, c, g, or t
  misc_feature (1258)..(1259): n is a, c, g, or t
  misc_feature (1261)..(1262): n is a, c, g, or t
  misc_feature (1264)..(1266): n is a, c, g, or t
  misc_feature (1268)..(1268): n is a, c, g, or t
  misc_feature (1270)..(1271): n is a, c, g, or t
  misc_feature (1273)..(1273): n is a, c, g, or t
  misc_feature (1293)..(1293): n is a, c, g, or t
  misc_feature (1498)..(1498): n is a, c, g, or t
  misc_feature (1973)..(1973): n is a, c, g, or t
  misc_feature (1988)..(1988): n is a, c, g, or t
  misc_feature (2616)..(2616): n is a, c, g, or t
  misc_feature (3306)..(3306): n is a, c, g, or t
  misc_feature (3402)..(3402): n is a, c, g, or t
nnnnnnnnnnnnnnannnnnnnnncnnnnannnnnnnnnnnnnnnnnnnnnnnntnccnnnnnncnngcnnncannnnnnnnnnnantnnnntnnnnnnnntnntnntngnnncnnnnnnnnngnnananannannnnnncananatnnnnntgnnnannnnngnnttnnngnnnannnnnnnnntnnngannnnnnnnntnnntnnnnnnnnnnnnnnnnnnntnannnnnannnnnannnnnnngnncannntnnnnnnnnnnnnnngnnnnanannnnnnnnngnnnnntnnnnnnnnnnngannntnnnnncnnnnnnnnnnnnnnnngnnnnnnnngnngnnnnnntncgcnnntnnnnncnnntnttnnnnnnnanannnnnnnnnntnnntnnnaanngngnanntnantnnnnannnnnnnnnnnnnnnnnnncaannnnnnangnnnntntntnnaannnnnnngnnnngnancaaanannnnnncnnncnnnncnanannngnnnngnnnnnnntnnnntnnnnnnanncnnnnannnnnnnnannnnnnnnnnnnnnnnnnnnnnnnnnnnnnnnnnnnnncnannnnccnnnnnnnnnnnnnnnnncnnncgnnnnnnnnnnnaannnnnnnnnnnntnnntnncncnnncnnnnntnnnnnnnnnngnnnngnnggtnngngnngnnnnnnnnnntnnngnnnncnnananngcngnnnnngnntnnnccnnnannnngnnnnnnnnnaancnnnnncnnnnnnnnnnnnnnnnnnnnnnnncnnngnnnnnnnnnnnnnntncnncnannngncntannnnncnnncnnnnnnnnnnnnnnnnnnnnnnnnnncnnnnntgnnnngnnnnngnnnnnnnnnnnnngnngnnnnnnnnantnnttnnannnnnngnnntnnnnnnggnnnnnnnnnngnnntnnnnnnnnnnnnannnnnnngnncnnnnnnnncnnagnntnnngnnnnttnnnannnnnnnnnnnnnnnnntnaannnntnnantncnntnnnnntnnaannnnnnntnnatnnnncnnnnnnnnannccnnnnnntgaaatanncccntnttngncnannnncctnnncgggnngnaannccnncnncngtngnnttncttnantngnnntntttnntnnnncngnnttnncnnnngannnnttgnannttnntnttncngnantttctnnnnnngntttnntnntgancnnntttttnntnntnnannnancnncnattaaaaactatacaaaaancgagcataatcttgcatatatggattatgcgatgattttttgtctatagttttattggtgattagtattattcacatataataatatgaaaagcaggtgcggaaaagaacgggaaaattttatgacagatacagatataaaccgtcatatcatatgcgcctgcaccgaatttccgcaaaacttttccaaaccccttgccaagccngaaaatatatgctacaatataaataatttatatttttaagggagcgatcatatgccaatttacgaatcgggcgaagattatctggagactatacttctccttcacagaaaaacaggctttgtccgttcggtggatattgccgctgagctcaattactcaaagccaagcatcagccgtgctatgaatatcctcaaggacgatggcttcatcaccgttgaatcaggcggtcagataatgcttaccgaaaagggcaaggcaaaggctgaatccatttacgagcgccatgttatcataaccgagttctttgaaaaggtgctgggcgtagatcatgagatagccgctcacgatgcctgcaagatagaacacattatcagcgacgaaagctatcagaagctgaaagaatttaccgctgaacataaattccacgactgatattttcctcgggtctgtgatccgaggaatttttttgtctgcngttagcactctgacncctcatctgttagcactctttttatgtgagtgctaagtttcatcattctatcacaaaagcatgatttttctatcataatagggctgtattatatagacatcaaaaggagataagaaagagagcaaaggaaagatgaaagaagatggttcctatgcaatgcttatctcaatgataataattagattttaaaggagcgttttatatgtacggattaacaccttttgaaagaaatttctttgattcagtcaatgactttgacaaggcatttgcaaagagcggcgttcgtgcctgccgcacagatatcagagaggacgatgacaagttcatcatggagtccgagcttcccggctttgacaaggaagatatcaccgttgacctcaacggcaactcacttacactgaaagcagagcacaaggccgagaccgaggagagcaagaaaggcaagtatatccgccgtgagcgctcctatggctcttacgaaagaacattcgatattgcgggcattgataccgaaaacatcacagcagattacaagaacggtatccttaccatggtgcttcccaagaagaagcctcaggctcccgcttcaagaaagcttacaataaactgatatcataaacatcagctnacaatatataacgatcggaggaatctatatgtacggtttaactaattacagaaaaggcgattttgatatctttgaccccttcaagggatttttcgacaatatgtccgctgacccttgccgcacggacatcagggacgagggagaccgcttcataatggagtccgagcttcccggtttcaacaaagaggatatctcagttgatatcagcggcaattctcttaccctcaaagccgagcacaaggctgagaacgaggagaaaaaggagggcaagtatatccgccgtgagcgttcttacggctcatatgagcgttcctttgatatcacaggcatcgacagcgacaagatcactgccgactacaagaacggtatcctgataatggtgctccccaagaagcagcctgaggctcccgcttccaagaagcttaccattaactgatatcatatatatcatcacggaggacacttccatgtttaagctgtagatataatgacagtgacccgttaaagcaggtcacacagcaatatactacgaatggaggaatttatatgtatggcttaacaaattacagaaacaatgaaaacagtatcttcgaccccttcaaggatttcttcggcggacttttttccgatgatatgtccgaaaacagctgccgcaccgatataagggacgagggtgacagatatattatngagtctgagcttcccggattcaataaagaggatatctccgttgatatctccgacggctatatgaccgtcagcgccgagcacagcaccgagaacgangagaaggacgacaagggcaattatatccgccgtgaacgctcctacggttcattcagccgttcctttgacatctcggacgtggacgctgaccatatctccgccgaatataagaacggcgttctcgaaatgatcctccctaagactcagacaaccaagcctgagacacggcgtcttacagttggataaccttgttttgcatgaggctgcacagtcagttctgcgcagcctcatgttttctgaaaagatccccatgagctgcggacagatgtaaattgcataatcggtttttaaattattctgcattgattgtgcatagtgacgaaaatgcaggtaattgcataaaaacacttgattttttcgcagaacatggtaaaatatatttagcactcaagaaataagagtgctaacacatgaattgattgactgctaaccgataaaaaggtaggcggctattataggaaggagttttttataatgaaaatcaagccacttgcagacagagttgttattaagatggttgaggctgaggaaaccacaaagagcggtatcatccttacaggcaatgccaaggaaaagccccagatcgctgagatcgtcg

SEQ ID NO: 658 - DNA, 4000 bp, Escherichia coli
  misc_feature (1988)..(1990): n is a, c, g, or t
  misc_feature (2282)..(2282): n is a, c, g, or t
tcgcgcgctcgcgtacgtcgtctcgatcacgcagcacggcgcatactttctcacctcgtactcggtgccgcccgtggcactcggcacgaccgcgtactcgggctgttcctcggtgattttgccaaacaccgatcccatgatcgatgcgtgcgatgcgtgcgcgcgtctgggcgcggcggcggcggcggtggcggcggcggcgatgcggtggcgcgcgaaagacggaatgaatcgcgcgtcactcactgacgctcaacagcatcaccatcacgatgacggcgctcgcccgcggcacctcggcgatgcgtgcgccgcacggcacctcgcgcgcgacgccgcactcgcgcctctcgcgcgtgtctcgccccgtcgtcgtcgccgccgcccgacgcgcggtcgaacgcgagcgcgtggatgcggatgacgtgtcaccgccaaccacgcgtcgcgcggcgctcacgaccgcagcggctgcgctcatcgcgctcaccacggcgcgagacgcgcgcgcgaaacaagatcaagggtgcgaatcgtgcagtgactcgaattcggcgttgtctgaaggggacaaggcgtttaaacgctcggagagtgggttgcggtttctcgatttgaaggtgggcgaaggcgcgttggtggagacttcggggacgaaagttgtcgtagattggtcagggtacacgtctggatatcaagcgaagaagattgaaagtacgcgtgagacggatgagccgtttgtgtttactctgggggatggcacggcgattccggcgtttgacgaagccgtgcgcgggatgcgggtcggcggggtgaggcgcattgaaatccctggcgagctcgaagaaaagcttgggtattcgagaaataaagcattaaggtataatggcgtcggtccaaagccgtcgacatttggtggacaacgtgcgctggactttgtgcttgataatgaaacgttgcgggactttaatcgctcgttgttgtttgacattcgtctgtcttcggtgcgcaaatgagtctactgctgcggcgtggctatattacactcaaacgcaaatacacgtttgatttgaaaaaaaaatctctattatatagttgaatttactccccaacggctctttccgtagtagttacctggctatttctacctagaagaattctctgtatgatgatgtgaatacgttataagaagactttggttatcacgccgacgaaagcgcgaatgaacaatacgcccaagccaaccaagagcgcgagaaacatcgccacgtatcgccgatgattcttctcccgtaactcgctcacatcgctcgtcacggcggtccacatcgcagattctttataatccacaccctcgcgaacgttttcgtcttgctcgacggttttccagtgcataccgcgggccgggtcccatacgagttcggtgcgcacgccgccgctcggcgtcgccgatcccgccacactcaacgtcgcgttttgcacgtcagctcgattcaaagcttcaacaataacatctgcaacatctgtgcgcgccaccttgcccgcgtgcacgcgcgcgtccccgcagccgaggacgagccgccgctgcccggcgacatcctccgcgcacggagccgcgtcgctcaatgacccaggacgaacgaccacatacttcatcgtcgacgacgccgcacaaatcgctctcaacgctcgctctcccgcgagttgccattgaatcgtcatcgaaagtacgacattcaacaacacggcgatccaatcaaacgccggatacccaactgacatacccgtcacgcgaataaacttttcgcatcccgcccgttcgcacacctccgcgagcgttcgtaccgctctaaaattcacccaatacggatgtccaaaatcatcctcgcgcgtctcgggcgcggcggcgaacacatccgtaatctttccaatccgttgcgcgccgaacgccgccacgcacgcgtcgcacctcgcgctcgacacccacnnntcaacatcagcctcgctcacgacgtctccgcgcgtcacctccgcccctaatgccttgagccgttccgcgcgcgccgatcgatcgtctctcgcgagcacgcgcacgcgcgtcggtcgcgccggttgcgtgagcaagcgctccaccaccatggcgccgatgcgtccagtgcctccgacgacgcaaatcacgcgcgcgtcgtcctcgcccgcgctcgcccgcgcgcgcacgcgatggcgctcgcgtgcgggacgcatcggtggcgcgaacggcgccgcgcacgcgcgcgcggtgnacatggcgcgcggtgaacactgacgatggtcaacactggatcgcgtgacatcactttgcgacgcgcgcaggcgcgaacgtgcacgcgctcgatcgttcaccgacgcacgacgcgatgtctggcggtcttccctatgggttgcaatcgatgttaaaggtgcgcgaatggaggagagcgcgggaagacggatgcggatggtgatgatgcgttggcgcgtttgagcgaggcggcgggagattaatacgcagcgcgcgtcgatggaggcgcggtgcgcgcgcgaacgcgcggtgtacgcggcgcgagatgttgcgtcgtcgattcgtcgcgcgcgggaggcgtgtgcggcggtgtcgcgcgcgtgagacgacggtcaaacgcggcgcggatgtgtgttttttctcgcgcgcgttgactaaaagttgaaatcgtttgcacgcgaataggacgggtccaagcacctcacgggcttggacgaagccgtggtgaaaaatattgaggcgtgtaagcagttgagtcaaatcacgcgcacgtcgctcgggccgaatgggatgaataagatggtgatcaatcatcttgagcggttattcgtgacgagcgacgcggcggtgatcgttcgtgaattggaagtcgcacaccccgcggcgaggttgattgtgatggcggcacagtcgcaagaacgcgagatgggtgatgggacgaatcttgtggtgacgtttgcgggtgagctcttgggattggcggaggagttggtgcgcgacgggttgcacccgagcgaaatcatcgaagggtatgaaaaggcgttgacgaagacattggagtggatggaagagctcgtggtggagggtagtgaagtacttgatgtcagagacgttgcggcgactgcgggaagaatcaaaggcactttgagttcgaagcagcacggatttgaagacaagttgtcgaccgtcgtcgcgcaagcgtgcattgacgttttgccgaagaatcccatgaacttcaacgtcgacaacgttcgaacatccaagattccaggctcttcattgtccgattgcaccgtagtgcaagggatggtgattcgccgtggcgttgaaggatccgttcgcgcgctgaagaatgtcaaggttgcggtgtttggatgcgcggtggatacgtcatccacggagaccaagggcacggtgttgatctcttctgcgaaagaactcgaagcgtactccaagggcgaagaagcgaagatggaggagtacatcagagacattgccgaaagtggtgctaaggttgtagtcacgggtcaatcgtttggtgaaatggctattcacttcatcgaacgctacggtttgatggcggtaaagattccttccaagtttgaacttcgccgtttgtgccgcgcgacaaacgcgaagggtttagtcaagctcgcgcgtccggaaggtgatgagctcgggtatgtgtcatcgattgaggtgcgtgaaatcggcggtacgcagtgcatcgttctttctcaagacgaccacacgtctcgcgtttctaccgtcgtcttgcgagggtccaccgaaagcgcactcgatgatatggaacgtgccgtcgatgacggcgtgaacgcattcaaggcgctcacgaaggattcacgaacggttcccgccggaggcgcgacagaaattgaactcgctcaccgcctcgccgcgtacggtcgcaagcaaactggtttggatcagtacgccatc

SEQ ID NO: 659 - DNA, 4000 bp, Escherichia coli
  misc_feature (50)..(50): n is a, c, g, or t
  misc_feature (840)..(840): n is a, c, g, or t
  misc_feature (1026)..(1026): n is a, c, g, or t
  misc_feature (1049)..(1049): n is a, c, g, or t
  misc_feature (1852)..(1852): n is a, c, g, or t
  misc_feature (1968)..(1968): n is a, c, g, or t
  misc_feature (2388)..(2388): n is a, c, g, or t
  misc_feature (2655)..(2655): n is a, c, g, or t
  misc_feature (2699)..(2701): n is a, c, g, or t
  misc_feature (2703)..(2703): n is a, c, g, or t
  misc_feature (2755)..(2756): n is a, c, g, or t
  misc_feature (2778)..(2778): n is a, c, g, or t
  misc_feature (2787)..(2788): n is a, c, g, or t
  misc_feature (2798)..(2798): n is a, c, g, or t
  misc_feature (2823)..(2823): n is a, c, g, or t
  misc_feature (2826)..(2826): n is a, c, g, or t
  misc_feature (2869)..(2869): n is a, c, g, or t
  misc_feature (2871)..(2871): n is a, c, g, or t
  misc_feature (2880)..(2880): n is a, c, g, or t
  misc_feature (2963)..(2963): n is a, c, g, or t
  misc_feature (3478)..(3479): n is a, c, g, or t
  misc_feature (3482)..(3483): n is a, c, g, or t
  misc_feature (3505)..(3505): n is a, c, g, or t
  misc_feature (3507)..(3507): n is a, c, g, or t
  misc_feature (3520)..(3520): n is a, c, g, or t
  misc_feature (3528)..(3528): n is a, c, g, or t
  misc_feature (3565)..(3565): n is a, c, g, or t
  misc_feature (3568)..(3569): n is a, c, g, or t
  misc_feature (3576)..(3576): n is a, c, g, or t
  misc_feature (3581)..(3581): n is a, c, g, or t
  misc_feature (3584)..(3592): n is a, c, g, or t
  misc_feature (3597)..(3597): n is a, c, g, or t
  misc_feature (3599)..(3599): n is a, c, g, or t
  misc_feature (3602)..(3606): n is a, c, g, or t
  misc_feature (3609)..(3616): n is a, c, g, or t
  misc_feature (3619)..(3623): n is a, c, g, or t
  misc_feature (3627)..(3627): n is a, c, g, or t
  misc_feature (3629)..(3630): n is a, c, g, or t
  misc_feature (3632)..(3635): n is a, c, g, or t
  misc_feature (3637)..(3637): n is a, c, g, or t
  misc_feature (3639)..(3646): n is a, c, g, or t
  misc_feature (3648)..(3648): n is a, c, g, or t
  misc_feature (3650)..(3650): n is a, c, g, or t
  misc_feature (3653)..(3656): n is a, c, g, or t
  misc_feature (3659)..(3661): n is a, c, g, or t
  misc_feature (3663)..(3663): n is a, c, g, or t
  misc_feature (3665)..(3668): n is a, c, g, or t
  misc_feature (3672)..(3672): n is a, c, g, or t
  misc_feature (3675)..(3676): n is a, c, g, or t
  misc_feature (3678)..(3678): n is a, c, g, or t
  misc_feature (3680)..(3682): n is a, c, g, or t
  misc_feature (3685)..(3685): n is a, c, g, or t
  misc_feature (3687)..(3688): n is a, c, g, or t
  misc_feature (3691)..(3691): n is a, c, g, or t
  misc_feature (3693)..(3694): n is a, c, g, or t
  misc_feature (3696)..(3696): n is a, c, g, or t
  misc_feature (3699)..(3703): n is a, c, g, or t
  misc_feature (3707)..(3715): n is a, c, g, or t
  misc_feature (3717)..(3717): n is a, c, g, or t
  misc_feature (3720)..(3720): n is a, c, g, or t
  misc_feature (3722)..(3722): n is a, c, g, or t
  misc_feature (3724)..(3724): n is a, c, g, or t
  misc_feature (3727)..(3730): n is a, c, g, or t
  misc_feature (3732)..(3734): n is a, c, g, or t
  misc_feature (3736)..(3738): n is a, c, g, or t
  misc_feature (3740)..(3741): n is a, c, g, or t
  misc_feature (3750)..(3751): n is a, c, g, or t
  misc_feature (3753)..(3753): n is a, c, g, or t
  misc_feature (3756)..(3757): n is a, c, g, or t
  misc_feature (3760)..(3762): n is a, c, g, or t
  misc_feature (3764)..(3764): n is a, c, g, or t
  misc_feature (3767)..(3767): n is a, c, g, or t
  misc_feature (3770)..(3770): n is a, c, g, or t
  misc_feature (3772)..(3773): n is a, c, g, or t
  misc_feature (3775)..(3777): n is a, c, g, or t
  misc_feature (3783)..(3783): n is a, c, g, or t
  misc_feature (3785)..(3786): n is a, c, g, or t
  misc_feature (3788)..(3790): n is a, c, g, or t
  misc_feature (3792)..(3800): n is a, c, g, or t
  misc_feature (3802)..(3808): n is a, c, g, or t
  misc_feature (3810)..(3812): n is a, c, g, or t
  misc_feature (3817)..(3818): n is a, c, g, or t
  misc_feature (3824)..(3828): n is a, c, g, or t
  misc_feature (3830)..(3832): n is a, c, g, or t
  misc_feature (3834)..(3834): n is a, c, g, or t
  misc_feature (3837)..(3837): n is a, c, g, or t
  misc_feature (3840)..(3840): n is a, c, g, or t
  misc_feature (3842)..(3842): n is a, c, g, or t
  misc_feature (3845)..(3847): n is a, c, g, or t
  misc_feature (3849)..(3850): n is a, c, g, or t
  misc_feature (3852)..(3855): n is a, c, g, or t
  misc_feature (3857)..(3857): n is a, c, g, or t
  misc_feature (3860)..(3860): n is a, c, g, or t
  misc_feature (3870)..(3870): n is a, c, g, or t
  misc_feature (3872)..(3872): n is a, c, g, or t
  misc_feature (3876)..(3877): n is a, c, g, or t
  misc_feature (3879)..(3881): n is a, c, g, or t
  misc_feature (3883)..(3884): n is a, c, g, or t
  misc_feature (3886)..(3887): n is a, c, g, or t
  misc_feature (3892)..(3900): n is a, c, g, or t
  misc_feature (3903)..(3904): n is a, c, g, or t
  misc_feature (3906)..(3906): n is a, c, g, or t
  misc_feature (3908)..(3908): n is a, c, g, or t
  misc_feature (3910)..(3911): n is a, c, g, or t
  misc_feature (3914)..(3915): n is a, c, g, or t
  misc_feature (3917)..(3917): n is a, c, g, or t
  misc_feature (3920)..(3923): n is a, c, g, or t
  misc_feature (3925)..(3928): n is a, c, g, or t
  misc_feature (3930)..(3934): n is a, c, g, or t
  misc_feature (3936)..(3948): n is a, c, g, or t
  misc_feature (3950)..(3952): n is a, c, g, or t
  misc_feature (3955)..(3956): n is a, c, g, or t
  misc_feature (3958)..(3962): n is a, c, g, or t
  misc_feature (3966)..(3967): n is a, c, g, or t
  misc_feature (3970)..(3970): n is a, c, g, or t
  misc_feature (3972)..(3975): n is a, c, g, or t
  misc_feature (3977)..(3978): n is a, c, g, or t
  misc_feature (3981)..(3981): n is a, c, g, or t
  misc_feature (3983)..(3984): n is a, c, g, or t
  misc_feature (3986)..(3988): n is a, c, g, or t
  misc_feature (3991)..(3995): n is a, c, g, or t
  misc_feature (3998)..(4000): n is a, c, g, or t
ttccccggatttgcaagcttcgggttatagtttggattccaaatggtatnctcgtcagtattgacaaatcccaaggtgttttttgccgttcttccccggtccacgatattggtgtaagggttccaaagggtatagtttagcttccaaccgcttcgattatattgtttattccaaaaacgatgctctgcatcatccggaatggttaacttaataatcatcatggtctgaccggagcctttccagttcttcttaaactctacggtatagtccttccccttgacaaattttttactttccggtggagtgtccgccgcatcccaggttcccagaacaatagagcgttcgtccacataggttcctgcaggaagaagatcatagataattccggattttaacacataaggcttggtatactcatcctcctgtaaactggtggggaagattccccagttaaagccccaggcaataacatccatgctttgctcgctgcgctcaggatggtccacataaggtttgttttgctttaccagctccgaggtgatatttaagggctctaaaccatagcctatttcagccaagtattttcccgccctcttatcaataatcgctgtacctaattgacggacttctcctacagcgccacctgccaggaagttcatgttatacccgtctcctttagccatggtatcggcaatgaaggtccgcatagcaggctgaggagtcacctttatggtgaatgacgcatcaaagtttgtcttataatagggggaatcctgtttaaactgaagccctacaatgttatctccaaaggcagcctctaagtccagctgattcgtttgngaaatgtcggcattgtcacggagtgtatacttctttattgcgccgggctctgttacagtaaagataacgcctccatggtcgttatagcttaagcgaccatactcaaaatatcctcttcccggatatctcttatcctttaccataacctgtacgggaggatagctggaatctttctttctggggctngctttaccggagaattttaccanctgattccccaaataatccacatcataggccttcatatctcttaaatagatacggctataatggtagtcctcctctgttaattcataaacgccacctctataaacatcaccgtttgttatagaatcactggagaattcatcctgatttgtttcctctttcaaagtttttccatttacttggctgggttttacagagaatagcttatactttccgtctgtaagggtagcaccggaaccgggaacattagtatcagaggtggtatagcttccgtcccgtgacacatttacactgctatcctttgccttatatgtagcagaaagagtaaagctttcattccagttgctatatactacaggagccgctgcaccacctttataaatactttgtaatccaaaaacgccaaggtaaatctgtctatccacagtattatacttctttaataaaaagtctcccggccctgaagagcgaagaagtaccttcataggtgccgcctccgcctcaccctttctcacatagccgtctgcccaggtttctgtaaacccaaccttattgctaatatcaagcccatcggtcgtaagatcgatacccttgtcctttgcctcttgcaacttgctcataggatacttatacagtaaggcataaagctgggaattatacttgtcgttggcatagtttaaggcagccacatagggctgatgagtggggaggttttctacactgggatcctttggaattcctacatagcttctattaatggggttctccaaaaaaggctttgttgccggaggattttctcccggcnccataaactttgcaatatccgcataaccgtttctggcatgattttcaatatcgctcttattgtagtagacgttccatgccgcgtttgtaggaagcttcttcgcaccaaccaggatncctccacccgaatctgcaggatctaaggtatggaagctataatcaaaggcctgagagcttgccctggctctatccactcttagataccaaacgccatagaaatactcaccggggttatccgtggtagtgccccagctgggatcccaggagaagaatatcccctgcttcatatccgcctcaccgtgcttgaaattgaagctagtaggctcaaccttggtttccacatgaacggaaagaggaacatcctgtttcacatccaaactgttatcactgtggtcaatatttaagctgacagggaatttattgtcatagacacctacccccttagcataatcatgctttaccttcagcatggaaggagtcaggttgtaggcaatatccgccttaaaagtaaatccaccgtttaccgccctatagttngttaaacgaagatagtcttccggcttatcctttccgggaacattctttttgataatggtataattaaagctactttgggtattggtattcggcgcctcaagcaagcctgtagccatagaaggctgcagcttatgctgattcccttcctttttctcatatacagaaattttgtccggttcattttcatcccagccttcaaaaattctggcaggaacatcaatattaaccgttcctacatcataactgacatttttgtttcccttcagngtaagctctatgcccagggtagttgtatccgtaccgttggaagnnntntccggaggaatgatttttaaatctctttgttcccgcattacaccgttactgnnatcggtataagtatggccgttnggaatggtnntgccaaatcnaggagcattaggagcttccgtccanaangccttaaactcatggttgacagcctcttctcccaaatcccttntncttcttacnaggataatgggactgaaatgctttgcggaaaacaggagttcttctccctcctcctttacactaaggatttctccgggatgatnttcagaaagatgtacaatctgtagttcttcctcaagatcctcttcttgatcttctttaagattttcctcagtcttctctaaagcatcctttatttttttacttttttgcaggcgaagctctaccttcttgccgttcttaggctgtacttccttttccacaccgttaacttctctgtagaaggaaatgtcgatagcctccagaacttcaacctccgcctcttcccccggattctttttcttataatccttcaaagaaagggccttggcctcttccagaatgctttctgaatctaccgggaccaccttcattctggttccctcatagaaggttccctcagaaaagcttgccagtacagtaatatccttactgtaggaagcctcaaaagaaccggcgtccatatactccggcttttcctcctgcttagcttcttccgatgacaaactagccttctcttccaaagaagactcctcagtctttgcttccgaaggagcagtcttattctcctcttctgatnntanntcttctttcttttccttttttncntctgatgcggatncttccttntctaaggcagtttcttccaaagaagtctttctctccnccnncttctcntccgnagnnnnnnnnncttcntnctnnnnntcnnnnnnnnttnnnnnttcngnngnnnntncnnnnnnnncnanagnnnnacnnncnannnnttcnccnncnannnctncnncananntnacnnnnngcannnnnnnnncnagnancnaannnntnnngnnntnngccataccnntnttnncannncntcntcntnnannncttttngnnannntnnnnnnnnntnnnnnnncnnntcctnntcccannnnntnnncngtntcntnctnnntnntnnnntnctncatgtcacantncttnntnnntnnanncttcnnnnnnnnnagnntntncnnaannangcnnnnannnngnnnnngnnnnnnnnnnnnngnnnatnntnnnnnaaannaantnnnnannaancnntnnngannnnnaannn

SEQ ID NO: 660 - DNA, 4000 bp, Escherichia coli
  misc_feature (545)..(545): n is a, c, g, or t
  misc_feature (1474)..(1474): n is a, c, g, or t
  misc_feature (1476)..(1477): n is a, c, g, or t
  misc_feature (1492)..(1492): n is a, c, g, or t
  misc_feature (3741)..(3741): n is a, c, g, or t
  misc_feature (3858)..(3858): n is a, c, g, or t
gcgacttttatcatgctactgcctcaaaacagcgccagtccgtttgttcaattggtccaggatgcgctgaactgttttgtcaaccgctttgtcgttcaatgttttgttggcatcttggaaaatcaaaccgatggcataactctttttatctgcgggcagtttatcaccctcgtaaacatcaaaaaggaacgaattcaccaataaacctttacctacttgacggatgcaatcttccaaattctggtactgttcggaccggtcaacaagcaaggcaatatcgcggcggacagaagggaatttgggtaaattttcaaataatgaagccccaccccgcagtaccaagtttttgcattgttcccagtttaagctggcatgaacaacggcacctttgatgtcaaaatgcttcaaaacttttggatgtacggtacccagatggcccaacgtagatttaccagatttgacgatcacgaactcgccgtaaagtgaatgttcggcggtggtaaatgaaacggatacttccaatcggttaaataaagcttctagcntgcctttcaaccagaaataatcgttctgttgactggccgaattccaatagtcttcacgttgcgcgccagccgcgaaaaggtctagctgagtattctcatagtagccgttagatcctttcccgtaggttttgccgcgctcgaagaatcttaagttgggttgttgtcgcttttgattgaagctaatggcttgtattccaccgaaaaggaggttattgcgcatgacattgagatcgagactcaacgggttaagcatttcaatgagtgatgcggaaacttccggctgaagtgttgtgtaatcggccccttttgcgaggctgttattcatgatttcgaagaagccattgccggttaactggtcaagaacactgcgttctattttttcaggacgtggatcgtgctgagcaacacttatgcgcatttgatccggcacgggaacttcattgaagccgtaaatacgaagtagttcttcagcaacatcgacatcgcgcgtaacgtcaacccgataggtaggcgcaagaactttccatgaatcgccgtcaatgctaatgatttcaaaatcaagcaactcaaggatttgtgtcattttcgctttgtccaattcaaccccgataagttttaaaactttcgaacggctaaagtcaatcaagacgcgttcaaaatggtctttgcctttatggtctctggtgcttgcggttccgccggttaattcgcacaacaaggcaacggcataagcatgcgcgtcaatggtagcgtttggatcgacacctctttcataacgatagctggcgtctgaatttatagcatgacgtttcgccgttttacgaacacgcacgctgtcaaaataagcgccttcgaggtagatattctttgtttggcgggtaacgccgcttgaagcgccgcctaaaacgccggcaatgcacatgggtttngnngcatcagcaatcacncaatcctgcgggtccaatgcacgttctacctcatcaagagtaatgagcttttcccccattttcgccttacgtacgatgaccgtattcccttcaatggcatctgcatcaaaagcatgcaacgggtgtccaaaggtgtgcaacacaaagttggtaatatctacagcattgttctttggcgtgagtccgatcgctacaaggtgttccttcagccagtcgggactttcttcaatggttacgttggcgataaaggtgccgtggtatgacggacagccgccttcgtcttcaatccttaaatcgatagggttgggggctgtttccgacgcaaagagcttgggctcttctagttccggggcatccattcctttggtaatcattgcggcacgtaaatcgcgggcgacaccgatatgtcccatcgcatccgtgcggttaggtgtcaagccaatttcgaagacgaaatcactttcaacatcaaagacggaactgcagggtatccccggttttaaagaatcatccagaaccataatgccgtcgtgacccgacccaagaccgagttcatcttccgcacagatcatgcccatactgacttcaccgcgtattttaccttttttgatttttagttcctcgccacccgggtatagtgtggtgcctaccgttgcaacggggactttttggccagccgctacgttgggtgcgccacagacgatttgtaccgcatcttccattccaatgttgaccgtggtgatgcgaagtctgtcggcattgggatgttgttcgcaagtaagcacttctccaaccacaaccccgcgaaggccaccgggaatagtctccacttcttctaaaccttctacttcgagaccagtatcagtcaataattcagagaccagctctggattgagatctataggtaaataacgctttagccagcggtatgaaatcttcattgggtcaaaattgattgaaagccaaagttacactttgcaggagaatcgcaaaggcttatttctgctgaattagaagaggttgaaaagaaccagtccgtagattccaaagcgcagataacgcaccaatgtgagcaatgcgaaatatttgaaagggaacctgttcaggccgcagagttgacatacgatagggtagggcaagggggtcagcgcagcgaggataatgagtagtcctccgaagtttcttaattggtccaaagtggatttatggcgctccaaaattcgctttctaatgatgctgcgagtacgtaaaaatcggccgataaagtaacttgcaattcccgcactgtagctcaaagaggctaggaagaagagcatccaacgcggttttaatgtttcgtccgcccaaacaataagtagttcaggggtgatgataccaaaactaacctcacttgcgaaaaatagtcccaacaatgcgggcgtgctaaaagctagcgttacccactttatagcagaatctatatccaatatccaagcatcgaaagcatagaaaagacccagaacagcaacaatggagccaataagtttgacgaggtttttccgcacaaatgcgtaaccaccggagtgctgaagtagtttgtggtaacctttcagaaaaattgggatacgacttggcatgcgaattaagatattctattccaaccccattgatccttataaagttcaatccagcgcgatttaatgccctggtgatccggatggttgagttgtgcatcatcgagcaataactgttccacaacccctttggtccaggctagaattgcaccgtcgtttagtagcgaagccagtttgaattgaagctgcccgctttgacgcgttcccattaaatctcccggccctctcaactgcatatctacctccgcaatttcaaagccatctgtggtacgtaccatggtttcgaggcgtgttttcgcatcggctgaaagtttaaaggaagagactaggatgcagtagctttcatctgatccgcggccgacacggccgcgtaattggtgcaattggcttaaaccaaaacgttcggcgttttcaataaccattacggatgcattgggcacattaaccccaacttctatgaccgttgtagcgaccataatatttgctttcccttttgcgaagcgttgcatttcgccttctttctctgcggcggtcatcctgccgtgtacaacggcgatttggtattgcggtcgcggaaaatcacgcagcagctgttcgtagccaacttcaaggtttttaaggtctaacttttcgctntcctcgattaaaggaaaaaccacatacacttgccttcctgcggctatttctcgttgcataaagccattgagcttgagtcgatttttgtcgaaaaggtgtagggtttttacgggcttncgtcccggtggtaattcgtcaataacactaatatcgaggtcgccgtagacggacatagcgagggttcgtgggataggggtggccgtcatcaccaatacatgaggcggatgctcattcttcttccaaagcttcgcacgctggg

SEQ ID NO: 661 - DNA, 4000 bp, Escherichia coli
  misc_feature (197)..(197): n is a, c, g, or t
  misc_feature (273)..(273): n is a, c, g, or t
  misc_feature (1663)..(1663): n is a, c, g, or t
  misc_feature (1848)..(1848): n is a, c, g, or t
  misc_feature (1932)..(1932): n is a, c, g, or t
  misc_feature (1986)..(1986): n is a, c, g, or t
  misc_feature (2016)..(2016): n is a, c, g, or t
  misc_feature (2757)..(2757): n is a, c, g, or t
  misc_feature (2766)..(2766): n is a, c, g, or t
  misc_feature (3597)..(3597): n is a, c, g, or t
  misc_feature (3618)..(3618): n is a, c, g, or t
  misc_feature (3702)..(3702): n is a, c, g, or t
  misc_feature (3798)..(3798): n is a, c, g, or t
ccgacaaggtcaatcctttgtacgcttgatcaaaagaattggagacacacatggcattggtagaagtcaaagttccagacatcggtgatttcgatgaagtcgcggtcattgaattgatggtcaaggtgggtgacaccatcaaggccgagcaatcattgatcacggttgagtcggacaaagcagcgatggaaattccntcttcaacagctggcgtggtgaaagaactgcgcgtgaagttgggtgacaaagttaaacaaggttcggtggtgttgntgttggaagccagtggagctgtacctgtacctgctgaggtgccagctgctgctgcaccagcggccgcgcctgcagttcaatctgcgcccgttgcagcaccagcaactgatgctgcggtgtcagtgacatcctcgatggtcgctgctacacctgcacacaaccccggcgctccaacacttggcttgcctcatgcgtcaccttcggtgcgcaaatttgcacgcgaattgggtgtgcctttggaagaagtcaaaggcaatggacccaaaggtcgaatttcacaagacgacgttcaagcctttaccaaagacgtgatggcaggtgccacgcaaaccaaagcacaagcggccaaagcacccgcaggtggcgatggtgccgcgctgggattgattccttggcccaaagttgattttgctaaatttggacccattgagcgcaaagaaatgggccgcatcaagaagatcagcggcgccaatttgctgcgcaacgccatcatgattcccgctgtcactaaccacgacgacgccgatatcactgagttggaagccttccgtgtgtcgaccaacaaagaaaatgaaaagtctggcgtgaaggtcaccatgttggctttcttgatcaaggcttgtgtggctgccttgaaaaaatacccagagttcaacagctctttggatggtgatgccattgtctataaaaactattggcacattggctttgcagcagacacgcccaatggcttgatggtgcccgtgattcgcgatgccgacaaaaaaggcatcttgcaaatcagccaggaaatgggtgagttggccaagaaagcccgtgatggcaaattaggccctgcagaaatgacgggcgctaccttcaccatctcaagcttgggtggtattggcggtaaatatttcacgcccatcatcaacgcgcctgaagtggccatcttgggtgtttgcaagagcacacaagaacctgtttgggatggtaagcagtttgtgcctcgcctcatgttgcctttgtctctgacctgggaccaccgcgtgatcgatggcgctgccgccgcacgcttcaatgcgtacttgggtcaaattcttggcgacttccgtcgtgtactcctctaacaaattgcgggacaaaccaaggcgaaacattgcgctgtccccaactgattgaaaaactatggcactgattgatatcaaagttccggacattggcgacttcgacgaagtgacggtcattgagttgctggtcaagcctggcgaccttgtgaagcttgagcaaagtttgatcaccgtggagtctgacaaagcctccatggaaattccctgctcacatgctggtgtggtgaaagagctcaaagtgaagttgggcgacaaagtcaagcaaggctctgtggtcatgntgttggaaggcgaagcaactgcttcagccgccgcaccggctgcaactgctgcgccacaaaccagtgcgcctgttgcaacaccttcaccaacacaaacgcctgcacccgttgcggtcaatattcctaacgcagcatcctacagtggcacagtcgacattgaatgtgatttgctggttttgggcgcnggccctggtggttactccgccgctttccgtgccgctgatctgggccttaaggttgtgatcgttgagcgctatgccaccttgggnggcgtgtgtttgaacgtgggttgcattccttccaaagctttgttgcacgtggcngcggtcatggacgaagtcagtcacatggcngatttgggtgttgactttggcacccccaaattggacattggcaaattgcgcactcacaaagaaaaagtcattggcaaactcacaggtggcttggcagccatggccaaaatgcgcaaggtcaccactgttcgcggtgtgggtgaattcctcagcgccaaccacgtggtggtagaagaaaccacgggcacgggtcaggaaaaaactggcgtgaagaaagttctggctttcaaaaactgcatcattgccgcaggaagccaagccgtgcgtttgcccttcatgcccaaggacccgcgcgtggttgacagcaccggtgcattggctttgaaagaggtacctaagcgaatgctcattttgggcggcggcatcatcggtttagaaatgggcaccgtttacagcacgctgggcgcgcgccttgatgtggttgaaatgatggacggcttgatgcaaggcgccgatcgcgatctggtcaaagtttggcaaaaaatgaacgccccccgttttgacaacatcatgctcaaaaccaaaaccgttggcgccaaggccaccaaggctggtattgaggtgacgtttgaatctgcagaggagggcgttgcagcccctgcgccgcaagtctatgacatggtcttgcaggctgtgggtcgcacacccaacggcaagaaaattgcggcagaaaaagcgggtgtgagcgtgaccgaccgtggtttcattcctgttgacattcaaatgcgcaccaacgtgccncacatcttngccattggtgacattgtgggtcagcccatgttggcgcacaaagctgtgcatgaagcccatgtcgcagcagaagtgattgccggtgaaattcaaggcaacaaagagttggcagccagtgccttcaatgcgcgcgtcattccaagtgtggcttacaccgatcccgaagtggcatgggtgggcctgacagaagatcaagccaaggcgcaaggcatcaaagtcaagaagggtctgtttccgtggacggcttcaggccgcgccatcgccaatggccgtgacgaaggcgtgaccaagttgttgttcgatgattcacccgaggcccatggccacggcaagatcttgggcggcggcatggtgggcacgcatgcaggtgacatgattggcgaagtggccttggccatcgagatgggcgcagatgccatcgacattggcaaaaccatccacccccatcccactttgggcgaaagcattggcatggcagcagaggtggcgcatggcagttgtacagatctgccaccttcaaagaaataatctttcaagcgcaaaacaaaaaaccgcctgcgggcggttttttcatgagtgaaatgattctaatttttgacgggctcattttgtagtttgtcgacttgaacccttcgagcaccattgaacctctgttgccaataagcctcgcgcatgtcatccacccgcacggctttgccaggtctgggcgcgtgaatgaatttaccgtcacccacataaataccaacatggctgaaggttcgtttcagggtgttgaaaaaaaccaaatcgccaggtttgagttcactgcggctgatttcttctgtgactttngcctgttcttctgctcttcgnggcagaaccaagcccacagacttttcatacatgtagcgcacaaagccgctgcaatcaaagcctttttcttcgctgttaccgccncttttgtagggcacacccaaaagccccatggcttgcatgaccagttctgaggctttgccgccaaaggcgttgcgcgcagactgcaagggcccgccnaactgattgctaatttgctgcgtgagttgatcggtcatttgggtgaccaatcctcgctccttgatcaggcggtcaaggtcgtcctcaacgggaaccgccaaggccgccgttgtcagaaataccagtccacatagaatcaagcgcatagctgatcagtttaatgccatcttcaatgggttgacaccccccaatttgggttggg

SEQ ID NO: 662 - DNA, 4000 bp, Escherichia coli
  misc_feature (81)..(81): n is a, c, g, or t
  misc_feature (354)..(354): n is a, c, g, or t
  misc_feature (611)..(611): n is a, c, g, or t
  misc_feature (680)..(680): n is a, c, g, or t
  misc_feature (713)..(713): n is a, c, g, or t
  misc_feature (745)..(745): n is a, c, g, or t
  misc_feature (806)..(806): n is a, c, g, or t
  misc_feature (937)..(938): n is a, c, g, or t
  misc_feature (971)..(971): n is a, c, g, or t
  misc_feature (1121)..(1121): n is a, c, g, or t
  misc_feature (1227)..(1227): n is a, c, g, or t
  misc_feature (1247)..(1247): n is a, c, g, or t
  misc_feature (1267)..(1268): n is a, c, g, or t
  misc_feature (1306)..(1306): n is a, c, g, or t
  misc_feature (1736)..(1736): n is a, c, g, or t
  misc_feature (1783)..(1783): n is a, c, g, or t
  misc_feature (1804)..(1804): n is a, c, g, or t
  misc_feature (1858)..(1858): n is a, c, g, or t
  misc_feature (1928)..(1928): n is a, c, g, or t
  misc_feature (1957)..(1957): n is a, c, g, or t
  misc_feature (2077)..(2077): n is a, c, g, or t
  misc_feature (2240)..(2240): n is a, c, g, or t
  misc_feature (2242)..(2242): n is a, c, g, or t
  misc_feature (2320)..(2320): n is a, c, g, or t
  misc_feature (2438)..(2438): n is a, c, g, or t
  misc_feature (2635)..(2635): n is a, c, g, or t
  misc_feature (2680)..(2680): n is a, c, g, or t
  misc_feature (2682)..(2682): n is a, c, g, or t
  misc_feature (2692)..(2692): n is a, c, g, or t
  misc_feature (2707)..(2707): n is a, c, g, or t
  misc_feature (2733)..(2733): n is a, c, g, or t
  misc_feature (2830)..(2830): n is a, c, g, or t
  misc_feature (3000)..(3000): n is a, c, g, or t
  misc_feature (3080)..(3080): n is a, c, g, or t
  misc_feature (3233)..(3233): n is a, c, g, or t
  misc_feature (3245)..(3245): n is a, c, g, or t
  misc_feature (3248)..(3248): n is a, c, g, or t
  misc_feature (3269)..(3269): n is a, c, g, or t
  misc_feature (3287)..(3287): n is a, c, g, or t
  misc_feature (3290)..(3290): n is a, c, g, or t
  misc_feature (3317)..(3317): n is a, c, g, or t
  misc_feature (3570)..(3570): n is a, c, g, or t
  misc_feature (3602)..(3602): n is a, c, g, or t
  misc_feature (3668)..(3668): n is a, c, g, or t
  misc_feature (3695)..(3695): n is a, c, g, or t
  misc_feature (3815)..(3815): n is a, c, g, or t
  misc_feature (3890)..(3890): n is a, c, g, or t
  misc_feature (3905)..(3905): n is a, c, g, or t
  misc_feature (3917)..(3917): n is a, c, g, or t
  misc_feature (3942)..(3946): n is a, c, g, or t
  misc_feature (3951)..(3951): n is a, c, g, or t
  misc_feature (3954)..(3954): n is a, c, g, or t
  misc_feature (3957)..(3965): n is a, c, g, or t
  misc_feature (3967)..(3967): n is a, c, g, or t
  misc_feature (3969)..(3973): n is a, c, g, or t
  misc_feature (3977)..(3979): n is a, c, g, or t
  misc_feature (3981)..(3981): n is a, c, g, or t
  misc_feature (3983)..(3983): n is a, c, g, or t
  misc_feature (3985)..(3988): n is a, c, g, or t
  misc_feature (3990)..(3993): n is a, c, g, or t
  misc_feature (3995)..(3996): n is a, c, g, or t
  misc_feature (3998)..(3998): n is a, c, g, or t
gtaaactcttcatcctcatggagcgtacccttcgggaagcgaaggtcgtgtagtatgtccttatgaaagaggagcgtacanaccgagccgtgtatgttgttgtgtgtcatatactccgttccactaaccggaccctgtgcgtcagcgagcggtttgaccgtcgtcttatccgtagactcaaacagaaccatgtcggcctcttggtatctaatgatgtcaaggcactgctcgtaggtgcttgtcagcaacatatcgtcgccatcaacgaactgaacaaagctgccttcagccaaggccaatcccgtgtttcgggcctgtcctaatccttggttaggctgtctgacgtagatgatntcggccgatagggccagtaactcattgataggcgaatagtcggcaccgtcatccacgacgataatctggcgttcggtctcattgagactcaatgccaaaatactgttgacacagtctcttagtatatcaatagactcgctatagtaagtgacaatgaagcttactaatggcttatcttccttattttgtgaataaactggttgagttgacataagcgttttaatcctattaggtggagaataaagagtttcaaggtncctttgtagggtaggacgggtaggaggggagcggcctgtgtggtctcatagacatccatctgaatgttnaccaacgcctcgtaataggcaggagtcagttcnccccatagatgaaggtgcttgagatgcgcatngaggaggtcggtcagttcctttcccccagcctttgcggtgatgcctctgtcgttctgacantaatagtacaggcccacggaggttgttgccactacctttgcccgttggagaaggtaaggataagtatagacatcttcgaacaccttgcccacagggaagcgtatctcagaaaagagatcacgtcggaaaannttattacaagcgtaggtgtggaggtgaccaccncgtagccaatagtcgcgaacagagtcgactgtcgtatcatcgaaggtcagcaagcgttctttcgacgcacatccatagtgcagcaaggcaggatattcaaggatgtcgtagtcggggtgagcagctaacacagccaacaaggccgtatangtaccctcggcaacgaagtcatcagagtcgacaaaggtaagatagtcgcctgttgccacgtctatccctgcgtttctcgcagccgaaagacccctatttgtctggnagataagcctacagttcgcnctgtcggccgtcatctcctnngcaatctgccgtgaagcatccgtcgaaccatcatcaangagcaccacctccatcctgttgtctatctgagccaacacactcctcaagcagcgacgaagcgtgtcttcaacgttatagataggtatgataatagatagactcatgtgataatagtttgatgcaaaaataataaaaaactttgaaatgcgttagttattatgatgaaaaaagcctctaatactgacagctacctacatatcttaaagtacatcagcctctttggtggtgtacaggtgctgaatgtgctgattggtatcgtccgtaacaagtgcgttgcaatgttacttggaccgcagggagtcggtcttatctctctctttaactcgtcaacaagactcataggcgacgctacgaacttcggtatccctatgagtgctgtgcgcaatctggctgaggattacgacaagggagacgaggagaagctgacgnccgacatcgctgtcgtgcgctcatggagcttgctgacggccttgttnggtctttttatctgcattgcnctcagtccgctgctaagccgttacaccttctcatgggacggccacacgcttcanttcgtactgctctcgccttgtgttgcactgacagcattggcgggaggcgaactggccatccttaaaggcntccgaaagttgggtgctttagcggctatntcggtctataacgtcctcgcagccttggttctgaccgtcccactctactatcttttcggcgacacagccattgtcccttcgttggtgttgatggccttggtgcaactactcctaaccatngtcgtgtcctatcggctctatcctccacacgtctccttgcgtaagtcgctattagacaagggttggggcatgatacgtctgggcacagctttcgtcctcgcaggcatcttaggctctggagccgagctgatcatacgtagttatctgaacaatgtagccgacntntcgaccgttggcttctataatgcagggttcatgatgacgatggtttatgctggtatggtgttctcagcgatggagacngactactttcctcggctctctggtgtgaatagcttacggttcactttcaaccagatcgtcaaccgtcagatagaagtgacgctcttgctcatctcgcctctactgtcttttttcctcntgttcttgccccagttgattctcttcctttattctgataagttcctcccagccctcggcatggcacaggtgttggtcttggcgatgtatgtaagggccattcgcctacccgtagaatatatccctttggccaagggcgactcccgttcttatctaatcttagagggtctgtatgacatcctacttgtttctctcgtnctactcggcttctggaagggacaactcttcggtgctggattaggngnagcagcggcnggagtgctcaatctnggctgtgtctacggctatgcctacgnacgttacgactatcgactgtcgtcttctgtggtggtctatacgctcattcagatgactatcggcctcctcgtcttcttttgtgtacgttctgaacangacagcctacgctggggagcagccctaacgttgtgcctcatcagtacgatagtctcccttcgtgtgttgagatcgaagtcgggactgtggaacgccatgattaataaggtgaaaaataagtttactcgccatgccaaagattagtattctcgttgccgtttataactcgnctgcctacttgccgcaatgccttgactccctcttagggcagactttgcacgacatagaggtgctttgtgtcgacgatgcntcaaccgataactcccttgccatcctacgacaatatgccgagagagacactcgtgtgaaggtgtttgccctcgatgagaaccatgggatagcctttgcccgcaacgtggcactgtcgaatgcttcgggcgagtttatctgctttgtggatagngacgactggttnggncccaatgcacttgaggctgtntgcaagaccttcaccgangangttgatagcgtactctttcaggttgtnctccactatgctgatgggagcgagaaaacctatcccatgccccctttcgaggccctgtcgggtgagagagcatttgtcgatagcctcacatggaagatacatggagtctatgccatcagggcagctatccaccatgcctacccttacgacgatgccctacggacgtatagtgacgagaacataacacgtattcattatctaaaatcccgtaaggtagcggtctgcgagggtgtttactactatcggcagcacncttcttctaccacacacagggtcagtgtgcgncgtttcgactatctcttagccaacgagcgtatgcgttgtcagctcgtcgccatgggtacctccgangccaacctccgttgttatgagacgatnagatggcagaatttagtggggttatacctcttctattatcttcatcggcatgagctctcgtccaccgaccgccaagaagccttgtcaatcatgcgccacgtctggcaaaccatccatctncagcaggtgagtccgtccctccgccgcaagttcggctatatccccttccgtccttcatggctcctcttccgtttncaagaagagctctanttcaccctccgngcgcttgttgggaggaataaggagnnnnngtgangtnccnnnnnnnnncncnnnnntctnnnancngnnnncnnnntnncnct

SEQ ID NO: 663 - DNA, 4000 bp, Escherichia coli
  misc_feature (1988)..(1988): n is a, c, g, or t
  misc_feature (2939)..(2940): n is a, c, g, or t
  misc_feature (2942)..(2942): n is a, c, g, or t
  misc_feature (2948)..(2949): n is a, c, g, or t
  misc_feature (2951)..(2951): n is a, c, g, or t
  misc_feature (2954)..(2954): n is a, c, g, or t
  misc_feature (3577)..(4000): n is a, c, g, or t
cgccgccaggagccgcgttgtattttgttagttctttataaccaccagcagcaccaagtgcgtctgtgtcatttgttagaccaaggttcatagccacaccagcccaaccaccgatgcctgataggacaccaacgtgttgtttacctttgtgtgagtatgtgaatgcattaccaatcacacctgaaccaacttggaatttccaaagttctttaccgcttttcgcgtcaagagctttgaaccaacgatctaaagtaccgtagaaaactaagtctgaagcagtagttaaagcaccaccccaagcagagaatttctctttgttgtaccatacttttttgttagtcattgggtcataagcagcaaaaccgcccattacgccgtcaggaccagcaaacatagtaagtgtcgcaccaacccaaggctgacctgcaacatacttagactcaactggttcgtatgtcatacatacgtggttaagtggtgagtatattaagccagttttaggtgagtatgcagcaggctgttggtctttagtaccaagagcagctggacatgtacctttagtgttgtaatcttggtgtgttgaatgtgcagcttctttttgtggcacaccagatttaagatcaataccagttgaccagttaacgaatggatgcactttttcagctgaaactaaagtaccgttactagctacccaagtgtatgcaaatccgtttctgtcatggtgccatgcataagtttttccacctttatcaaataggataacttcgttaataccgtcataatcccattcgtcatgtggagtcatttgcatgccccaacgtgccatacctgtatctaggtcacgagcaaaaactgtcatagaccatttgttgtcacctggacgtacgtctgggttccaaacagatgggttacctgtaccgtagtacactaggtttgtttttgcatcatatggccaccagccccatacagagccaccaccatgttgccaaccatctttaactgcttgtggttttaaccaagttttaagacctaggtctgccacaggagcttgtagttgatcgttaggaattcttttgaaagaaccaccttcaacgttaccaccgtttacatcttcgtaaactgatagagctgaatataatgggttttctttgttgaagtccgcaccgataagtacttctgaatcaggtccagtagacatagctttccatgctagtgaaccgtcttcgatgttgtatgctgcaataaagcaacgaacaccaaattcagcaccagaacaaccagtcaatactttatctttgatcacgtgaggagcgttagtattagtagcgccaactttaggatctgtgtttaaagtagaccaaactttagcacctgtttttgcgtttagagcaactaggttaccatcgttttgttgtaggaagattttaccgttaccgaaaccaagaccacggttaacgttatcgcaacatagaactgcttgaacgctaggatcttgtttagggaagtaagaccatacaactttttggttgttgtttaagtctaaagcatatacgttatttggaaatgctgtatgtacatatagcatgttaccaataactagaggagaaccttcatgaccacggtttacaccagtagaaagtgtccaagctgctttaaggttttttacattacctttgttgatttgtgtcagctttgagtaagcctggttgtcatgttgaccacgaggatgagcccagttagctgagtttttcatagctttttcttggtcagcagcagctgaagcaacaataggcatagccattgcagcagcagttacaaagccaagagctaatttgattttatttaatttcattataaatctccatagttttaactaagggtttaaaaaagaagcaagtacctcccctaccttatctcgtagcttaaaaaactctttaataaaataagaaatttacctacttttagtactgatatttctagtacttggnaatgattttatacccctaaatttctatttgcaacaattttgttacaatttctttacatttattgatttattttacttatcaaaaaacaccccatttcaaccctaaaagtttgttaaactaaagcgatatttacaatacaacaaagatgtagataaaatcttaaaaaaaccttaacttaaattctaaatttcagaaagttgaatcgaaattatgtccaatacaaataatagagagctttatccagaaatccatccatataaagaatcatttattacaggagacgatacacacgagatttttttagaagagtcaggaaatcctgatggacagcctgtcctttttttacatgggggcccaggtggtggcactggtgctaagcaaaggagattttttgatccaagctattaccgaatcattttatttgatcaaagaggttgcggcaaaagcaaaccccttggtgagacagaaaaaaatacaacggataatctggtaaatgatattgagctaataagaaaagagttgaatatcaaggcctggattctttttggaggctcatggggaagcacactcgcattagcatattcaataaaatatcctgaattggttcagggattaatattaaggggtgttttcttaagtagaaaacatgagctagattggttcttaaaagatgttgatatatttttccctgaacttcaccataatcttttaaagcatattccaaatacgagtaagaagaatttattagaaaaatattctgagttagttttttcaaacgataaagattgcgcatacaaggcagcaatctcttggaatcaatttgagggaagtattttaaaattattaccccctgccataagttcagaaactactgagatagataatgaatttgaacttgctcgcgcaaaagtccagctccattatataaataataattgttttgtggacggnnangatatnntnganaaatcaaaaatacttaaggataagcccatcaccataattcaagggcgctatgacatggtatgtcctccaaagacagcttatgagctccatcaagcaatccctaagagtaaacttattatcattccagatgcgggacattctgcttcagaagcagggacattaagttcactcttagatgcaactgacgaatttaaaacaatcgtctcttaattacttctctaactctaggatttttatataactgatgcttcaaaaaattttaaatttattaagggataaaagaggagcaaaatattttacgtttaaagaggtgcttgatggctgtatcaggcacaactttatcgcactaaatgcttcaattgctttttttactttgtttgcaatggtgcccttaatcctactcattttttttatattgactcagtggcttgctaattcagattttgcgttatctcaacttgagattgtgacctcaagacttctccctcaaattagtgaccaactactctccgaggttatcgatatctcaacaaaacaactatcttggggtttaatcttattcggcattcttttttttgcaacgactccgctaactcaagcccttcggttgagcatcatacagnnnnnnnnnnnnnnnnnnnnnnnnnnnnnnnnnnnnnnnnnnnnnnnnnnnnnnnnnnnnnnnnnnnnnnnnnnnnnnnnnnnnnnnnnnnnnnnnnnnnnnnnnnnnnnnnnnnnnnnnnnnnnnnnnnnnnnnnnnnnnnnnnnnnnnnnnnnnnnnnnnnnnnnnnnnnnnnnnnnnnnnnnnnnnnnnnnnnnnnnnnnnnnnnnnnnnnnnnnnnnnnnnnnnnnnnnnnnnnnnnnnnnnnnnnnnnnnnnnnnnnnnnnnnnnnnnnnnnnnnnnnnnnnnnnnnnnnnnnnnnnnnnnnnnnnnnnnnnnnnnnnnnnnnnnnnnnnnnnnnnnnnnnnnnnnnnnnnnnnnnnnnnnnnnnnnnnnnnnnnnnnnnnnnnnnnnnnnnnnnnnnnnnnnnnnnnnnnnnnnnnnn

SEQ ID NO: 664 - DNA, 4000 bp, Escherichia coli
  misc_feature (2)..(2): n is a, c, g, or t
  misc_feature (4)..(8): n is a, c, g, or t
  misc_feature (11)..(12): n is a, c, g, or t
  misc_feature (15)..(15): n is a, c, g, or t
  misc_feature (17)..(18): n is a, c, g, or t
  misc_feature (20)..(20): n is a, c, g, or t
  misc_feature (23)..(23): n is a, c, g, or t
  misc_feature (27)..(29): n is a, c, g, or t
  misc_feature (32)..(34): n is a, c, g, or t
  misc_feature (36)..(40): n is a, c, g, or t
  misc_feature (44)..(48): n is a, c, g, or t
  misc_feature (50)..(51): n is a, c, g, or t
  misc_feature (53)..(62): n is a, c, g, or t
  misc_feature (65)..(76): n is a, c, g, or t
  misc_feature (78)..(78): n is a, c, g, or t
  misc_feature (80)..(85): n is a, c, g, or t
  misc_feature (87)..(87): n is a, c, g, or t
  misc_feature (89)..(93): n is a, c, g, or t
  misc_feature (98)..(99): n is a, c, g, or t
  misc_feature (101)..(101): n is a, c, g, or t
  misc_feature (103)..(106): n is a, c, g, or t
  misc_feature (108)..(109): n is a, c, g, or t
  misc_feature (111)..(114): n is a, c, g, or t
  misc_feature (116)..(129): n is a, c, g, or t
  misc_feature (132)..(140): n is a, c, g, or t
  misc_feature (142)..(145): n is a, c, g, or t
  misc_feature (147)..(147): n is a, c, g, or t
  misc_feature (149)..(149): n is a, c, g, or t
  misc_feature (151)..(158): n is a, c, g, or t
  misc_feature (161)..(161): n is a, c, g, or t
  misc_feature (163)..(165): n is a, c, g, or t
  misc_feature (167)..(168): n is a, c, g, or t
  misc_feature (170)..(176): n is a, c, g, or t
  misc_feature (179)..(181): n is a, c, g, or t
  misc_feature (183)..(184): n is a, c, g, or t
  misc_feature (186)..(186): n is a, c, g, or t
  misc_feature (188)..(197): n is a, c, g, or t
  misc_feature (199)..(199): n is a, c, g, or t
  misc_feature (201)..(203): n is a, c, g, or t
  misc_feature (207)..(208): n is a, c, g, or t
  misc_feature (210)..(222): n is a, c, g, or t
  misc_feature (224)..(227): n is a, c, g, or t
  misc_feature (229)..(231): n is a, c, g, or t
  misc_feature (233)..(233): n is a, c, g, or t
  misc_feature (235)..(237): n is a, c, g, or t
  misc_feature (239)..(239): n is a, c, g, or t
  misc_feature (241)..(241): n is a, c, g, or t
  misc_feature (243)..(243): n is a, c, g, or t
  misc_feature (245)..(256): n is a, c, g, or t
  misc_feature (258)..(260): n is a, c, g, or t
  misc_feature (262)..(263): n is a, c, g, or t
  misc_feature (265)..(274): n is a, c, g, or t
  misc_feature (276)..(277): n is a, c, g, or t
  misc_feature (279)..(284): n is a, c, g, or t
  misc_feature (286)..(300): n is a, c, g, or t
  misc_feature (302)..(302): n is a, c, g, or t
  misc_feature (306)..(309): n is a, c, g, or t
  misc_feature (311)..(317): n is a, c, g, or t
  misc_feature (319)..(326): n is a, c, g, or t
  misc_feature (328)..(328): n is a, c, g, or t
  misc_feature (330)..(332): n is a, c, g, or t
  misc_feature (334)..(334): n is a, c, g, or t
  misc_feature (336)..(339): n is a, c, g, or t
  misc_feature (342)..(342): n is a, c, g, or t
  misc_feature (344)..(344): n is a, c, g, or t
  misc_feature (346)..(348): n is a, c, g, or t
  misc_feature (350)..(350): n is a, c, g, or t
  misc_feature (353)..(356): n is a, c, g, or t
  misc_feature (358)..(358): n is a, c, g, or t
  misc_feature (361)..(364): n is a, c, g, or t
  misc_feature (366)..(366): n is a, c, g, or t
  misc_feature (368)..(368): n is a, c, g, or t
  misc_feature (370)..(370): n is a, c, g, or t
  misc_feature (373)..(375): n is a, c, g, or t
  misc_feature (377)..(377): n is a, c, g, or t
  misc_feature (381)..(385): n is a, c, g, or t
  misc_feature (387)..(390): n is a, c, g, or t
  misc_feature (392)..(395): n is a, c, g, or t
  misc_feature (398)..(402): n is a, c, g, or t
  misc_feature (404)..(404): n is a, c, g, or t
  misc_feature (406)..(413): n is a, c, g, or t
  misc_feature (418)..(420): n is a, c, g, or t
  misc_feature (422)..(426): n is a, c, g, or t
  misc_feature (428)..(430): n is a, c, g, or t
  misc_feature (432)..(432): n is a, c, g, or t
  misc_feature (434)..(436): n is a, c, g, or t
  misc_feature (438)..(443): n is a, c, g, or t
  misc_feature (445)..(445): n is a, c, g, or t
  misc_feature (447)..(462): n is a, c, g, or t
  misc_feature (464)..(474): n is a, c, g, or t
  misc_feature (476)..(480): n is a, c, g, or t
  misc_feature (482)..(485): n is a, c, g, or t
  misc_feature (487)..(490): n is a, c, g, or t
  misc_feature (492)..(496): n is a, c, g, or t
  misc_feature (498)..(498): n is a, c, g, or t
  misc_feature (505)..(506): n is a, c, g, or t
  misc_feature (508)..(508): n is a, c, g, or t
  misc_feature (512)..(514): n is a, c, g, or t
  misc_feature (516)..(517): n is a, c, g, or t
  misc_feature (521)..(521): n is a, c, g, or t
  misc_feature (523)..(527): n is a, c, g, or t
  misc_feature (531)..(531): n is a, c, g, or t
  misc_feature (536)..(537): n is a, c, g, or t
  misc_feature (540)..(540): n is a, c, g, or t
  misc_feature (542)..(542): n is a, c, g, or t
  misc_feature (544)..(544): n is a, c, g, or t
  misc_feature (547)..(550): n is a, c, g, or t
  misc_feature (552)..(552): n is a, c, g, or t
  misc_feature (554)..(555): n is a, c, g, or t
  misc_feature (557)..(558): n is a, c, g, or t
  misc_feature (726)..(726): n is a, c, g, or t
  misc_feature (747)..(747): n is a, c, g, or t
  misc_feature (750)..(750): n is a, c, g, or t
  misc_feature (758)..(759): n is a, c, g, or t
  misc_feature (882)..(882): n is a, c, g, or t
  misc_feature (915)..(915): n is a, c, g, or t
  misc_feature (1053)..(1053): n is a, c, g, or t
  misc_feature (1074)..(1074): n is a, c, g, or t
  misc_feature (1132)..(1132): n is a, c, g, or t
  misc_feature (1140)..(1140): n is a, c, g, or t
  misc_feature (1176)..(1176): n is a, c, g, or t
  misc_feature (1476)..(1476): n is a, c, g, or t
  misc_feature (1491)..(1491): n is a, c, g, or t
  misc_feature (1617)..(1617): n is a, c, g, or t
  misc_feature (1698)..(1698): n is a, c, g, or t
  misc_feature (1991)..(1991): n is a, c, g, or t
  misc_feature (2056)..(2056): n is a, c, g, or t
  misc_feature (2932)..(2932): n is a, c, g, or t
  misc_feature (2941)..(2941): n is a, c, g, or t
  misc_feature (2965)..(2965): n is a, c, g, or t
  misc_feature (2970)..(2970): n is a, c, g, or t
  misc_feature (2973)..(2974): n is a, c, g, or t
  misc_feature (2981)..(2981): n is a, c, g, or t
  misc_feature (2983)..(2984): n is a, c, g, or t
  misc_feature (2986)..(2988): n is a, c, g, or t
  misc_feature (2991)..(2991): n is a, c, g, or t
  misc_feature (2996)..(2996): n is a, c, g, or t
  misc_feature (3003)..(3003): n is a, c, g, or t
  misc_feature (3006)..(3008): n is a, c, g, or t
  misc_feature (3010)..(3011): n is a, c, g, or t
  misc_feature (3013)..(3014): n is a, c, g, or t
  misc_feature (3016)..(3017): n is a, c, g, or t
  misc_feature (3019)..(3019): n is a, c, g, or t
  misc_feature (3021)..(3022): n is a, c, g, or t
  misc_feature (3024)..(3024): n is a, c, g, or t
  misc_feature (3027)..(3027): n is a, c, g, or t
  misc_feature (3031)..(3031): n is a, c, g, or t
  misc_feature (3035)..(3035): n is a, c, g, or t
  misc_feature (3039)..(3039): n is a, c, g, or t
  misc_feature (3042)..(3042): n is a, c, g, or t
  misc_feature (3044)..(3045): n is a, c, g, or t
  misc_feature (3048)..(3048): n is a, c, g, or t
  misc_feature (3050)..(3050): n is a, c, g, or t
  misc_feature (3052)..(3052): n is a, c, g, or t
  misc_feature (3061)..(3061): n is a, c, g, or t
  misc_feature (3065)..(3065): n is a, c, g, or t
  misc_feature (3067)..(3067): n is a, c, g, or t
  misc_feature (3070)..(3070): n is a, c, g, or t
  misc_feature (3072)..(3073): n is a, c, g, or t
  misc_feature (3076)..(3076): n is a, c, g, or t
  misc_feature (3078)..(3078): n is a, c, g, or t
  misc_feature (3081)..(3081): n is a, c, g, or t
  misc_feature (3087)..(3087): n is a, c, g, or t
  misc_feature (3089)..(3091): n is a, c, g, or t
  misc_feature (3093)..(3093): n is a, c, g, or t
  misc_feature (3096)..(3096): n is a, c, g, or t
  misc_feature (3108)..(3110): n is a, c, g, or t
  misc_feature (3112)..(3113): n is a, c, g, or t
  misc_feature (3115)..(3115): n is a, c, g, or t
  misc_feature (3117)..(3119): n is a, c, g, or t
  misc_feature (3123)..(3123): n is a, c, g, or t
  misc_feature (3125)..(3127): n is a, c, g, or t
  misc_feature (3131)..(3131): n is a, c, g, or t
  misc_feature (3134)..(3135): n is a, c, g, or t
  misc_feature (3141)..(3141): n is a, c, g, or t
  misc_feature (3145)..(3145): n is a, c, g, or t
  misc_feature (3147)..(3151): n is a, c, g, or t
  misc_feature (3153)..(3154): n is a, c, g, or t
  misc_feature (3156)..(3160): n is a, c, g, or t
  misc_feature (3162)..(3162): n is a, c, g, or t
  misc_feature (3165)..(3165): n is a, c, g, or t
  misc_feature (3168)..(3168): n is a, c, g, or t
  misc_feature (3171)..(3171): n is a, c, g, or t
  misc_feature (3174)..(3174): n is a, c, g, or t
  misc_feature (3181)..(3181): n is a, c, g, or t
  misc_feature (3185)..(3188): n is a, c, g, or t
  misc_feature (3190)..(3190): n is a, c, g, or t
  misc_feature (3193)..(3193): n is a, c, g, or t
  misc_feature (3195)..(3195): n is a, c, g, or t
  misc_feature (3198)..(3198): n is a, c, g, or t
  misc_feature (3200)..(3200): n is a, c, g, or t
  misc_feature (3203)..(3204): n is a, c, g, or t
  misc_feature (3210)..(3210): n is a, c, g, or t
  misc_feature (3217)..(3217): n is a, c, g, or t
  misc_feature (3220)..(3220): n is a, c, g, or t
  misc_feature (3222)..(3222): n is a, c, g, or t
  misc_feature (3224)..(3225): n is a, c, g, or t
  misc_feature (3227)..(3227): n is a, c, g, or t
  misc_feature (3229)..(3229): n is a, c, g, or t
  misc_feature (3232)..(3233): n is a, c, g, or t
  misc_feature (3237)..(3237): n is a, c, g, or t
  misc_feature (3240)..(3240): n is a, c, g, or t
  misc_feature (3246)..(3246): n is a, c, g, or t
  misc_feature (3249)..(3249): n is a, c, g, or t
  misc_feature (3260)..(3260): n is a, c, g, or t
  misc_feature (3262)..(3263): n is a, c, g, or t
  misc_feature (3267)..(3267): n is a, c, g, or t
  misc_feature (3270)..(3270): n is a, c, g, or t
  misc_feature (3273)..(3273): n is a, c, g, or t
  misc_feature (3276)..(3276): n is a, c, g, or t
  misc_feature (3282)..(3282): n is a, c, g, or t
  misc_feature (3294)..(3295): n is a, c, g, or t
  misc_feature (3297)..(3297): n is a, c, g, or t
  misc_feature (3299)..(3300): n is a, c, g, or t
  misc_feature (3309)..(3313): n is a, c, g, or t
  misc_feature (3315)..(3315): n is a, c, g, or t
  misc_feature (3318)..(3319): n is a, c, g, or t
  misc_feature (3321)..(3324): n is a, c, g, or t
  misc_feature (3326)..(3326): n is a, c, g, or t
  misc_feature (3335)..(3336): n is a, c, g, or t
  misc_feature (3338)..(3340): n is a, c, g, or t
  misc_feature (3342)..(3342): n is a, c, g, or t
  misc_feature (3348)..(3348): n is a, c, g, or t
  misc_feature (3351)..(3359): n is a, c, g, or t
  misc_feature (3361)..(3362): n is a, c, g, or t
  misc_feature (3364)..(3366): n is a, c, g, or t
  misc_feature (3370)..(3370): n is a, c, g, or t
  misc_feature (3373)..(3374): n is a, c, g, or t
  misc_feature (3376)..(3377): n is a, c, g, or t
  misc_feature (3379)..(3381): n is a, c, g, or t
  misc_feature (3383)..(3383): n is a, c, g, or t
  misc_feature (3390)..(3390): n is a, c, g, or t
  misc_feature (3394)..(3395): n is a, c, g, or t
  misc_feature (3397)..(3397): n is a, c, g, or t
  misc_feature (3399)..(3400): n is a, c, g, or t
  misc_feature (3413)..(3413): n is a, c, g, or t
  misc_feature (3415)..(3416): n is a, c, g, or t
  misc_feature (3421)..(3421): n is a, c, g, or t
  misc_feature (3424)..(3426): n is a, c, g, or t
  misc_feature (3428)..(3428): n is a, c, g, or t
  misc_feature (3431)..(3434): n is a, c, g, or t
  misc_feature (3436)..(3436): n is a, c, g, or t
  misc_feature (3443)..(3443): n is a, c, g, or t
  misc_feature (3446)..(3446): n is a, c, g, or t
  misc_feature (3450)..(3451): n is a, c, g, or t
  misc_feature (3454)..(3454): n is a, c, g, or t
  misc_feature (3456)..(3457): n is a, c, g, or t
  misc_feature (3462)..(3462): n is a, c, g, or t
  misc_feature (3473)..(3473): n is a, c, g, or t
  misc_feature (3476)..(3476): n is a, c, g, or t
  misc_feature (3478)..(3479): n is a, c, g, or t
  misc_feature (3481)..(3482): n is a, c, g, or t
  misc_feature (3484)..(3485): n is a, c, g, or t
  misc_feature (3487)..(3488): n is a, c, g, or t
  misc_feature (3494)..(3494): n is a, c, g, or t
  misc_feature (3496)..(3497): n is a, c, g, or t
  misc_feature (3499)..(3499): n is a, c, g, or t
  misc_feature (3501)..(3502): n is a, c, g, or t
  misc_feature (3504)..(3511): n is a, c, g, or t
  misc_feature (3513)..(3513): n is a, c, g, or t
  misc_feature (3516)..(3516): n is a, c, g, or t
  misc_feature (3525)..(3527): n is a, c, g, or t
  misc_feature (3530)..(3530): n is a, c, g, or t
  misc_feature (3533)..(3533): n is a, c, g, or t
  misc_feature (3536)..(3537): n is a, c, g, or t
  misc_feature (3539)..(3540): n is a, c, g, or t
  misc_feature (3542)..(3543): n is a, c, g, or t
  misc_feature (3547)..(3548): n is a, c, g, or t
  misc_feature (3550)..(3551): n is a, c, g, or t
  misc_feature (3553)..(3554): n is a, c, g, or t
  misc_feature (3556)..(3557): n is a, c, g, or t
  misc_feature (3559)..(3560): n is a, c, g, or t
  misc_feature (3569)..(3569): n is a, c, g, or t
  misc_feature (3572)..(3572): n is a, c, g, or t
  misc_feature (3576)..(3577): n is a, c, g, or t
  misc_feature (3581)..(3581): n is a, c, g, or t
  misc_feature (3585)..(3585): n is a, c, g, or t
  misc_feature (3588)..(3588): n is a, c, g, or t
  misc_feature (3591)..(3591): n is a, c, g, or t
  misc_feature (3593)..(3593): n is a, c, g, or t
  misc_feature (3598)..(3602): n is a, c, g, or t
  misc_feature (3604)..(3604): n is a, c, g, or t
  misc_feature (3607)..(3607): n is a, c, g, or t
  misc_feature (3609)..(3609): n is a, c, g, or t
  misc_feature (3616)..(3617): n is a, c, g, or t
  misc_feature (3619)..(3619): n is a, c, g, or t
  misc_feature (3623)..(3636): n is a, c, g, or t
  misc_feature (3638)..(3638): n is a, c, g, or t
  misc_feature (3641)..(3641): n is a, c, g, or t
  misc_feature (3643)..(3643): n is a, c, g, or t
  misc_feature (3649)..(3649): n is a, c, g, or t
  misc_feature (3653)..(3653): n is a, c, g, or t
  misc_feature (3658)..(3658): n is a, c, g, or t
  misc_feature (3672)..(3672): n is a, c, g, or t
  misc_feature (3675)..(3676): n is a, c, g, or t
  misc_feature (3678)..(3678): n is a, c, g, or t
  misc_feature (3680)..(3681): n is a, c, g, or t
  misc_feature (3686)..(3691): n is a, c, g, or t
  misc_feature (3693)..(3697): n is a, c, g, or t
  misc_feature (3699)..(3700): n is a, c, g, or t
  misc_feature (3702)..(3703): n is a, c, g, or t
  misc_feature (3705)..(3707): n is a, c, g, or t
  misc_feature (3709)..(3710): n is a, c, g, or t
  misc_feature (3712)..(3712): n is a, c, g, or t
  misc_feature (3715)..(3715): n is a, c, g, or t
  misc_feature (3720)..(3720): n is a, c, g, or t
  misc_feature (3722)..(3722): n is a, c, g, or t
  misc_feature (3729)..(3729): n is a, c, g, or t
  misc_feature (3732)..(3732): n is a, c, g, or t
  misc_feature (3734)..(3734): n is a, c, g, or t
  misc_feature (3743)..(3743): n is a, c, g, or t
  misc_feature (3746)..(3752): n is a, c, g, or t
  misc_feature (3754)..(3757): n is a, c, g, or t
  misc_feature (3762)..(3765): n is a, c, g, or t
  misc_feature (3768)..(3768): n is a, c, g, or t
  misc_feature (3770)..(3772): n is a, c, g, or t
  misc_feature (3774)..(3774): n is a, c, g, or t
  misc_feature (3781)..(3782): n is a, c, g, or t
  misc_feature (3784)..(3784): n is a, c, g, or t
  misc_feature (3787)..(3787): n is a, c, g, or t
  misc_feature (3789)..(3792): n is a, c, g, or t
  misc_feature (3795)..(3795): n is a, c, g, or t
  misc_feature (3798)..(3798): n is a, c, g, or t
  misc_feature (3801)..(3801): n is a, c, g, or t
  misc_feature (3804)..(3804): n is a, c, g, or t
  misc_feature (3807)..(3807): n is a, c, g, or t
  misc_feature (3810)..(3812): n is a, c, g, or t
  misc_feature (3814)..(3815): n is a, c, g, or t
  misc_feature (3817)..(3817): n is a, c, g, or t
  misc_feature (3832)..(3832): n is a, c, g, or t
  misc_feature (3835)..(3835): n is a, c, g, or t
  misc_feature (3837)..(3838): n is a, c, g, or t
  misc_feature (3840)..(3841): n is a, c, g, or t
  misc_feature (3843)..(3846): n is a, c, g, or t
  misc_feature (3848)..(3849): n is a, c, g, or t
  misc_feature (3851)..(3851): n is a, c, g, or t
  misc_feature (3858)..(3858): n is a, c, g, or t
  misc_feature (3860)..(3861): n is a, c, g, or t
  misc_feature (3865)..(3865): n is a, c, g, or t
  misc_feature (3870)..(3870): n is a, c, g, or t
  misc_feature (3873)..(3874): n is a, c, g, or t
  misc_feature (3876)..(3876): n is a, c, g, or t
  misc_feature (3879)..(3879): n is a, c, g, or t
  misc_feature (3886)..(3887): n is a, c, g, or t
  misc_feature (3894)..(3897): n is a, c, g, or t
  misc_feature (3899)..(3899): n is a, c, g, or t
  misc_feature (3902)..(3906): n is a, c, g, or t
  misc_feature (3909)..(3909): n is a, c, g, or t
  misc_feature (3912)..(3912): n is a, c, g, or t
  misc_feature (3915)..(3916): n is a, c, g, or t
  misc_feature (3918)..(3920): n is a, c, g, or t
  misc_feature (3923)..(3923): n is a, c, g, or t
  misc_feature (3933)..(3934): n is a, c, g, or t
  misc_feature (3938)..(3938): n is a, c, g, or t
  misc_feature (3955)..(3956): n is a, c, g, or t
  misc_feature (3961)..(3964): n is a, c, g, or t
  misc_feature (3966)..(3967): n is a, c, g, or t
  misc_feature (3969)..(3971): n is a, c, g, or t
  misc_feature (3974)..(3975): n is a, c, g, or t
  misc_feature (3978)..(3978): n is a, c, g, or t
  misc_feature (3980)..(3985): n is a, c, g, or t
  misc_feature (3988)..(3989): n is a, c, g, or t
  misc_feature (3993)..(3993): n is a, c, g, or t
  misc_feature (3996)..(3997): n is a, c, g, or t
  misc_feature (4000)..(4000): n is a, c, g, or t
cncnnnnnaannccngnnanggncccnnnttnnntnnnnnaaannnnnannannnnnnnnnnggnnnnnnnnnnnnanannnnnngnannnnnggggnnangnnnnannannnncnnnnnnnnnnnnnnccnnnnnnnnncnnnnanangnnnnnnnnggncnnnanntnnnnnnnccnnnanncntnnnnnnnnnncncnnncccnnannnnnnnnnnnnngnnnncnnntncnnnangnangnnnnnnnnnnnnannnanngnnnnnnnnnncnncnnnnnngnnnnnnnnnnnnnnncncccnnnncnnnnnnncnnnnnnnncncnnncncnnnnccngncnnnanggnnnncnccnnnncnancnccnnnancccnnnnncnnnngnnnnggnnnnngngnnnnnnnnccccnnntnnnnnannnangnnnannnnnncncnnnnnnnnnnnnnnnngnnnnnnnnnnngnnnnngnnnngnnnncnnnnncnccccccnncncccnnncnncaanannnnncccnccccnnctncncncannnngngnngnnggggcgggatcttttgtatccttatatatgctggcgccttagtcgaggagcgaggtgaggtgctctgcgtaagcgtcccagtcggtgatcgtgtggcgtgctaccccactctcgatagcggcgcgagccacagccgtagagacctcgacgatgagacggcggtcgacnggcttcgggatgaagtagtcnggnccgaaggnnaggcccgtcgtcccgtaggcttcattcacatagtcgggcacgggctgcttagccagcgcagcgatagcgcgcgtagcggccagctccatagcgccgttgatagccgtagcgtgcgtgtcgagngccccacggaagatgtaggggaaggccagcacnttgttgatctgattggggtagtcggtgcgccccgtgctcatcagcacctcggggttagcagccttcgcctcctcgtaggagatctcaggcgtggggttagccagcgcgaagataatagggcgtgcagccatcgagcgnaccatctcctgcgagaccatnccgcccttggagagcccgacgagtacgtcagccccgcgcatcgcatcggcgagcgtanggagctcngtgcgtgtggtggcgaactcacgcttcatatcattnaggtcggtgcggtcgaccgtgatgacacccttcgagtcggtcatcacgatgttctcgtgcttggcacccagatcgcagtagagcttagcgcaagcgatggcggcagcaccagcaccgctgacgacgatacgcacgtcttcgatgggcttgccgacgagctccagcgcattcagcaggcctgcacccgagatgatagccgtaccgtgctggtcgtcgtgcatcacggggatagagagctcagccttcagacggcgctcgatctcaaagcactcaggcgccttgatatcctcgaggttgatngcgccgaaggtgggngcgatagccttgaccgcagcgatgaacgcctcgggctcggtggcatcgacctcgatatcgaaggcgtctacacccgaataaatcttgaagagcagcgccttaccctccatgacgggcttgctggcntcggcaccgatattgcccagtccgaggacggcagtcccgttggagatgacgccgacgaggttacccttcgccgtatagcgntaggcagcgctggggtcttcggcgatagccaagcaaggctcagctaccccaggggagtaagccagagagaggtcataggccgagctgtgcggcttggtagggacgatagcgatcttgccggggcgtccctcttcgtggtagcgcagcgcggcttctttcgtaatctcggtgggcatatattcggatggataagaattattagacttgtgaaactacaacaagctaagtgggagaatgttccgcattcattagctcgacaaagatacggatagaaaatcacgcaggctactggngacaagcgacgagagagctgacagtctccccgctactcgccccaggcacttgacacaaggagcangccaaatgcaagaagccctacctgagaggtgatgacctcatcaggtagggcttctgtttatgcgcttaagtagttacgctggagagcgccttactttaccttagcgacgatagccttgaaggcttcgggatggttgacagcgaggtcagcgaggaccttgcggttgatctcgataccctgagcgtggagagcacccatcaggcgagagtaagagagaccctcgagacgagcagcagcgttgatacgctggatccacagagcacggaagttacgcttcttgttcttacgatcgcggaaggcgtaggtcagacccttttcccaagtgttcttggctacggtccagacgttcttgcgagcaccatagtacccacgcgtgagcttaaggatgcgcttgcgcttagcgcgagaagctacatgattgactgatcttggcatgatgtttcttctttgtgattggtagcgatctgcctctctcccgagagagcggagagcagatacttgattggcttacctctctgttactgaaataatcgttgtgctaacttgccgtttagcggaggcggagaagttccttgacttcgcgtacgtctaccttgtccacagtggtgaagtaggtgaggttacgcttctgcttcttcgtcttcttcgtgaggatgtgactcttgaaggcatgtttgcgcttgatcttaccagagccagtgagcgcgaaacgcttcttagcactggagtttgtcttcagcttaggcattttctttcttgtttatataagttatttcattgacccagctccactgacgcagcctatgcgcgaggtgctgggatgggggatacgttgattagtcttcgtcggaggcgtctgcagcctcttccttagcncccttcttnggggcgggggtagcggccttcttnggggngannatgatgntnntnnnctnccctncgagganggnnntnntnncnncncnncngtngtcntcgnggtnatnanngangngnaggaggagnactncnccntnntcntngangaggangnnncnacnacggaagaagannnanncntnnncctncnnncctncgnngaggangccntnnnnntnntnnnnntngangtngtngtngtggtcntcgnnnngnggncngangnggnnctcctngacgacnacntngnngntnttnncctnctnttcctnctncttcttcttangnngganganganctnctggtngtcgacgacgcnncntnntggaggatnnnnntnggnngnnnncnccacgaggnnannntnttggtngtnnnnnnnnngnngnnnttgntgnntnntnnntnctccctnctcnncntnntccccgacgaggngnncttcnttnnngnggnnnncntcgttgntgnggtnntgnannttttntttgttgtctnctncnntnnannanntgttgntnntntnntnnnnnnnngnggnggactactnnnctncgnccnncnngnngttnngnngnngnngnncctcctcgncantttnntcgncaanggnagnanttttnnnnnanccntnatcaccnncncctnnnnnnnnnnnnnntnctncnccttcntggncttcnttttccccgacganaannangnnggggnnnnnntnnnnntnntnntnnngnntnttncggcngntcttctngtngnggtcgtcgnccnnnnnnngnnnntcctnnnngtngnnngnggcggcnncntcntnnnngtngtngtnganctnctnnntnntnggcagcacgacgacntgntnngnngnnnncnngngggggangnncccngcggngtnntngangaggacnncgacgannnncnccnnnnngcnganggnngnnnggnggatcatcanngggnggtgcttcttgttgtcnncaccnnnntnntnnnggnngangnnnnnnggnnggtngtnntcn

SEQ ID NO: 665 - DNA, 4000 bp, Escherichia coli
  misc_feature (437)..(437): n is a, c, g, or t
  misc_feature (707)..(707): n is a, c, g, or t
  misc_feature (1190)..(1190): n is a, c, g, or t
  misc_feature (1215)..(1215): n is a, c, g, or t
  misc_feature (1377)..(1377): n is a, c, g, or t
  misc_feature (1565)..(1565): n is a, c, g, or t
  misc_feature (1987)..(1987): n is a, c, g, or t
  misc_feature (2033)..(2033): n is a, c, g, or t
  misc_feature (2343)..(2343): n is a, c, g, or t
  misc_feature (2411)..(2411): n is a, c, g, or t
  misc_feature (3411)..(3411): n is a, c, g, or t
  misc_feature (3937)..(3937): n is a, c, g, or t
  misc_feature (3958)..(3958): n is a, c, g, or t
atcaaaaccttgatcaaaaccctgccaaccatcaaccgcttacacccctaacgtttttagagcgcgcagcaagtgtatttccagatcaagtagcaattattcatggtgatttacgtcaaaattatttaaatttatatacccgttctgtaaaattaagttcagcattaaataaagctgggattaaacgaggagatactgtttcagcattgttaccaaatacgcctgcaatgttagagtgtcattatggtgtcccaatgtctggagcaatattacattcaataaacacaagacttgacccagctgttatatcttttcaattaaatcatgcagagtctaagataatgattgttgatagtgaatacattgcattagctaaagaagctcttaaacatacaaaaaataaaccaaaaattattgaatatgatgatattgaatanatcggtaaaagagaaaaatttaaatccataaattatgatgactttctaaatgaaggtgatgaaacatttgaatggttaatgccagaagatgaatgggatgctatttcaattaattatacttctggaacgacaggcgaccctaagggggtagtaacccatcacagaggcgcttatttattagctcaagggaatgccttgactatgtcaatgccaaaacattcggtatatctttggacactaccaatgttccattgcaatggatggtgtttnccttggacaatgtctgcaatatctggaacccatgtttgtcttaggcaggttcgtgcagataaaatatggcattcaatatctgaatataaagtcacacatctttgtggagcgccaatagttatgtcagttatagtagatgcagatgatattgataagcgtaagattaatcatagcgttcaatttttgacagctgcagcaccaccaccagaaaaaatattaactgaaatgaatcgatcaggatttaatgtcactcatctttatggattgacagaaacttatggaccagcagtagtcaatgactggcaagatcattggtccaaactcacccaggaagatcaggctagattaaaagcgcgtcaaggcgttagatatctgccactagaaggattagatgttttagaccctattacgatgaaacccgtgccaagagatggaaaaacattaggtgaagttatgtttcgtgggaatgttgtaatgaaaggntattttaaaaaccccaaagcaactnaagaagcattcagtggaggctggtttcattcaggagatctaggggttatgcatcccgatggatatctgcaactaaaagatcgatcaaaagacataattatatctggtggtgaaaatatttcatctattgaaatagaagaagttttatatagacacgacgctntcgaaattgctgcagttgtagctatgcctcacaaaaaatggggcgaaacaccatgtgcatttatacaaacaatcgataaacacgggatatctgaaggtgaattaaaaacttggtgtatggagtttcttgcctcatacaaagttccaaagaaatttgtttttacaactattcctcgcacatcaacaggnaagatacaaaaatttctattacgggataaagctaaaaacttttaaaattatactttatttctatatttatgaaatttaaaaagtaagggcgctaaaagtcccaagtatattaaatttgatatacttttaattggccatatccctataactttactaagaaatctataatatggcaatttattccaaatctcttgaaaagcatcaacaccattaatttgttttccatctaatttagcatgtagtttttttgcagcctgatcctcggttaaattccataattctgcagtttccggtgtaattggtgtgaatataatatcattttttgctaatttcttataatgcctgatttctctatcacaaaccggacaatcagaattatatagaacttctaaatcagccatattactttttcccaaactctnaaataacaaatagtacaaaaaaataaagtaaccagttattttgaanattactttcttataataattatatctattcttctgaaactccagcttcagcaaaagtagccatgcctgagtggcatgcaagtgcagcttgaagaacacttattgccattgcgccaccagaaccttcacctaatctcattccaaatgaaagcaatggttttttattgagattatttaaaagcactttatgtgcttgttcattcgattcatgaccagctacacaatgatctaaagatccaaaaacagtgttttcaagacaggccgcagctgctgtacaaataaacccatctaatattaccggtatagatttngatcttgcactagcaattgagcctgccattgctgctatctcacgcccaccaagacatctaagtgcctnaaggccattattaattgctgatgtatttttttccaaaccagcagttacaactcgcgccttgttttgcaatccttgatcatcaactcctgtaccacggccaacccaatccaatgcactaccaccaaacaatgcgtttgctatagctgctgctgaagtagtatttccaattcccatttccccagcaacaaataaatcacaattctcatcaacagcattccaccctgtgattaatgcggcaatgcattcagcctcagacattgccggttcattcgtaaaatcatttgtaggattatctagatcaatagcaattacatctaactttgcgccaaaagttttacaaagttgatttatagctgcaccaccattctgaaagttcaaaaccatttgttccgtaacctctgacggaaatgcagaaacgccttgtatagttacaccatggtttcctgcaaaaacaactacttgaggagagatgatctttggtaaagaatctccactccatcctgaaaaccaaattgcaagttcttccaaacggcccagtgctcctggtggtttcgtaagctgattatttctatctgatgctagtttttcagccaaagtatttgtttccggttgtttaagtagtaattctttaaattcactaagatttgtaaattctgcatcgttcataatattgtcacttctgtattgatttttatcttcttttaacgccatgtaataaaagttaaaatcccatatacgaagtatgcaacaaatgaccgacaataataaaaaatcttgtgttgaagctcatgacatatgggctgcatttagtttattaactcgtataaggattccagttaaccataatcgtgctggtaatcgagcaagtaatgccacatgggcttacccattagttggtgcaatagttggtgctatatcaggcttatttttaacgttaatgagcctaataggacttccaagtggtttttgtgctgcaattacacttttagttcttattgcnatcacaggcgcaatgcatgaagatggcttagctgattgtgctgatggcttctggggtgggcaaagctcatccagacgactagagataatgaaagatagctctattggtgtttatggggcgtgtgcacttattatatttttattagcagagctatcagcaattgaaactttaattgcaatagatcctatttggtcgctcgctggtgttggagcaattagtagactccctatggtaatagcaatgaggtatgtgccaaatgccagaaacaatggcttagcagcaagtgttggtatgcctcaattatgttctgttctaatagcgatcattttagcaatattaatagcattaacttgttttggaacgtctggattattaatcttactagtcggattaatatctgcattaccaatttttttaataggaaaagtaaagattaatggtcaaactggagatgtattaggtgcatctcaaaaattttctgaaattggcacactagctacaatactagtattacaagctctatcanttttaaactaatagagctttnaagcgatataattaagatgctttcgcaatgagtatgtctgta

SEQ ID NO: 666 - DNA, 4000 bp, Escherichia coli
  misc_feature (1)..(6): n is a, c, g, or t
  misc_feature (9)..(9): n is a, c, g, or t
  misc_feature (13)..(13): n is a, c, g, or t
  misc_feature (15)..(17): n is a, c, g, or t
  misc_feature (22)..(22): n is a, c, g, or t
  misc_feature (24)..(25): n is a, c, g, or t
  misc_feature (29)..(29): n is a, c, g, or t
  misc_feature (31)..(32): n is a, c, g, or t
  misc_feature (34)..(34): n is a, c, g, or t
  misc_feature (36)..(36): n is a, c, g, or t
  misc_feature (40)..(40): n is a, c, g, or t
  misc_feature (42)..(42): n is a, c, g, or t
  misc_feature (45)..(48): n is a, c, g, or t
  misc_feature (50)..(51): n is a, c, g, or t
  misc_feature (53)..(54): n is a, c, g, or t
  misc_feature (56)..(56): n is a, c, g, or t
  misc_feature (60)..(61): n is a, c, g, or t
  misc_feature (65)..(66): n is a, c, g, or t
  misc_feature (68)..(68): n is a, c, g, or t
  misc_feature (74)..(74): n is a, c, g, or t
  misc_feature (76)..(76): n is a, c, g, or t
  misc_feature (78)..(84): n is a, c, g, or t
  misc_feature (88)..(90): n is a, c, g, or t
  misc_feature (92)..(92): n is a, c, g, or t
  misc_feature (94)..(95): n is a, c, g, or t
  misc_feature (97)..(98): n is a, c, g, or t
  misc_feature (100)..(103): n is a, c, g, or t
  misc_feature (105)..(105): n is a, c, g, or t
  misc_feature (107)..(109): n is a, c, g, or t
  misc_feature (111)..(111): n is a, c, g, or t
  misc_feature (114)..(115): n is a, c, g, or t
  misc_feature (117)..(117): n is a, c, g, or t
  misc_feature (119)..(119): n is a, c, g, or t
  misc_feature (121)..(122): n is a, c, g, or t
  misc_feature (124)..(127): n is a, c, g, or t
  misc_feature (129)..(130): n is a, c, g, or t
  misc_feature (133)..(137): n is a, c, g, or t
  misc_feature (139)..(143): n is a, c, g, or t
  misc_feature (146)..(147): n is a, c, g, or t
  misc_feature (149)..(149): n is a, c, g, or t
  misc_feature (152)..(155): n is a, c, g, or t
  misc_feature (158)..(171): n is a, c, g, or t
  misc_feature (173)..(174): n is a, c, g, or t
  misc_feature (176)..(176): n is a, c, g, or t
  misc_feature (179)..(181): n is a, c, g, or t
  misc_feature (183)..(183): n is a, c, g, or t
  misc_feature (185)..(185): n is a, c, g, or t
  misc_feature (187)..(187): n is a, c, g, or t
  misc_feature (189)..(191): n is a, c, g, or t
  misc_feature (194)..(196): n is a, c, g, or t
  misc_feature (198)..(201): n is a, c, g, or t
  misc_feature (205)..(205): n is a, c, g, or t
  misc_feature (207)..(207): n is a, c, g, or t
  misc_feature (209)..(210): n is a, c, g, or t
  misc_feature (212)..(220): n is a, c, g, or t
  misc_feature (223)..(226): n is a, c, g, or t
  misc_feature (228)..(230): n is a, c, g, or t
  misc_feature (232)..(232): n is a, c, g, or t
  misc_feature (235)..(236): n is a, c, g, or t
  misc_feature (239)..(240): n is a, c, g, or t
  misc_feature (242)..(243): n is a, c, g, or t
  misc_feature (245)..(245): n is a, c, g, or t
  misc_feature (247)..(248): n is a, c, g, or t
  misc_feature (250)..(250): n is a, c, g, or t
  misc_feature (252)..(252): n is a, c, g, or t
  misc_feature (257)..(257): n is a, c, g, or t
  misc_feature (259)..(259): n is a, c, g, or t
  misc_feature (261)..(265): n is a, c, g, or t
  misc_feature (268)..(268): n is a, c, g, or t
  misc_feature (272)..(274): n is a, c, g, or t
  misc_feature (282)..(282): n is a, c, g, or t
  misc_feature (284)..(285): n is a, c, g, or t
  misc_feature (287)..(288): n is a, c, g, or t
  misc_feature (291)..(291): n is a, c, g, or t
  misc_feature (297)..(303): n is a, c, g, or t
  misc_feature (305)..(307): n is a, c, g, or t
  misc_feature (309)..(310): n is a, c, g, or t
  misc_feature (312)..(312): n is a, c, g, or t
  misc_feature (314)..(314): n is a, c, g, or t
  misc_feature (316)..(316): n is a, c, g, or t
  misc_feature (321)..(324): n is a, c, g, or t
  misc_feature (327)..(327): n is a, c, g, or t
  misc_feature (329)..(329): n is a, c, g, or t
  misc_feature (332)..(332): n is a, c, g, or t
  misc_feature (336)..(336): n is a, c, g, or t
  misc_feature (338)..(338): n is a, c, g, or t
  misc_feature (340)..(340): n is a, c, g, or t
  misc_feature (342)..(345): n is a, c, g, or t
  misc_feature (347)..(347): n is a, c, g, or t
  misc_feature (352)..(353): n is a, c, g, or t
  misc_feature (355)..(355): n is a, c, g, or t
  misc_feature (357)..(357): n is a, c, g, or t
  misc_feature (359)..(368): n is a, c, g, or t
  misc_feature (370)..(371): n is a, c, g, or t
  misc_feature (373)..(373): n is a, c, g, or t
  misc_feature (375)..(375): n is a, c, g, or t
  misc_feature (380)..(386): n is a, c, g, or t
  misc_feature (388)..(388): n is a, c, g, or t
  misc_feature (390)..(390): n is a, c, g, or t
  misc_feature (392)..(392): n is a, c, g, or t
  misc_feature (395)..(395): n is a, c, g, or t
  misc_feature (397)..(399): n is a, c, g, or t
  misc_feature (404)..(405): n is a, c, g, or t
  misc_feature (407)..(413): n is a, c, g, or t
  misc_feature (415)..(415): n is a, c, g, or t
  misc_feature (417)..(417): n is a, c, g, or t
  misc_feature (419)..(420): n is a, c, g, or t
  misc_feature (422)..(423): n is a, c, g, or t
  misc_feature (425)..(428): n is a, c, g, or t
  misc_feature (430)..(430): n is a, c, g, or t
  misc_feature (432)..(433): n is a, c, g, or t
  misc_feature (435)..(435): n is a, c, g, or t
  misc_feature (437)..(437): n is a, c, g, or t
  misc_feature (440)..(440): n is a, c, g, or t
  misc_feature (442)..(444): n is a, c, g, or t
  misc_feature (446)..(446): n is a, c, g, or t
  misc_feature (448)..(448): n is a, c, g, or t
  misc_feature (451)..(452): n is a, c, g, or t
  misc_feature (454)..(454): n is a, c, g, or t
  misc_feature (457)..(457): n is a, c, g, or t
  misc_feature (459)..(460): n is a, c, g, or t
  misc_feature (463)..(463): n is a, c, g, or t
  misc_feature (466)..(471): n is a, c, g, or t
  misc_feature (474)..(474): n is a, c, g, or t
  misc_feature (479)..(488): n is a, c, g, or t
  misc_feature (491)..(498): n is a, c, g, or t
  misc_feature (500)..(502): n is a, c, g, or t
  misc_feature (504)..(507): n is a, c, g, or t
  misc_feature (510)..(511): n is a, c, g, or t
  misc_feature (514)..(518): n is a, c, g, or t
  misc_feature (522)..(522): n is a, c, g, or t
  misc_feature (524)..(531): n is a, c, g, or t
  misc_feature (533)..(533): n is a, c, g, or t
  misc_feature (535)..(536): n is a, c, g, or t
  misc_feature (539)..(541): n is a, c, g, or t
  misc_feature (543)..(543): n is a, c, g, or t
  misc_feature (546)..(547): n is a, c, g, or t
  misc_feature (549)..(554): n is a, c, g, or t
  misc_feature (556)..(557): n is a, c, g, or t
  misc_feature (559)..(559): n is a, c, g, or t
  misc_feature (561)..(561): n is a, c, g, or t
  misc_feature (563)..(564): n is a, c, g, or t
  misc_feature (567)..(567): n is a, c, g, or t
  misc_feature (570)..(571): n is a, c, g, or t
  misc_feature (575)..(576): n is a, c, g, or t
  misc_feature (583)..(583): n is a, c, g, or t
  misc_feature (586)..(589): n is a, c, g, or t
  misc_feature (598)..(598): n is a, c, g, or t
  misc_feature (600)..(600): n is a, c, g, or t
  misc_feature (603)..(604): n is a, c, g, or t
  misc_feature (606)..(606): n is a, c, g, or t
  misc_feature (609)..(609): n is a, c, g, or t
  misc_feature (613)..(615): n is a, c, g, or t
  misc_feature (621)..(621): n is a, c, g, or t
  misc_feature (623)..(624): n is a, c, g, or t
  misc_feature (626)..(626): n is a, c, g, or t
  misc_feature (628)..(628): n is a, c, g, or t
  misc_feature (631)..(631): n is a, c, g, or t
  misc_feature (635)..(636): n is a, c, g, or t
  misc_feature (642)..(643): n is a, c, g, or t
  misc_feature (647)..(648): n is a, c, g, or t
  misc_feature (651)..(652): n is a, c, g, or t
  misc_feature (654)..(654): n is a, c, g, or t
  misc_feature (656)..(656): n is a, c, g, or t
  misc_feature (658)..(659): n is a, c, g, or t
  misc_feature (663)..(663): n is a, c, g, or t
  misc_feature (666)..(668): n is a, c, g, or t
  misc_feature (670)..(670): n is a, c, g, or t
  misc_feature (672)..(672): n is a, c, g, or t
  misc_feature (674)..(684): n is a, c, g, or t
  misc_feature (686)..(686): n is a, c, g, or t
  misc_feature (688)..(689): n is a, c, g, or t
  misc_feature (692)..(692): n is a, c, g, or t
  misc_feature (694)..(694): n is a, c, g, or t
  misc_feature (697)..(698): n is a, c, g, or t
  misc_feature (700)..(701): n is a, c, g, or t
  misc_feature (703)..(704): n is a, c, g, or t
  misc_feature (706)..(706): n is a, c, g, or t
  misc_feature (708)..(709): n is a, c, g, or t
  misc_feature (711)..(711): n is a, c, g, or t
  misc_feature (713)..(713): n is a, c, g, or t
  misc_feature (716)..(716): n is a, c, g, or t
  misc_feature (720)..(720): n is a, c, g, or t
  misc_feature (726)..(726): n is a, c, g, or t
  misc_feature (728)..(729): n is a, c, g, or t
  misc_feature (731)..(737): n is a, c, g, or t
  misc_feature (739)..(739): n is a, c, g, or t
  misc_feature (741)..(741): n is a, c, g, or t
  misc_feature (749)..(750): n is a, c, g, or t
  misc_feature (752)..(752): n is a, c, g, or t
  misc_feature (754)..(755): n is a, c, g, or t
  misc_feature (757)..(762): n is a, c, g, or t
  misc_feature (764)..(768): n is a, c, g, or t
  misc_feature (770)..(772): n is a, c, g, or t
  misc_feature (774)..(774): n is a, c, g, or t
  misc_feature (776)..(776): n is a, c, g, or t
  misc_feature (780)..(780): n is a, c, g, or t
  misc_feature (782)..(785): n is a, c, g, or t
  misc_feature (787)..(791): n is a, c, g, or t
  misc_feature (793)..(796): n is a, c, g, or t
  misc_feature (800)..(803): n is a, c, g, or t
  misc_feature (810)..(812): n is a, c, g, or t
  misc_feature (825)..(825): n is a, c, g, or t
  misc_feature (864)..(864): n is a, c, g, or t
  misc_feature (974)..(974): n is a, c, g, or t
  misc_feature (1049)..(1049): n is a, c, g, or t
  misc_feature (1098)..(1098): n is a, c, g, or t
  misc_feature (1118)..(1118): n is a, c, g, or t
  misc_feature (1159)..(1159): n is a, c, g, or t
  misc_feature (1581)..(1581): n is a, c, g, or t
  misc_feature (1610)..(1610): n is a, c, g, or t
  misc_feature (1633)..(1633): n is a, c, g, or t
  misc_feature (1766)..(1766): n is a, c, g, or t
  misc_feature (2038)..(2038): n is a, c, g, or t
  misc_feature (2653)..(2653): n is a, c, g, or t
nnnnnnaantttntnnngtttngnngggnanngnantttngnaannnnannannanaaannaaanntnaaaaangnannnnnnntttnnntnanncnngnnnncngnnncnggnnantngnnannnnannttnnnnnannnnnccnntnccnnnnttnnnnnnnnnnnnnnanngnttnnntnantngnnnaannntnnnncccnancnngnnnnnnnnnttnnnnannncnaannaannannancnntnancaaantncnnnnnccnaggnnnaaataaangnntnnccntttttnnnnnnncnnngnnanancnaaaannnnggnanggnaggnangnannnncnaaaanntncntnnnnnnnnnntnntnanttttnnnnnnncntngnttncnnnaaaanncnnnnnnntncnannanngnnnntnanngnanggnannnantnaanntncgngnnaanggnnnnnnttngaaannnnnnnnnnaannnnnnnnannnannnngtnnttnnnnntttnannnnnnnncnanncannntnaannannnnnnanngnantnnaantanncaannaaaaaancannnngggaaaaangnaannanaantttnnnaaaaangnntncnttnaaannaaaaanngttnnttnntnantnntatnaannnantncnnnnnnnnnnntntnnccngnttnnanncnnanannancnaantttnaaaaantnngnnnnnnntntntttttttnntnanntnnnnnnannnnntnnnantntttnannnntnnnnntnnnntttnnnntttgaannnttaacgattggcntcgatctgtagtggaattcttctttatttttttagttgntgggtacttatttttttaatttatttttaattctagcatctcaaatggccgtactatccgtctgtgacggaagaacggagaatgtatctgccaggctattttcggatganttaatcaatacacctacaagtgaagaatttcgaaatcgctttgaatttgataaacttaatctttttctctccgancgcctatccttttggagtgacttaggatttgctgagctcaattcccccnaggatggttttgcctacctnccatttgcaaatggagttagaaatatcagtcggataaaaanagtccgccccccgaacacagaggagatgcaactcaatcaccccttatccacaagaaaagacaaaacagccaaatggttagtttcgatgtggcaacctgaagaagtttttccaatccaattggaagaaaaagaagcccttcaaacaatctcaattttacccggtattaacttgagcttcgaacaaccggcaaatcgtttcaatcactctgttttctcatgggagaactctaagtgtttaaaggaaataaaagatgaggaatatttaattcctaatgcccttttagacgcgatagtaaaaagtaactttgaactttttttccaacaaaccaagatcgtcgatgaagaacttcatgcaatttacctaaaggtattacacacaataccccaacataatgtcgtcagggcaacatcacttagcatgnctaatttaagcacttatcttttaataggnggtttgatttgtatttttataantagatatactaaaaacagttactccgattgagcccaaccttctaatgagcgggcacaatcaagtagagatagacgaaatcacaaaaaaaccaaaccaaaatagaacgaattggtagttcaccttcgagagganagaaggatttcgaatgagggccgtctatcggcactgaacaaagttaccttacagctcgataccttcgttctgagttctgtaatgtaccctttcaactcactatatgtattaccaaaccaaaccgatcgatatttcaagttctgctaaaaggtacaaccaatgccccaccgtcagtccaaatcaacaccagttgaaaaataaataacttccccttaatttaggttccaaagttcgtgaccgtaaaaaggatttaccttgaatttaaacggacnaagtaaaggcttatgtaatcgaagctataacaatggagcggatctaattatttatcttaattaccgctatccaaggttttaaataatttgaaaagcggatttttggtagtgataaataaagaaatatccgaatttaaaacttctttgtaagtatctaaggttttaataaaactgtaaaattcaaccgcacctgggcttttattataagattcagcataaattgcagatgcattcgcatccgcctcaccataaatttgctctacacttctgtatgcctcagactcaatctctgcgagatctttttctttcttacccatgatctttgctgcctcaccggcaccttctgaacgaaaccgatctgcgatttggtttctttcactcaccatgcgctcgtagatacgacgacgtacggtttcgttatagtttattctcttgaaacgaacatctaataattcaatcccaaatccttgaagtttagcagccgctttttctaaaatttgttgctccactaattcgcgacctattttgattgggtaaagcacaccgaccttaccaaccccttggaccaaagactcatcaattctagccttacgatctttatcggtacgaacaatntcaattagctcgtgttttgccaccgcatttctgatttcacttccgagaatatcatccaagcgagacagtgcactccgttcatcgcgcaagcgaagaaaatattgcattggatcattaattctccaacgagcaaaagtatctataatcaaataagttttatctttggtcgacatttcattggaaggtccatcccaaggtaaaaaacgtttttcaattcggttgatttcttgaataaatggcaccttccagtgcaaacctgcttccgtctgtggatcaccaatcggtttgccaaattgagtgattatgacttggtcggtttcttcgacaacatacgaacaaacatatactgcccagaataaaagaatgattggaataagtgctaattgtaatttcatctttaaagttctccttttgatccagcatccaatttaagaaatggtaaaacttgggaagcatcttcatctaaaattattttctttcccatttgcggaatcacttccttcatcgtttccaaataaagtctagtccgagtaacttcgggtgctttttcgtattcttcaaaacgatagttaaaacgagctacatcccccattgcctcatttacccgcttcaatgcataaccttccgctgcctgtattttttgatcggctactccacgggaacggggaatttctttattatattctccgttggcttcgttaatcatacgctcgcgctcctgttgagcttgattcacctcgttaaaagatgcttgaacgggaggtggaggatttacattctggagttgtatttggtcaatactaattcctaattcatatttttttaccagtttagctagtcgttcacgtgcctcttcctcaatctcctgccggccaatggtaatgacttcatccacagttcgatcccctactactgttctcataaccgattctgaaatatggcgaagagttccctcaggatcgaggactttaaataagtaaagttctgggtcattgatccgatactggacaatccattcaaccactgctgcatttaaatcgcccgtcatcatacttttttcaatatcacgggcacgacgatcagcgaactgggtaggattcgttccacctggagtactaaagccatattcttgttttaactggcggcgtactggcagtacataaacccgttctaaaccgaaaggtaatttgtagctaagcccgggttcaacagttttaaggtacttaccaaatctcaaaactactccctgcgactctgcaggaactgtataaattgaagtaatcaaagcgactagtactccgataattataacgacccaaataataattcctttacggaaaaaatcag

SEQ ID NO: 667 - DNA, 4000 bp, Escherichia coli
  misc_feature (117)..(117): n is a, c, g, or t
  misc_feature (581)..(581): n is a, c, g, or t
  misc_feature (774)..(774): n is a, c, g, or t
  misc_feature (777)..(777): n is a, c, g, or t
  misc_feature (927)..(927): n is a, c, g, or t
  misc_feature (930)..(930): n is a, c, g, or t
  misc_feature (954)..(954): n is a, c, g, or t
  misc_feature (999)..(999): n is a, c, g, or t
  misc_feature (1203)..(1203): n is a, c, g, or t
  misc_feature (1416)..(1416): n is a, c, g, or t
  misc_feature (1838)..(1838): n is a, c, g, or t
  misc_feature (1991)..(1991): n is a, c, g, or t
  misc_feature (2189)..(2189): n is a, c, g, or t
  misc_feature (2204)..(2204): n is a, c, g, or t
  misc_feature (2495)..(2495): n is a, c, g, or t
  misc_feature (2834)..(2834): n is a, c, g, or t
  misc_feature (2870)..(2870): n is a, c, g, or t
  misc_feature (3260)..(3260): n is a, c, g, or t
  misc_feature (3999)..(3999): n is a, c, g, or t
agcagaacgccgctgagcagaccgtacatgtgggtgtcagtgccgtagtacacgcgactcaatggcgcttcgccagcagccagcaccgtgctgattgtcagcgaaaaaaccaccagnacccccacagcaatggcgaataagcgccacctgcgctgaaggataagggccacagccaccagtaatagcggccagattacatagaattgttcttcaaccgccagcgaccagaagtttgtgaacagctgcggggaagtctgcgtaaagtagtcgttgcctgaaaggatagagagccaattagaggagaatgtggccgcgcccagcacctgacggtcaagggccacccgaatatcgccctgcataatctgggtaatggggcccatgagaagaattactagtgcaatagccgggagcagacgtctggcacggcgtttccagaactccagcaggttaatacgcccggtggtggctccctcacgcagcagcagggccgtgatcaaatacccggagatgacgaaaaaaatgtctacaccaatcatgcccccggggactaccgtgggccataggtgatacacgattaccanagacactgcgatggcgcgtaaaccatctagcccaggtagtatgaacttttgattcccctcttcgggggcaatagcggaggcgaaaagctgcttcattgacggtgactactccgggtcaggtgatggcgcaataaattactgcttaattatagggtcggttcgtgcggttctttgcgcttcccccaagtttagnccngctttaacggctaatattaaaaatattaagggtacgggtgcagtatttcctgggtaacgcccataaatactgtgagagaaggaacaaggcaggtagacagtggtacaacataccggtgagatgacgactaataaaatatggcgcgtggcngtnctcggcgcgaaaggacgcatgggntctgaggccgtgcgggcggttaatactgccgccgatatggacctngtggcagcgctgggcagcgcagacccgctcacgaaactacttgatgttaaagccgacgtcatcatcgacctcaccgtgcccaccgcaactgaagcaaatgtgcgtttcgctgtggaacacggcatacacgcagtggtgggaaccaccggttgggatgaagaacggctcagctcactgaagcagcttctgggcgagcaccccggngtgggcgtgctcatcgcccctaacttcgctatcggctcgattctcgccaccgaatttgcggccaaagccgcccggtattttgaatcggctgaaatcattgaaatccaccacccaaataaagtggatgcaccctccggcaccgccgcacacaccgcccggaaagtggctgccgctcgagaagcagccggggtaggggcgtcccccgacgcgacngaaactgacccgctaggatcacgcggggcaaaaattgatggtattagtgtgcacgcggtgcggctgcggggcatggtcgctcaccaggaaatcctgttgggagacaccgggcagcttttgacgatccggcatgactcgtttgaccgtgcctccttcatgcccggggtgctgctgggtgtgcgagaggttgcctcccacccggggctgagcgtgggcctggataactacctggagctttcatgagcacccctgtgccctcttccggcacggattcctctcgccgctcactttttttatcgttgcggctctggagtgcgctcgcctgcatcctcttagcggctacagtgctgttgctgcccgtgccgtttggtgcccgcgctttcatactgggagtgttgctctttagcggtgtattcttggtngtcgatgctggcggtaaagggaaaaccttcgcggctctcaccgtagcgctactggggttgtatctgctctttaccgcacagcgtggggtgatgctgatcgtctcaggcaatattgcgggaactgttctgggggttgggctgctgctgttgccngcggtgggggcgtgggcgttggtacgtgaaattatttttggtgcacgcatccagaagctcgccgatgagctggctgctgccggtaaactccctgaagacaccctgccgcgcagcccctcggggcgggtggacaagtccgctgccgcacaggagttcgagaaatttgcgcttgccgttgaagacgcccctgacgactgngccagctggtttaanctctcctgcatgtacgatgcgtgcggcgagcgcaaacgcgcccgggccgccatgcgtaacgcggtgagtctgcaccgggggcggcccgccaagcctatggtttagcccgcctgccgtaacggataagaaaagtgggcgtgacgcgcgacaaataaagctgggagtagtagggtagttagtatgtctgatagcgcagtgaacaccgaaacctccaaccgtcccgtgaacagtgctggcgggctgaaaaccccgcataaccagggtacgttcgccacaccgatttttggccgnctgctgaccgccatggttaccccatttgccgccgacggctccgtggacgaggcgcagaccgtgaagttagccgagtaccttgtcgacaatgggcatgacgggctagtggtgtgcggcaccaccggcgagtactcgaccatgactgatgatgaaaatgaacgcgtgttccagatcgtcaaagatgccgtggggcaccgggctaagatcgtcgcgggtgttggctcgaatgacactgcgcacaccattgagctggctcgccgtgccgataaggtgggcgtggacgggctgctggtagttaccccctactacaataagcccacccaggcgggcgtgtttgcncactatcaggcggtggcgaaaacctctgacacgccnattatggtgtacgatattcccgggcgctccgccattccgattgagccggatacctaccgccgcatggcagaaattgatagtattgtagcggtcaaagacgcgaaagctgactttggcgccgcgtccgaggttatggcaactacagacttgcagtactacagcggtgatgatggtttaactctgccctggatgtcggtgggggccgtcgggctggtatctgttacagcgcacgttgccccgcagctattccgtgaacttattgatgcggtcgtagcccaggatctggtgactgcccagcgtgttcacctcctgctgaccccgatcgtgcgtgcgacaatgagccgtgcccccgggtgcgtctccgctaagcagattttgtcgtggcagggngttcttggcacccctgtggtgcgcctgccgcatgtgctttctgaacccgccgtggtggaagcgatgcgttcggatttgcgtgactcggtcattgcgcacagcattcagaattcttagctgattctgtctccttcacgggcccgcgtgagtaccctgcactattggggtgcgaacgccgggtccgtttcgatgcattcaggtgtgtccaagatagcgggccgccagcacaggttagagaggcagcaaagcaactatgagtacagacaatagaaaacagtaaaaacctataaaggagaatagattgagcgtattcgaggcggatctgcccgcccctccgccgttgcagaaagacaccctgcgagtggtgccgcttggcggtctgggcgaggtcggccgcaatatgaccgtgtacgaaattaacggcaaactgctgattgtggactgcggtgtgcttttccccgaagagtcacagcccggtgttgatctgatcctgcccgatttgagttacgtggtggggcgcattgacgacgtggtggccatggtgctcactcacgggcatgaagaccatatcggtgcagtaccttacctgctgaaaaaacgcccggatattcccctcatcggctcggagctgaccctggcccttgtggaggcgaaacttgccgagcaccgcattaagccgtacacgctggcggtgaaagaacaccaggtggagcgtttcggcccgtatgagtgcgaattna

SEQ ID NO: 668 - DNA, 4000 bp, Escherichia coli
  misc_feature (1982)..(1982): n is a, c, g, or t
  misc_feature (1992)..(1992): n is a, c, g, or t
  misc_feature (2003)..(2004): n is a, c, g, or t
  misc_feature (2009)..(2009): n is a, c, g, or t
  misc_feature (2015)..(2015): n is a, c, g, or t
  misc_feature (2022)..(2022): n is a, c, g, or t
  misc_feature (2024)..(2024): n is a, c, g, or t
  misc_feature (2572)..(2572): n is a, c, g, or t
agctattttaacaaaaaatgatgatggagaaattactgaagtagtattatgtaataatatttatattgaaaacctaaaaagtgttggatatgaaaaaatgtctgaatataaatcaattacatcttttacaggagatgttattataggagctaattatacatataaagatgattataatctaggtgatattgtaaatattgtaaatgaatacggaatttcaattaatgttaggatatctgaaatattagagagtatagatgataatggatataaaatggaaccgacatttcaaaatataaaaagtgaataggaggcaaaaatggaaaacgatgtaaaatttgaagttactgctggtttttttgatgcgataaataatgatcgtgtttattcagcagatgatatgaatagaccatatagaaaattaataagtaatggtgtttttgcaactccaaaaggtgaaccttccgattatttgcaagtttttactgcaaataatgggatgaatattatagtttcagcaggttatgcactaattggggataagtggtttgaaaatccaagcaatttgacaataactacagcacaaaattctgatgtattaactagaatagacagtattatagctcaaatggataaaactcaattaggaagagcaggaaatatagtatatagaaaagggactgcatcaagcaacccagtacatccatcaataaatactgaagaaaacatcattgaatttagattagctgatattacgattagtccatcttgtataaaaattacacaagacttaataaaagactgtagaggtagtagtgaatgtccttgggttacaagtttaatatatcaagttgatacatcaacattatatgcacaatggcaagaggcatataagaaatattatgaagatcaagaagcggaacacgatacatattttacagaatttaaaaatattatggcaaatttctttaatactgaagaacaggagtttactaattggtttgaaaagatgaaaaatcagttgtcagaagatgcagcaggaaaaatacaattagaaatagataatttaactactattttaaatgaaacaagagagaatttagaagatgcaatttcgccaattataacagaagatggatattatattgcaacagaggataatacaagattagtagttggaatgtaaaaaaataaggaggattttacaattatgggaattaaaaaaatttcagaacttgaagaattaaagaatcttcaaacaacagatatattacctgttgttgatgtggaaaatggaacaactaaaaaagttaaaatttccacattacttactgcacttgtagaaaaaaatgcaggtgcacataatagtatttatagaggaaaagatattactgatttattttatgatgggacattaagtaaacaaattgcagcaggaacatttgatgatatattcgttggagattatatcataggaaaaacaagtggtagaaaatatttagtagccgatattaattatagattacacatgggagatacagaatgtacaaaacctcatgttttgatgataccggaaagaataatgggaacagcacaaatgaatgctagtaatataactgatggagcttatattggtagtgcgatgtataaaacaaatttagcacaatttaaaacagtaataaaaaatgattttgaaacaagtcacatattaaagcatagaaatcatttacaaaatgcagtttcaaatggatgtgagaccggaggaacatggtacgattctgatatagaattgatgaatgagataatggtttatggttgtcaaatattcaaaaatgctacaaatggatctacatttcctaacaattatcaaatagacaattctcaattatcattattcaggttaagacatgattcgattgttgctagaaatgatgctggagatagatattggtactggttaagagatgtcgtttcttctgcgnatttcgcgtntgtcggcgacnntggtnattcgngttacgncngcgcttcgaatgtcagcggtgttcgtcctgctttcctaatcgtgtaatcagacatcgacagggctttatgccctgtcatatagtatagttagctttcaagatagttaaaataagaaaataaaaatgatataatttctgttgaaaaaatagaaaaggagaaatagtattattttacaatgtcagagataaagaaaagtgaaagaaaagaatcaaaattgcaaacaattcataatgcatatatgataagaatggcagtaacaaatttagcagaaaataatttttatataacattttcaaaaatagaagagaaaataaacaatagaataaaaggacttgatgaaaaggaacaaataagaataaaagaaaatatgtataaattttatagaaatcaaataaatagagtatcagacaatgtaatagaattagcaacaggaataagtaggcatttaagaattgcaaatacaatatttccaacatatatgtcagagtttgaagaaagacgtatagaaatggacagagctatggcttgttgtaatgcacttcaagangaattgcaatatgcaggagaatgtttatatgctgatttgaataagtatatgaatttggttctagaaattcaaaaagaatttaatatgataaaatcacttcgacaaactgacaataggtttttaaaaaatataaaaaaataataattagtgggtaatctttgtatgtcgtttcttctacgaatttcgcgaatgtcagcaacaatggtaattcgagttacaacaacgcttcgaatgtcaacggtgttcgtcctgatttcacaacccatacaatttatttatatggacttgattccatcgtatggatatgggaaaaggaaaggaaagattatcccttcaatagcagaattgataaatactaatcattatgtatttggttacgaccagtaatactattaaagtgatttttatgaatattttttatgatgcaaataaaatttatgaagctggaacaaaggcaattcaaggagcaccttttaaatatcaatcacaattgttcgaaatgaaccatttgatagaaacagcacaaattttaaaagatttgaaagagtggaaatataaaccagtagcaggaaaaaaatttactataaatgaacgaggaaaaataagacatattacaagtaataatatggttgataaaacaattaatcatttactttgcgataatgttttaagtccagctatttctccatatttaatctatgataatggtgcaagtcaaaagaatagaggtgtggcttttcatagaaaaagatttgaaacacacttacatcaatattatagaaaatataaaagtaatgagggatacatattgttaattgattttagcggatattatgcaagtattcctcatgatttatgtttaaagaagttacaatattttttaagaaaagtaaaccctgaagaagcaaaaattactatgtggattttaaaaaatctatttgatgtatttaatatagataataaaaatggaaaaggcgtagatattggaagtcaaccatctcaaaatataggaatttcgtatccatcacaaatagacaattatataaaaattgttagaggatgcaaatattatggaagatatacggatgatagttatatcattcatcaagataaagaatttttaaagcaattactaaaagaaataaaaattatatcaagtaaactaggattaatagttaatgataggaaaacaagaatagtaaaattatctcaacaatttaaagtattacaaataaattattcactaacaccaacaggaagaataataaaaaagataagtacaaaaacagtaactcgagaaagaagaaaactaaaagcatacaaaagactattggacaaaggaaaaatgaaaagtaacgatatagaaaatagttttaaaagttggatggcaggaaattataaaaaaatgtcaatgcaacaaataagtaa

SEQ ID NO: 669 - DNA, 4000 bp, Escherichia coli
  misc_feature (239)..(239): n is a, c, g, or t
  misc_feature (245)..(245): n is a, c, g, or t
  misc_feature (317)..(317): n is a, c, g, or t
  misc_feature (791)..(791): n is a, c, g, or t
  misc_feature (798)..(798): n is a, c, g, or t
  misc_feature (1991)..(1991): n is a, c, g, or t
tttcatcaattttatatgaggacacatcaaggcttgcaccatcaatagatttggtaaaaataccataactaatagagtggccatcttcggtaaagtatggatcagcaaaataaaaactcatctcttgtactgcctctgaattagaaaatgcagcattgagtgtgttgcccgtgcctaggaaattgttttctttaacacccatattaaatgaggcgcccgagctgtttgaatgcgacaanccaatngaaaaggtacctgttttggtttcctccacactaaagtgtagattgattttatcgctaaagtttttgagtttngaaacttccatttttacatcagagaagaagcctagacgcttaattttcttaatggattcatctagttcggtatttgagtacaagccgccttcgttaataccaatttcacgacggataacttcatcttgagttcgggtgttgccgacaatggtgatacgattaatatagacttttttattaagcgcgatgtcaatttctagatcaataatgtgtgagtcagtattttctttagtaattggattaattttagcaaaagcatagccttgatctgcaaacacatcggtgattgcctgaatactttcaataacttttttacgttcaaaaacgtcgttagtgttaatggttaacagctcttttaactcttcaacagactggttaagaaggtcacctgtaaagctgatagcgcctactttgtattcggcaccttcactaatttgaatgtcaatatcaatgttttgcttatcagttgatagntcagttncgattttgttaattttaaaatctaagtagcctgaattaacataaagagatttcatggcctcaacaccggcatctagcgcaacttttgaatagtggtctttttcagtaaaataattaataatgaaaaaatcagcttcaccaatttcgaataagtcaagcaaatcatcttcatcatgaatattgccacctgtaattttcattgaaccaattctagccacttcaccttcgtgaacatccagttcaataccaacacgattttgagcgtcagtctctatttttttagtgatttttataccgtaataacctttagaaacgtaagtagattctagttgctcaataagcttattgagctgacgtttattaaaaatcttaccttgagataagtccatattcttaaggatttgagtcagcctttcttcatcgataactttgtctgaataattaagaacatcaatatatttgatgtgtggattttcctgaagattgatttttaagatgctatccttttgagaaacctcaatatctttaaagaagttagttttgtacaaatctcgaataatctggccagaaacctgattgttataatcatctcctgtttcaaccggcaaatagctcaacacggttcctctagagatagagcttaggcctagtatttcaatgcttttaatggggtcagcaagtgctacagaagagctaataatgctggcagaaactaaaattttaagtagcgattttttcatagaatttataagattataataaacgtatcaagtcattatacagcgcaacaagggttaatgacaaaataacaaagagtccaaatttggcgaatatttgctgtatagagtcactcacaggtgagcctttgataatttcaagcacatagaagagtaaatgtccgccgtctagcaggggaatggggagtaaatttagcaggccaaggccaatactaattagcgctaaaaaagataagaaaggtatcaggccaacctctgcacttttaccggcataattagcaatactcaccggaccgctaatttgatccattgaagcctcgccaataatcatttttttgatcatttttaggtttaatactgttaattgataaaccttggatcctgcagaaataagcgcttcaatcggctctttttcaagcacaacttgccaatcttccaagtaattctcaggcaccanaacactgacaccagccttaggagagttgttgtacagctctggcgttagtgtcagcattaaagtggcgccattacgcttaatcagcagatcaataggtttaataggcttgacttgtatagcaacaacaaagtcctgccaagtgctaattttttgagcattggcgctaagcacctcatcattagaccttaatcctgctttgctggcggcagaattaggcacaacttgatcaataattgcaggtagtctaggcattgcaaatttaaaccctaaatagcgatcaagcccttgctccggattagctaaaaagtcatttgttaaattaagggtggttgttttaagattttcatgattagagcgggcttgtataactaaaggttgatcttcatctgcttgaatgaactgagtagaaaattcactaatactgggcgttggaatgttgttaatactaagtaactcatcacctgcttgtaagcccgcttgatcaaaaaatcctgattctgtaacagattcaacaattggcttaatgccacttacgccagcaataaagataaaggtataaagaataatggctagcaaaaagttggcaattggtcctgctgcaacaatggcaaatcgcttgtatacagattgcctgttaaaggcgcgatgcttttcatcatccgcaacttgcgcttcattttcatccagcattttaacaaaaccacccaaagggattgcgcacagggtgaattcagtttcaccccgttgaaaagatttgataactttgccaaatcctacagaaaatctaagtattttgacgttgaattttttagccacccaatagtggccatactcatggatggtaaccaaaataccaatagtgatggcaaatgataatagagcggttaaaaagcccatgtgagctatagctgagtgtgagaatgccccgcatctttaaggcgttttaagtaggttgtccacagagattcttgatttatagctagcttgtgcagatgtgaccatgaataaataccactatcatgtccatcactaaaaaatagaataatggcataattgcctgtaggtgtaatccgatcaatttttacattctctttatctagttgcaaggtttcttgaccagggccatgaccaaccacctctgctgaaggtgagtaaactcttaagaactcagcacttaatgggtagtcgataccctcaaaagtcaaagttaataggtttttgtctttattcagagtgatattacttggtgtttgcatgattttccttatggataaatataggcgatattttagcagaactatcgttttcattaacctttagctttataagtggataaaataaagcctatgttgataaattttacaaaaatgcacgggcttggaaacgactttatgatggtcgataatacaagtggtgacataaactttagcgccgaagtgattactaatttgtctgatcgacatttcggtgttggttttgatcagttactggttgttgagtcaagtatttctccaaatgttgattttcgctatattatttataatgcagatggatctgaagtgtcacaatgcgggaatggtgctcgctgttttgcgcgttttgtcacccaaaaaggcctgaccagtcataatcctattactgttgaaactcactcaagtgttattacattacacatcaatccagacagcaccgtgcgtgttgatatgggtaagccaaattttgaaccaagcagcattccactgattgaaccagaagttcagtcaacctatttcattgaaggatttgaaatgggtgttttgtctatgggcaaccctcactgtgttttaattgtagaagaattgtcaacgttggatgtgactagtatcgctacacaaattcaagcaagtgacaccttacctgatcaagctaatattggctttatgcaaattattaatcgtcaagaaataaggctacgagtttatgaacgtggctctggtgaaacgctggcttgtggcagtggtgcgtgtgca

SEQ ID NO: 670 - DNA, 4000 bp, Escherichia coli
  misc_feature (281)..(281): n is a, c, g, or t
  misc_feature (283)..(284): n is a, c, g, or t
  misc_feature (1985)..(1986): n is a, c, g, or t
  misc_feature (1992)..(1992): n is a, c, g, or t
  misc_feature (2020)..(2020): n is a, c, g, or t
  misc_feature (2116)..(2116): n is a, c, g, or t
  misc_feature (2132)..(2132): n is a, c, g, or t
  misc_feature (2134)..(2134): n is a, c, g, or t
  misc_feature (2137)..(2137): n is a, c, g, or t
  misc_feature (2143)..(2143): n is a, c, g, or t
  misc_feature (2146)..(2146): n is a, c, g, or t
  misc_feature (2158)..(2158): n is a, c, g, or t
  misc_feature (2161)..(2161): n is a, c, g, or t
  misc_feature (2164)..(2164): n is a, c, g, or t
  misc_feature (2170)..(2170): n is a, c, g, or t
  misc_feature (2175)..(2175): n is a, c, g, or t
  misc_feature (2181)..(2181): n is a, c, g, or t
  misc_feature (2195)..(2195): n is a, c, g, or t
  misc_feature (2197)..(2197): n is a, c, g, or t
  misc_feature (2200)..(2200): n is a, c, g, or t
  misc_feature (2206)..(2206): n is a, c, g, or t
  misc_feature (2212)..(2213): n is a, c, g, or t
  misc_feature (2218)..(2218): n is a, c, g, or t
  misc_feature (2221)..(2222): n is a, c, g, or t
  misc_feature (2224)..(2225): n is a, c, g, or t
  misc_feature (2227)..(2227): n is a, c, g, or t
  misc_feature (2229)..(2229): n is a, c, g, or t
  misc_feature (2232)..(2232): n is a, c, g, or t
  misc_feature (2234)..(2238): n is a, c, g, or t
  misc_feature (2240)..(2240): n is a, c, g, or t
  misc_feature (2244)..(2246): n is a, c, g, or t
  misc_feature (2248)..(2248): n is a, c, g, or t
  misc_feature (2251)..(2252): n is a, c, g, or t
  misc_feature (2254)..(2257): n is a, c, g, or t
  misc_feature (2259)..(2261): n is a, c, g, or t
  misc_feature (2263)..(2263): n is a, c, g, or t
  misc_feature (2265)..(2266): n is a, c, g, or t
  misc_feature (2268)..(2271): n is a, c, g, or t
  misc_feature (2273)..(2274): n is a, c, g, or t
  misc_feature (2276)..(2276): n is a, c, g, or t
  misc_feature (2278)..(2279): n is a, c, g, or t
  misc_feature (2283)..(2283): n is a, c, g, or t
  misc_feature (2285)..(2287): n is a, c, g, or t
  misc_feature (2289)..(2289): n is a, c, g, or t
  misc_feature (2291)..(2291): n is a, c, g, or t
  misc_feature (2293)..(2293): n is a, c, g, or t
  misc_feature (2296)..(2296): n is a, c, g, or t
  misc_feature (2298)..(2302): n is a, c, g, or t
  misc_feature (2304)..(2304): n is a, c, g, or t
  misc_feature (2307)..(2307): n is a, c, g, or t
  misc_feature (2315)..(2315): n is a, c, g, or t
  misc_feature (2317)..(2320): n is a, c, g, or t
  misc_feature (2323)..(2325): n is a, c, g, or t
  misc_feature (2327)..(2327): n is a, c, g, or t
  misc_feature (2329)..(2330): n is a, c, g, or t
  misc_feature (2332)..(2333): n is a, c, g, or t
  misc_feature (2335)..(2335): n is a, c, g, or t
  misc_feature (2338)..(2338): n is a, c, g, or t
  misc_feature (2341)..(2342): n is a, c, g, or t
  misc_feature (2344)..(2344): n is a, c, g, or t
  misc_feature (2346)..(2347): n is a, c, g, or t
  misc_feature (2349)..(2351): n is a, c, g, or t
  misc_feature (2353)..(2359): n is a, c, g, or t
  misc_feature (2363)..(2365): n is a, c, g, or t
  misc_feature (2367)..(2367): n is a, c, g, or t
  misc_feature (2369)..(2379): n is a, c, g, or t
  misc_feature (2381)..(2389): n is a, c, g, or t
  misc_feature (2392)..(2393): n is a, c, g, or t
  misc_feature (2395)..(2395): n is a, c, g, or t
  misc_feature (2397)..(2398): n is a, c, g, or t
  misc_feature (2403)..(2406): n is a, c, g, or t
  misc_feature (2620)..(2620): n is a, c, g, or t
  misc_feature (2744)..(2744): n is a, c, g, or t
  misc_feature (3126)..(3126): n is a, c, g, or t
  misc_feature (3556)..(3556): n is a, c, g, or t
  misc_feature (3690)..(3690): n is a, c, g, or t
  misc_feature (3715)..(3715): n is a, c, g, or t
  misc_feature (3735)..(3735): n is a, c, g, or t
  misc_feature (3757)..(3757): n is a, c, g, or t
  misc_feature (3760)..(3760): n is a, c, g, or t
  misc_feature (3766)..(3766): n is a, c, g, or t
  misc_feature (3769)..(3769): n is a, c, g, or t
  misc_feature (3772)..(3772): n is a, c, g, or t
  misc_feature (3774)..(3774): n is a, c, g, or t
  misc_feature (3780)..(3780): n is a, c, g, or t
  misc_feature (3784)..(3784): n is a, c, g, or t
  misc_feature (3789)..(3789): n is a, c, g, or t
  misc_feature (3796)..(3796): n is a, c, g, or t
  misc_feature (3799)..(3799): n is a, c, g, or t
  misc_feature (3818)..(3818): n is a, c, g, or t
  misc_feature (3829)..(3829): n is a, c, g, or t
  misc_feature (3844)..(3844): n is a, c, g, or t
  misc_feature (3851)..(3851): n is a, c, g, or t
  misc_feature (3863)..(3863): n is a, c, g, or t
  misc_feature (3877)..(3877): n is a, c, g, or t
  misc_feature (3880)..(3880): n is a, c, g, or t
  misc_feature (3893)..(3893): n is a, c, g, or t
  misc_feature (3907)..(3907): n is a, c, g, or t
  misc_feature (3919)..(3919): n is a, c, g, or t
  misc_feature (3921)..(3922): n is a, c, g, or t
  misc_feature (3928)..(3928): n is a, c, g, or t
  misc_feature (3940)..(3940): n is a, c, g, or t
  misc_feature (3942)..(3942): n is a, c, g, or t
  misc_feature (3948)..(3949): n is a, c, g, or t
  misc_feature (3964)..(3964): n is a, c, g, or t
  misc_feature (3968)..(3969): n is a, c, g, or t
atttagagcaattgaagcagcaatttccgtcagcggcgcggcgggccttggccgccagcgatcccgcagagcccgctaatctcagcgcggcccggctgggcgcgtttctaaagcgacaattgaatgcacgatcgctggctccacaaacgggcgcaagcacggatgcaatcttatcgcgcgcagaagcggctttgacctcgggcgacctatccgccgcattggcagaaattgcggatctgacgcccgcaccagcggcccaaatggcagcttggaaagcgctngnngagcagaaactggcgcgccagaacgcgctgctgtctttacgccggttgattgaagggtaagatagccattatgttaatttcactgacaaagattttattatttctggtcattgtggcggccttagcgcttggggttgcgtatctgatcgatgggcagaacctgatcctaggcaatgtgcaagccatcgtggcgggcacggaatatacgctcacaccgctgcaggcggtgcttgcgctctttttattcagcgttttggtttggattgggttgaaaatattcgggctgcttatcgccgttttgaaatttatcaatggcgatgaaaccgccgtcacgcgctatttctttcgcaaccgcgaacgcaaaggctaccaagcgctgtccgaggggttgctggcgctggcctcgggtgaaggcacgcttgccttgagcaaagcggtgaaagcagagcgctacctgaaccgccctgccttgaccaacgtgttggccgctcaggccgcagaattaaccggtgatcaacgtaaagcggaagagatttacaagcagctcattcaagaacccagcacccgctttgttggtattcgcggcattatgaaacaaaaattagccgatggaaaaaccgatatcgcgttgaaactcgcggaaaaggcttttgcgctgaagccaaagcacgttgaaacgcaagacacgcttttggcgctacaagcccaagcaaaagattggcagggcgcgcgccatacgcttggcgccaagctgaaacatggcgctttgccgcgcgatgttcataaacgccgggatgcggtgctggcgctttcgcaggccaaagacgtgctcgggcagggtcaaagcattgaggcccgcgaagccgcgattgaagccaaccgcctttctcccgatttggttcccgccgcggtgatggccgcgcgcagctatctagacgcggaaaagcccaaatatgccttaagggtgatcaagaaagcctggcaagcccaaccgcatccagatttggcgagtatcttcgccgaactggccccagaggaaacaccgcagcagcgcctcaagcggttttcagtgctggaaaaacttgccccagcgcatcgcgaaacgcggctggcgcttgccgaattgcacctatatgccgaggattttccagcagcaaaacgcgccgtgggcaccttgctagagaccgaagctgatgcaagagtgcttaccattatggcggcgattgaacgcggtcagggcagcccagacaaggtgatccgaggctggttaaccaaagccttggccgcgcagcgcggcccgcgctgggtctgcgatagctgtcatggggtcaacactgtttggtccgcaacctgccagcattgcgaagcctttgatacgttaagctggaggcccgcccccatagaggatctgagcacatcaaacggattggatatggtgcaacttttgatggctgaggcaaatcccgagacagctgaaggaggcaagccaaatccagagaaagcgttagatgttgacactccagcccctgaaagcgcggcaatcgagctatctgaacaagcccaagaaaagcctataaattgagctttgcctgatctgatatattcctgtaaaccgcttttagggccggtgtagctcagttggtagagcacgtcattcgtaatgatggggtcgtaggttcaagtcctatcaccggcaccatnnctcaanctaacgcattgtaatacctcactatttngactttgatagtgagccgtagaccatgctggcaaccaaatctaatagctataccttccaaaaagacggcgtctggtatttctcccgtcgagtaccngcagatttacggcggnantanagaacnggnaggatcgcctantcnttnagaacnaaatncatcanggatgctcgtgttngngcnatgagngatgcnnctaanttnnanngncnttngnnnnntntgannntntcnncnnnngnnntncnngnnnngnntntnntcgntnnngntntnaangnnnnncnaantgatctgnannnnaannngnannanntnagngcnncngnngnnntnnnnnnncgannnanannnnnnnnnnntnnnnnnnnnttnnangnngcagnnnntgtaactccgtcagagattacttatgatgaacaaagtttcattagaggtgttgcgggtttcacttccaagcctttgggcctgatgagagaagtgataacaaggcaagtgacagttaaagacctcagcgatgaacagctgtgcgaactcaacttacacctcgatttgaaagaagggttttatgaaattaaacgtagagaacttggatgcccttcnggcactgagcaaattttacgttacgacggcaaactattacacgatccaatagaattactgcgtgattttcaaaaatcgcagaagattgaaataccaatattcgaccttgcatcaaccaacctgnttagtgattgggatgaaacgaagaaaacttatcacttcttgaacccaaagcttgggggactcttgggcaggagtagtaagagagtttcgtattgtgcagactggatgccacaacttgggtcagtgccccctgatccttcaaaaaacctagacggaacaggatcctgggcaaatgacacgatccgggatggttttgtaatctgtcaggacggtattaaccggctgtatctgagggcattatcaaagaatgagagagttgccacacgaagcatccagcagttccaaaacgttgttgaaacttggattaaaaacgatggcggaaataaccttccttttagaccctatcactcacgatataatagaaaggctggaaaggccgaccnaaattttacatacctcataacaatctcaaaattgatggcgggagccgaacttttacaaagccaattcaactggacttttgaagaaaaaaaccaatatgcggcatgggtcaaagacagaattttacaacggcttccagttggtggtcgcatcgatatattaaaaaattcaatttgtgatttaaacgtagaaaaagataatatgaacgatgcttgcatgaatgcagccccgttcgtcgctcaggggcttctaagggcagcaatagctggcaatgatcaggaattagcagaattaagttacttagtttttaaacaatacagttcggcgcttcgaccagatggtagccaagcgtatgacagtataagagattgctatgccgctgattatacggtttgggcttcagaatttttacatgattatatatacttagcntccacagctggagttgatctttgggaagatcgcttttcaaaaaaacatggttctccaaaagaaaacatcgagtatgcacttcgagtagtgagtgatccaaatatcgttaatgagtatgcgcaagatttcggttntcccgattgtgaagaaaaccaaggncaaattgtacaaaaaatgtntaaatatccaaaatcagctttngcntactanttngananatttanaccngaaangctgganganatatacctagaaaataganataatctttantcgtacacgggtgcntctggcntaaactacgaantagatttggttggnaancgcccaccgcttnaagaccattttatnaaaaacgaagangnnattctnaaccaaagagcncnattttnngaaaaagctaaattngaanntcgaaaaatggtactgaaagaaaaaggtttt

SEQ ID NO: 671 - DNA, 4000 bp, Escherichia coli
  misc_feature (1)..(11): n is a, c, g, or t
  misc_feature (13)..(13): n is a, c, g, or t
  misc_feature (15)..(15): n is a, c, g, or t
  misc_feature (21)..(26): n is a, c, g, or t
  misc_feature (28)..(28): n is a, c, g, or t
  misc_feature (30)..(32): n is a, c, g, or t
  misc_feature (34)..(39): n is a, c, g, or t
  misc_feature (41)..(55): n is a, c, g, or t
  misc_feature (57)..(57): n is a, c, g, or t
  misc_feature (60)..(81): n is a, c, g, or t
  misc_feature (83)..(85): n is a, c, g, or t
  misc_feature (87)..(90): n is a, c, g, or t
  misc_feature (92)..(92): n is a, c, g, or t
  misc_feature (95)..(99): n is a, c, g, or t
  misc_feature (101)..(104): n is a, c, g, or t
  misc_feature (106)..(106): n is a, c, g, or t
  misc_feature (108)..(109): n is a, c, g, or t
  misc_feature (112)..(122): n is a, c, g, or t
  misc_feature (124)..(125): n is a, c, g, or t
  misc_feature (127)..(127): n is a, c, g, or t
  misc_feature (129)..(134): n is a, c, g, or t
  misc_feature (136)..(136): n is a, c, g, or t
  misc_feature (138)..(142): n is a, c, g, or t
  misc_feature (144)..(144): n is a, c, g, or t
  misc_feature (146)..(147): n is a, c, g, or t
  misc_feature (149)..(150): n is a, c, g, or t
  misc_feature (152)..(153): n is a, c, g, or t
  misc_feature (155)..(163): n is a, c, g, or t
  misc_feature (165)..(165): n is a, c, g, or t
  misc_feature (167)..(172): n is a, c, g, or t
  misc_feature (174)..(178): n is a, c, g, or t
  misc_feature (180)..(186): n is a, c, g, or t
  misc_feature (188)..(188): n is a, c, g, or t
  misc_feature (190)..(192): n is a, c, g, or t
  misc_feature (195)..(196): n is a, c, g, or t
  misc_feature (200)..(200): n is a, c, g, or t
  misc_feature (202)..(206): n is a, c, g, or t
  misc_feature (210)..(217): n is a, c, g, or t
  misc_feature (219)..(226): n is a, c, g, or t
  misc_feature (228)..(232): n is a, c, g, or t
  misc_feature (234)..(236): n is a, c, g, or t
  misc_feature (239)..(251): n is a, c, g, or t
  misc_feature (253)..(259): n is a, c, g, or t
  misc_feature (261)..(262): n is a, c, g, or t
  misc_feature (264)..(269): n is a, c, g, or t
  misc_feature (271)..(271): n is a, c, g, or t
  misc_feature (273)..(275): n is a, c, g, or t
  misc_feature (278)..(278): n is a, c, g, or t
  misc_feature (280)..(281): n is a, c, g, or t
  misc_feature (283)..(288): n is a, c, g, or t
  misc_feature (290)..(300): n is a, c, g, or t
  misc_feature (302)..(303): n is a, c, g, or t
  misc_feature (309)..(312): n is a, c, g, or t
  misc_feature (315)..(316): n is a, c, g, or t
  misc_feature (318)..(320): n is a, c, g, or t
  misc_feature (323)..(326): n is a, c, g, or t
  misc_feature (328)..(340): n is a, c, g, or t
  misc_feature (344)..(347): n is a, c, g, or t
  misc_feature (349)..(350): n is a, c, g, or t
  misc_feature (353)..(355): n is a, c, g, or t
  misc_feature (358)..(358): n is a, c, g, or t
  misc_feature (361)..(369): n is a, c, g, or t
  misc_feature (371)..(375): n is a, c, g, or t
  misc_feature (378)..(384): n is a, c, g, or t
  misc_feature (387)..(389): n is a, c, g, or t
  misc_feature (391)..(394): n is a, c, g, or t
  misc_feature (396)..(396): n is a, c, g, or t
  misc_feature (398)..(404): n is a, c, g, or t
  misc_feature (409)..(410): n is a, c, g, or t
  misc_feature (413)..(419): n is a, c, g, or t
  misc_feature (421)..(422): n is a, c, g, or t
  misc_feature (424)..(428): n is a, c, g, or t
  misc_feature (430)..(432): n is a, c, g, or t
  misc_feature (434)..(436): n is a, c, g, or t
  misc_feature (438)..(442): n is a, c, g, or t
  misc_feature (445)..(445): n is a, c, g, or t
  misc_feature (448)..(448): n is a, c, g, or t
  misc_feature (450)..(450): n is a, c, g, or t
  misc_feature (452)..(452): n is a, c, g, or t
  misc_feature (454)..(457): n is a, c, g, or t
  misc_feature (460)..(461): n is a, c, g, or t
  misc_feature (463)..(468): n is a, c, g, or t
  misc_feature (470)..(475): n is a, c, g, or t
  misc_feature (477)..(482): n is a, c, g, or t
  misc_feature (484)..(489): n is a, c, g, or t
  misc_feature (491)..(492): n is a, c, g, or t
  misc_feature (494)..(510): n is a, c, g, or t
  misc_feature (517)..(518): n is a, c, g, or t
  misc_feature (520)..(522): n is a, c, g, or t
  misc_feature (524)..(524): n is a, c, g, or t
  misc_feature (526)..(533): n is a, c, g, or t
  misc_feature (535)..(537): n is a, c, g, or t
  misc_feature (539)..(542): n is a, c, g, or t
  misc_feature (544)..(544): n is a, c, g, or t
  misc_feature (548)..(548): n is a, c, g, or t
  misc_feature (550)..(551): n is a, c, g, or t
  misc_feature (554)..(556): n is a, c, g, or t
  misc_feature (558)..(560): n is a, c, g, or t
  misc_feature (562)..(569): n is a, c, g, or t
  misc_feature (571)..(571): n is a, c, g, or t
  misc_feature (575)..(578): n is a, c, g, or t
  misc_feature (580)..(587): n is a, c, g, or t
  misc_feature (589)..(590): n is a, c, g, or t
  misc_feature (592)..(592): n is a, c, g, or t
  misc_feature (594)..(595): n is a, c, g, or t
  misc_feature (597)..(600): n is a, c, g, or t
  misc_feature (602)..(602): n is a, c, g, or t
  misc_feature (604)..(613): n is a, c, g, or t
  misc_feature (616)..(616): n is a, c, g, or t
  misc_feature (618)..(619): n is a, c, g, or t
  misc_feature (621)..(625): n is a, c, g, or t
  misc_feature (627)..(632): n is a, c, g, or t
  misc_feature (634)..(636): n is a, c, g, or t
  misc_feature (638)..(642): n is a, c, g, or t
  misc_feature (644)..(645): n is a, c, g, or t
  misc_feature (648)..(648): n is a, c, g, or t
  misc_feature (650)..(659): n is a, c, g, or t
  misc_feature (662)..(664): n is a, c, g, or t
  misc_feature (666)..(666): n is a, c, g, or t
  misc_feature (668)..(669): n is a, c, g, or t
  misc_feature (671)..(672): n is a, c, g, or t
  misc_feature (674)..(681): n is a, c, g, or t
  misc_feature (683)..(683): n is a, c, g, or t
  misc_feature (685)..(685): n is a, c, g, or t
  misc_feature (689)..(689): n is a, c, g, or t
  misc_feature (691)..(691): n is a, c, g, or t
  misc_feature (694)..(695): n is a, c, g, or t
  misc_feature (697)..(698): n is a, c, g, or t
  misc_feature (700)..(700): n is a, c, g, or t
  misc_feature (702)..(708): n is a, c, g, or t
  misc_feature (710)..(711): n is a, c, g, or t
  misc_feature (715)..(715): n is a, c, g, or t
  misc_feature (717)..(720): n is a, c, g, or t
  misc_feature (723)..(723): n is a, c, g, or t
  misc_feature (725)..(727): n is a, c, g, or t
  misc_feature (750)..(750): n is a, c, g, or t
  misc_feature (753)..(753): n is a, c, g, or t
  misc_feature (762)..(762): n is a, c, g, or t
  misc_feature (765)..(766): n is a, c, g, or t
  misc_feature (768)..(768): n is a, c, g, or t
  misc_feature (849)..(849): n is a, c, g, or t
  misc_feature (855)..(855): n is a, c, g, or t
  misc_feature (861)..(861): n is a, c, g, or t
  misc_feature (864)..(864): n is a, c, g, or t
  misc_feature (878)..(878): n is a, c, g, or t
  misc_feature (916)..(916): n is a, c, g, or t
  misc_feature (927)..(927): n is a, c, g, or t
  misc_feature (939)..(939): n is a, c, g, or t
  misc_feature (1988)..(1989): n is a, c, g, or t
nnnnnnnnnnncntnccttgnnnnnntncnnncnnnnnncnnnnnnnnnnnnnnnancannnnnnnnnnnnnnnnnnnnnncnnncnnnngncannnnngnnnntntnnctnnnnnnnnnnntnncnannnnnncngnnnnntncnngnncnnannnnnnnnnanannnnnnannnnnannnnnnnanannnaannaaanannnnntcannnnnnnnannnnnnnncnnnnngnnngannnnnnnnnnnnnannnnnnngnngnnnnnncnannnaanannannnnnnannnnnnnnnnnannatcatnnnngannannnggnnnncnnnnnnnnnnnnnacgnnnngnngannnccnccnnnnnnnnngnnnnnttnnnnnnnacnnncnnnncngnnnnnnncgccnncannnnnnncnncnnnnngnnngnnntnnnnnacnacnangngnnnngcnncnnnnnncnnnnnnannnnnngnnnnnngnngnnnnnnnnnnnnnnnnnatcatcnncnnngncnnnnnnnngnnnannnncnacancnnccnnntnnncnnnnnnnngntggnnnnannnnnnnncnnanannannnncngnnnnnnnnnntgntnntnnnnnannnnnnannngnnnnntnntgntnnnnnnnnnnacnnnanannannannnnnnnngnancacnanaanngnngncnnnnnnntnntttntnnnnaancnnnctcactccagcggcttgcggtanttngcttccagnacnncncgcagccccgtttccgggtaaagcaccttccctcccaaaagtatgaagggcaacacgcggttgttgcggtattcctgcaangtgcgncggctnacncggagcagttccgncacctcgccgtccgtcaggtaacgttccccgtccagcngaggacggtanctttccagaaangcggacagccatttcgagcctttgcgcatatcctgcaccacagaggctatcggctcgtcttccatcgtaaaaacatcgttgttctcgttcatcataacttcggattcagtgggtgaataaatcaaatcatctgccgtgcggatagagcgtgccgacaagcggtatcagccgcttcacctcctctggcttgtaatagaacctgcggtttatctgcgagtagccgataagccgcctgtcacgcagcgtctgcaacgtgcgcgggcttattctcaactgcccgcagacctcctcgcccgtgagccatctttccatgcgccccgtgtcgcttttgcgcctcagggcggcgaccttctccgagagtgcgccgaatgccgccaccatcatctcgaaagtctttttctcgatagatactatttccatattcatgtcatttagagtttgccgcaaaggtaacgaaacggcatacaagacgtatcgttttccgctgaaaggctgcctgttgcgccgtttgaccgggttacggagccatcttccgcaaaaatcttacgtgagtcacgtagtgagttgttaaagccccttttgtttattgccgaattttgtcgcagaaacaaaaagaaaggactgaacatgaaagtgataacaatggaaagttccgcctacaaggagatgatggcgcagattgcgaacatcgcagggtacatccgcgaggcaagggacgagaagaaacggaagcgggaaaccgaagacaagctgcttgacacggcacaggcggcgaagatgctcaacgtgagcaagcgcaccatgcagcgtatgcgcaccgaccaccgtatcgagtatgtggtggtacgcggaagctgccgctaccgcctttccgagatactgcggctattggaggacaacacagtaaggaacgaggaagggacaatagacaccctgttccacaaccacacgctgcgcacgggcggcaaaccaaaaggaaggaggacataggtcatggaactgctcacacgaaacaacttcgagggctggatgcagaagctgatggaacnncagcccactatcacggaaagcatccgccttttcgacaatcaggatttgtgcatgttgctccagataagcaaacgcaccctccaacgctaccgcagcgtaggcgcattgccctacaagacgctgggcaagaagacctattacagcgaggaggacgtgctgacattcctttccaaccatatcaaggacttcaaaaaggaagatatagccttctacaaggctcgtatccataatttctttcataaataacccattaaaacatttttcagatggcaaagaaaaaagacgaaaaggacgtgctggtagtccgtgacgagaagacaggcgagatcagcgtggtagccgggctgaacgcggacggcacacccaagcgcacccccgcaaaagcggagaacgcgcagagtttcctgcaattcgaccgacatggcgacgtgctggacaacttcttcaagaacttcttccggcagtgcaaggaacccagccgcttcggtttctaccgcattgcggcagaccaagctgaaaatctcttagaggtgatgaagcaactgctgaaagaccccgaagcgaacaaggagctgctcgcccctcacaaggtggacacctccgactatgagaagaaggtgcaggaagagatggcagcacaacagacagagaaacaagaacctcaaaaacaggagaacatggaacaacggaaagaacagcaacaggacaaatccgaacagatgcagggcaaacgtggctaccagcccatcgacgagagtaaaatcaactggcaggagctggaggacagatggggcgtaaagcgggacaaccttgaaaagtccggcgaccttacgaagatgctcaactatggcaagtccgacttggtaaaggtcaaaccgaccttcggcggcgaatcattcgagctggacgcccgcctctccttcaagaaggacggtgagggaaacatcagcctcgtgccgcacttcatccgcaaggagcagaagctggatgagtacaaggaacacaaattctccgacaatgaccggaagaacctccgcgaaacgggcaatctcggtagggtcgtggacattgtggacagggaaacgggcgagatcatcccctcctacatcagcatcgaccgcaagacgaatgaaatcacggacattccggcaagcagggtgcgcatcccggagcgcatcggcaagacggaaatcaccacgcaggagcgggacatgctccgcgccggactgcccgtacgcgacaagctcatcgagcgcaacgacggcagaaagttcgtcaccaccctgcaagtgaacgtggagcagcgcggcgtggagttcgtgccgggaaccggcaagtcgccccgtaccgcacagacacaggaaaccaaaggcgacacatcgaaaagtcaggcgcagggcggggaaaatgccgcacagaccaagaaggagcaacgccgcaacacgtggacgaacgaggacggcagcatccgccccatcagcaaatggagcggcgtgagcttcaccgaccagcagaaagccgactatgtggcgggtaaagccgtgaagctggagaacgtgaccgacaagcagggcttccatgccacgatgtatatcaagttcaacccggagaagggacgcccgtaccgctacgacacgaaccctgacaatgcacagcaggttgctccgtccaacgagagccgcacgcaggtggcggtgaacaacgatggcaagaccaacgaggctacaaagaatctgagagagccgttgcagaaaggtcagaccaacccgaaggacgcccgccagcaacagcagcaggagaagccgcagaagaaaacgggcaagggcatgaaaatgtaatcccgtgtccgccactgaatccaaaataaaatccaaagtatcaacaaaaaagaagaagacatgaagacaatcattgcagaaaagccctccgtggcacgtgaaatcgcccgcatcgtgggcgcgacaaagagagaggaaggatatttcgagggaggcggttatgccgtgacatg

SEQ ID NO: 672 - DNA, 4000 bp, Escherichia coli
  misc_feature (155)..(155): n is a, c, g, or t
  misc_feature (269)..(269): n is a, c, g, or t
  misc_feature (428)..(428): n is a, c, g, or t
  misc_feature (683)..(683): n is a, c, g, or t
  misc_feature (1788)..(1788): n is a, c, g, or t
  misc_feature (1994)..(1994): n is a, c, g, or t
  misc_feature (2000)..(2000): n is a, c, g, or t
  misc_feature (2374)..(2377): n is a, c, g, or t
  misc_feature (2397)..(2397): n is a, c, g, or t
  misc_feature (2414)..(2415): n is a, c, g, or t
  misc_feature (2417)..(2419): n is a, c, g, or t
  misc_feature (2423)..(2423): n is a, c, g, or t
  misc_feature (2425)..(2425): n is a, c, g, or t
  misc_feature (2429)..(2429): n is a, c, g, or t
  misc_feature (2434)..(2434): n is a, c, g, or t
  misc_feature (2437)..(2438): n is a, c, g, or t
  misc_feature (2440)..(2442): n is a, c, g, or t
  misc_feature (2444)..(2445): n is a, c, g, or t
  misc_feature (2447)..(2447): n is a, c, g, or t
  misc_feature (2451)..(2451): n is a, c, g, or t
  misc_feature (2454)..(2454): n is a, c, g, or t
  misc_feature (2456)..(2456): n is a, c, g, or t
  misc_feature (2459)..(2459): n is a, c, g, or t
  misc_feature (2462)..(2463): n is a, c, g, or t
  misc_feature (2466)..(2469): n is a, c, g, or t
  misc_feature (2472)..(2476): n is a, c, g, or t
  misc_feature (2479)..(2481): n is a, c, g, or t
  misc_feature (2483)..(2484): n is a, c, g, or t
  misc_feature (2489)..(2489): n is a, c, g, or t
  misc_feature (2491)..(2493): n is a, c, g, or t
  misc_feature (2495)..(2499): n is a, c, g, or t
  misc_feature (2501)..(2502): n is a, c, g, or t
  misc_feature (2504)..(2508): n is a, c, g, or t
  misc_feature (2510)..(2511): n is a, c, g, or t
  misc_feature (2513)..(2516): n is a, c, g, or t
  misc_feature (2518)..(2522): n is a, c, g, or t
  misc_feature (2524)..(2525): n is a, c, g, or t
  misc_feature (2529)..(2530): n is a, c, g, or t
  misc_feature (2532)..(2536): n is a, c, g, or t
  misc_feature (2538)..(2538): n is a, c, g, or t
  misc_feature (2541)..(2542): n is a, c, g, or t
  misc_feature (2551)..(2561): n is a, c, g, or t
  misc_feature (2563)..(2564): n is a, c, g, or t
  misc_feature (2569)..(2569): n is a, c, g, or t
  misc_feature (2573)..(2573): n is a, c, g, or t
  misc_feature (2575)..(2575): n is a, c, g, or t
  misc_feature (2577)..(2580): n is a, c, g, or t
  misc_feature (2584)..(2585): n is a, c, g, or t
  misc_feature (2588)..(2591): n is a, c, g, or t
  misc_feature (2595)..(2597): n is a, c, g, or t
  misc_feature (2600)..(2603): n is a, c, g, or t
  misc_feature (2605)..(2606): n is a, c, g, or t
  misc_feature (2608)..(2610): n is a, c, g, or t
  misc_feature (2612)..(2614): n is a, c, g, or t
  misc_feature (2616)..(2617): n is a, c, g, or t
  misc_feature (2620)..(2620): n is a, c, g, or t
  misc_feature (2622)..(2623): n is a, c, g, or t
  misc_feature (2625)..(2625): n is a, c, g, or t
  misc_feature (2630)..(2632): n is a, c, g, or t
  misc_feature (2634)..(2636): n is a, c, g, or t
  misc_feature (2640)..(2642): n is a, c, g, or t
  misc_feature (2647)..(2647): n is a, c, g, or t
  misc_feature (2649)..(2652): n is a, c, g, or t
  misc_feature (2657)..(2658): n is a, c, g, or t
  misc_feature (2660)..(2660): n is a, c, g, or t
  misc_feature (2662)..(2664): n is a, c, g, or t
  misc_feature (2669)..(2669): n is a, c, g, or t
  misc_feature (2671)..(2671): n is a, c, g, or t
  misc_feature (2674)..(2674): n is a, c, g, or t
  misc_feature (2679)..(2680): n is a, c, g, or t
  misc_feature (2682)..(2686): n is a, c, g, or t
  misc_feature (2688)..(2688): n is a, c, g, or t
  misc_feature (2691)..(2691): n is a, c, g, or t
  misc_feature (2693)..(2693): n is a, c, g, or t
  misc_feature (2697)..(2697): n is a, c, g, or t
  misc_feature (2700)..(2702): n is a, c, g, or t
  misc_feature (2704)..(2704): n is a, c, g, or t
  misc_feature (2706)..(2707): n is a, c, g, or t
  misc_feature (2709)..(2710): n is a, c, g, or t
  misc_feature (2712)..(2713): n is a, c, g, or t
  misc_feature (2715)..(2715): n is a, c, g, or t
  misc_feature (2717)..(2717): n is a, c, g, or t
  misc_feature (2719)..(2719): n is a, c, g, or t
  misc_feature (2722)..(2726): n is a, c, g, or t
  misc_feature (2728)..(2728): n is a, c, g, or t
  misc_feature (2731)..(2732): n is a, c, g, or t
  misc_feature (2735)..(2735): n is a, c, g, or t
  misc_feature (2741)..(2741): n is a, c, g, or t
  misc_feature (2743)..(2744): n is a, c, g, or t
  misc_feature (2746)..(2750): n is a, c, g, or t
  misc_feature (2753)..(2755): n is a, c, g, or t
  misc_feature (2757)..(2758): n is a, c, g, or t
  misc_feature (2762)..(2765): n is a, c, g, or t
  misc_feature (2769)..(2769): n is a, c, g, or t
  misc_feature (2773)..(2773): n is a, c, g, or t
  misc_feature (2775)..(2777): n is a, c, g, or t
  misc_feature (2779)..(2779): n is a, c, g, or t
  misc_feature (2785)..(2787): n is a, c, g, or t
  misc_feature (2791)..(2791): n is a, c, g, or t
  misc_feature (2797)..(2798): n is a, c, g, or t
  misc_feature (2800)..(2801): n is a, c, g, or t
  misc_feature (2803)..(2813): n is a, c, g, or t
  misc_feature (2820)..(2820): n is a, c, g, or t
  misc_feature (2822)..(2823): n is a, c, g, or t
  misc_feature (2827)..(2833): n is a, c, g, or t
  misc_feature (2835)..(2835): n is a, c, g, or t
  misc_feature (2839)..(2839): n is a, c, g, or t
  misc_feature (2842)..(2843): n is a, c, g, or t
  misc_feature (2845)..(2845): n is a, c, g, or t
  misc_feature (2849)..(2851): n is a, c, g, or t
  misc_feature (2857)..(2857): n is a, c, g, or t
  misc_feature (2860)..(2860): n is a, c, g, or t
  misc_feature (2864)..(2865): n is a, c, g, or t
  misc_feature (2867)..(2867): n is a, c, g, or t
  misc_feature (2869)..(2870): n is a, c, g, or t
  misc_feature (2873)..(2873): n is a, c, g, or t
  misc_feature (2875)..(2876): n is a, c, g, or t
  misc_feature (2879)..(2879): n is a, c, g, or t
  misc_feature (2884)..(2884): n is a, c, g, or t
  misc_feature (2886)..(2889): n is a, c, g, or t
  misc_feature (2891)..(2892): n is a, c, g, or t
  misc_feature (2896)..(2900): n is a, c, g, or t
  misc_feature (2902)..(2909): n is a, c, g, or t
  misc_feature (2913)..(2920): n is a, c, g, or t
  misc_feature (2922)..(2922): n is a, c, g, or t
  misc_feature (2924)..(2924): n is a, c, g, or t
  misc_feature (2926)..(2929): n is a, c, g, or t
  misc_feature (2931)..(2932): n is a, c, g, or t
  misc_feature (2934)..(2937): n is a, c, g, or t
  misc_feature (2939)..(2944): n is a, c, g, or t
  misc_feature (2946)..(2946): n is a, c, g, or t
  misc_feature (2948)..(2949): n is a, c, g, or t
  misc_feature (2951)..(2951): n is a, c, g, or t
  misc_feature (2954)..(2958): n is a, c, g, or t
  misc_feature (2960)..(2968): n is a, c, g, or t
  misc_feature (2970)..(2974): n is a, c, g, or t
  misc_feature (2976)..(2977): n is a, c, g, or t
  misc_feature (2979)..(2980): n is a, c, g, or t
  misc_feature (2983)..(2985): n is a, c, g, or t
  misc_feature (2987)..(2992): n is a, c, g, or t
  misc_feature (2994)..(2999): n is a, c, g, or t
  misc_feature (3002)..(3007): n is a, c, g, or t
  misc_feature (3009)..(3012): n is a, c, g, or t
  misc_feature (3016)..(3016): n is a, c, g, or t
  misc_feature (3018)..(3022): n is a, c, g, or t
  misc_feature (3025)..(3025): n is a, c, g, or t
  misc_feature (3027)..(3029): n is a, c, g, or t
  misc_feature (3031)..(3031): n is a, c, g, or t
  misc_feature (3033)..(3034): n is a, c, g, or t
  misc_feature (3037)..(3039): n is a, c, g, or t
  misc_feature (3041)..(3044): n is a, c, g, or t
  misc_feature (3046)..(3046): n is a, c, g, or t
  misc_feature (3048)..(3050): n is a, c, g, or t
  misc_feature (3053)..(3056): n is a, c, g, or t
  misc_feature (3058)..(3058): n is a, c, g, or t
  misc_feature (3061)..(3061): n is a, c, g, or t
  misc_feature (3063)..(3065): n is a, c, g, or t
  misc_feature (3068)..(3068): n is a, c, g, or t
  misc_feature (3070)..(3070): n is a, c, g, or t
  misc_feature (3072)..(3078): n is a, c, g, or t
  misc_feature (3081)..(3083): n is a, c, g, or t
  misc_feature (3085)..(3085): n is a, c, g, or t
  misc_feature (3087)..(3087): n is a, c, g, or t
  misc_feature (3089)..(3089): n is a, c, g, or t
  misc_feature (3091)..(3092): n is a, c, g, or t
  misc_feature (3094)..(3097): n is a, c, g, or t
  misc_feature (3099)..(3099): n is a, c, g, or t
  misc_feature (3101)..(3105): n is a, c, g, or t
  misc_feature (3109)..(3109): n is a, c, g, or t
  misc_feature (3111)..(3112): n is a, c, g, or t
  misc_feature (3114)..(3116): n is a, c, g, or t
  misc_feature (3118)..(3118): n is a, c, g, or t
  misc_feature (3123)..(3123): n is a, c, g, or t
  misc_feature (3125)..(3125): n is a, c, g, or t
  misc_feature (3127)..(3133): n is a, c, g, or t
  misc_feature (3135)..(3138): n is a, c, g, or t
  misc_feature (3140)..(3140): n is a, c, g, or t
  misc_feature (3142)..(3142): n is a, c, g, or t
  misc_feature (3144)..(3144): n is a, c, g, or t
  misc_feature (3146)..(3149): n is a, c, g, or t
  misc_feature (3151)..(3153): n is a, c, g, or t
  misc_feature (3155)..(3155): n is a, c, g, or t
  misc_feature (3157)..(3159): n is a, c, g, or t
  misc_feature (3161)..(3164): n is a, c, g, or t
  misc_feature (3167)..(3169): n is a, c, g, or t
  misc_feature (3171)..(3171): n is a, c, g, or t
  misc_feature (3174)..(3174): n is a, c, g, or t
  misc_feature (3177)..(3177): n is a, c, g, or t
  misc_feature (3179)..(3185): n is a, c, g, or t
  misc_feature (3187)..(3187): n is a, c, g, or t
  misc_feature (3189)..(3210): n is a, c, g, or t
  misc_feature (3212)..(3212): n is a, c, g, or t
  misc_feature (3214)..(3214): n is a, c, g, or t
  misc_feature (3216)..(3221): n is a, c, g, or t
  misc_feature (3223)..(3227): n is a, c, g, or t
  misc_feature (3229)..(3230): n is a, c, g, or t
  misc_feature (3232)..(3232): n is a, c, g, or t
  misc_feature (3234)..(3236): n is a, c, g, or t
  misc_feature (3238)..(3238): n is a, c, g, or t
  misc_feature (3240)..(3240): n is a, c, g, or t
  misc_feature (3243)..(3243): n is a, c, g, or t
  misc_feature (3245)..(3252): n is a, c, g, or t
  misc_feature (3254)..(3255): n is a, c, g, or t
  misc_feature (3257)..(3257): n is a, c, g, or t
  misc_feature (3259)..(3259): n is a, c, g, or t
  misc_feature (3261)..(3261): n is a, c, g, or t
  misc_feature (3264)..(3269): n is a, c, g, or t
  misc_feature (3271)..(3274): n is a, c, g, or t
  misc_feature (3276)..(3277): n is a, c, g, or t
  misc_feature (3279)..(3279): n is a, c, g, or t
  misc_feature (3281)..(3281): n is a, c, g, or t
  misc_feature (3283)..(3284): n is a, c, g, or t
  misc_feature (3287)..(3287): n is a, c, g, or t
  misc_feature (3289)..(3290): n is a, c, g, or t
  misc_feature (3293)..(3296): n is a, c, g, or t
  misc_feature (3298)..(3302): n is a, c, g, or t
  misc_feature (3304)..(3307): n is a, c, g, or t
  misc_feature (3309)..(3309): n is a, c, g, or t
  misc_feature (3311)..(3312): n is a, c, g, or t
  misc_feature (3315)..(3315): n is a, c, g, or t
  misc_feature (3319)..(3321): n is a, c, g, or t
  misc_feature (3323)..(3324): n is a, c, g, or t
  misc_feature (3326)..(3330): n is a, c, g, or t
  misc_feature (3333)..(3333): n is a, c, g, or t
  misc_feature (3335)..(3336): n is a, c, g, or t
  misc_feature (3338)..(3340): n is a, c, g, or t
  misc_feature (3342)..(3343): n is a, c, g, or t
  misc_feature (3345)..(3349): n is a, c, g, or t
  misc_feature (3351)..(3353): n is a, c, g, or t
  misc_feature (3356)..(3358): n is a, c, g, or t
  misc_feature (3360)..(3365): n is a, c, g, or t
  misc_feature (3367)..(3368): n is a, c, g, or t
  misc_feature (3370)..(3370): n is a, c, g, or t
  misc_feature (3372)..(3374): n is a, c, g, or t
  misc_feature (3377)..(3378): n is a, c, g, or t
  misc_feature (3380)..(3383): n is a, c, g, or t
  misc_feature (3386)..(3387): n is a, c, g, or t
  misc_feature (3389)..(3394): n is a, c, g, or t
  misc_feature (3396)..(3397): n is a, c, g, or t
  misc_feature (3400)..(3401): n is a, c, g, or t
  misc_feature (3403)..(3409): n is a, c, g, or t
  misc_feature (3411)..(3417): n is a, c, g, or t
  misc_feature (3419)..(3423): n is a, c, g, or t
  misc_feature (3426)..(3426): n is a, c, g, or t
  misc_feature (3429)..(3430): n is a, c, g, or t
  misc_feature (3433)..(3433): n is a, c, g, or t
  misc_feature (3435)..(3439): n is a, c, g, or t
  misc_feature (3442)..(3443): n is a, c, g, or t
  misc_feature (3445)..(3445): n is a, c, g, or t
  misc_feature (3447)..(3451): n is a, c, g, or t
  misc_feature (3453)..(3453): n is a, c, g, or t
  misc_feature (3455)..(3456): n is a, c, g, or t
  misc_feature (3459)..(3461): n is a, c, g, or t
  misc_feature (3463)..(3486): n is a, c, g, or t
  misc_feature (3488)..(3489): n is a, c, g, or t
  misc_feature (3493)..(3495): n is a, c, g, or t
  misc_feature (3498)..(3498): n is a, c, g, or t
  misc_feature (3500)..(3502): n is a, c, g, or t
  misc_feature (3504)..(3507): n is a, c, g, or t
  misc_feature (3511)..(3512): n is a, c, g, or t
  misc_feature (3514)..(3514): n is a, c, g, or t
  misc_feature (3517)..(3518): n is a, c, g, or t
  misc_feature (3522)..(3524): n is a, c, g, or t
  misc_feature (3529)..(3529): n is a, c, g, or t
  misc_feature (3531)..(3532): n is a, c, g, or t
  misc_feature (3534)..(3538): n is a, c, g, or t
  misc_feature (3540)..(3542): n is a, c, g, or t
  misc_feature (3544)..(3544): n is a, c, g, or t
  misc_feature (3546)..(3550): n is a, c, g, or t
  misc_feature (3552)..(3553): n is a, c, g, or t
  misc_feature (3555)..(3556): n is a, c, g, or t
  misc_feature (3558)..(3560): n is a, c, g, or t
  misc_feature (3562)..(3562): n is a, c, g, or t
  misc_feature (3564)..(3564): n is a, c, g, or t
  misc_feature (3566)..(3567): n is a, c, g, or t
  misc_feature (3570)..(3570): n is a, c, g, or t
  misc_feature (3574)..(3577): n is a, c, g, or t
  misc_feature (3579)..(3582): n is a, c, g, or t
  misc_feature (3584)..(3589): n is a, c, g, or t
  misc_feature (3591)..(3592): n is a, c, g, or t
  misc_feature (3594)..(3594): n is a, c, g, or t
  misc_feature (3596)..(3604): n is a, c, g, or t
  misc_feature (3607)..(3608): n is a, c, g, or t
  misc_feature (3610)..(3610): n is a, c, g, or t
  misc_feature (3612)..(3612): n is a, c, g, or t
  misc_feature (3615)..(3615): n is a, c, g, or t
  misc_feature (3617)..(3617): n is a, c, g, or t
  misc_feature (3619)..(3620): n is a, c, g, or t
  misc_feature (3623)..(3624): n is a, c, g, or t
  misc_feature (3626)..(3627): n is a, c, g, or t
  misc_feature (3629)..(3631): n is a, c, g, or t
  misc_feature (3633)..(3634): n is a, c, g, or t
  misc_feature (3636)..(3636): n is a, c, g, or t
  misc_feature (3639)..(3640): n is a, c, g, or t
  misc_feature (3642)..(3651): n is a, c, g, or t
  misc_feature (3653)..(3656): n is a, c, g, or t
  misc_feature (3658)..(3658): n is a, c, g, or t
  misc_feature (3663)..(3663): n is a, c, g, or t
  misc_feature (3665)..(3668): n is a, c, g, or t
  misc_feature (3670)..(3674): n is a, c, g, or t
  misc_feature (3677)..(3683): n is a, c, g, or t
  misc_feature (3685)..(3686): n is a, c, g, or t
  misc_feature (3688)..(3689): n is a, c, g, or t
  misc_feature (3691)..(3694): n is a, c, g, or t
  misc_feature (3697)..(3702): n is a, c, g, or t
  misc_feature (3705)..(3708): n is a, c, g, or t
  misc_feature (3710)..(3711): n is a, c, g, or t
  misc_feature (3714)..(3719): n is a, c, g, or t
  misc_feature (3722)..(3722): n is a, c, g, or t
  misc_feature (3724)..(3724): n is a, c, g, or t
  misc_feature (3726)..(3727): n is a, c, g, or t
  misc_feature (3729)..(3730): n is a, c, g, or t
  misc_feature (3733)..(3735): n is a, c, g, or t
  misc_feature (3739)..(3739): n is a, c, g, or t
  misc_feature (3743)..(3744): n is a, c, g, or t
  misc_feature (3747)..(3747): n is a, c, g, or t
  misc_feature (3749)..(3749): n is a, c, g, or t
  misc_feature (3753)..(3753): n is a, c, g, or t
  misc_feature (3755)..(3756): n is a, c, g, or t
  misc_feature (3763)..(3767): n is a, c, g, or t
  misc_feature (3770)..(3771): n is a, c, g, or t
  misc_feature (3773)..(3774): n is a, c, g, or t
  misc_feature (3776)..(3782): n is a, c, g, or t
  misc_feature (3784)..(3785): n is a, c, g, or t
  misc_feature (3788)..(3790): n is a, c, g, or t
  misc_feature (3792)..(3793): n is a, c, g, or t
  misc_feature (3797)..(3799): n is a, c, g, or t
  misc_feature (3803)..(3815): n is a, c, g, or t
  misc_feature (3817)..(3817): n is a, c, g, or t
  misc_feature (3819)..(3823): n is a, c, g, or t
  misc_feature (3825)..(3827): n is a, c, g, or t
  misc_feature (3830)..(3831): n is a, c, g, or t
  misc_feature (3833)..(3833): n is a, c, g, or t
  misc_feature (3835)..(3840): n is a, c, g, or t
  misc_feature (3842)..(3851): n is a, c, g, or t
  misc_feature (3853)..(3853): n is a, c, g, or t
  misc_feature (3856)..(3856): n is a, c, g, or t
  misc_feature (3858)..(3861): n is a, c, g, or t
  misc_feature (3863)..(3864): n is a, c, g, or t
  misc_feature (3866)..(3866): n is a, c, g, or t
  misc_feature (3870)..(3872): n is a, c, g, or t
  misc_feature (3875)..(3881): n is a, c, g, or t
  misc_feature (3883)..(3886): n is a, c, g, or t
  misc_feature (3888)..(3889): n is a, c, g, or t
  misc_feature (3891)..(3891): n is a, c, g, or t
  misc_feature (3893)..(3893): n is a, c, g, or t
  misc_feature (3895)..(3895): n is a, c, g, or t
  misc_feature (3897)..(3899): n is a, c, g, or t
  misc_feature (3901)..(3902): n is a, c, g, or t
  misc_feature (3905)..(3905): n is a, c, g, or t
  misc_feature (3907)..(3910): n is a, c, g, or t
  misc_feature (3913)..(3913): n is a, c, g, or t
  misc_feature (3915)..(3915): n is a, c, g, or t
  misc_feature (3917)..(3918): n is a, c, g, or t
  misc_feature (3920)..(3922): n is a, c, g, or t
  misc_feature (3924)..(3924): n is a, c, g, or t
  misc_feature (3927)..(3927): n is a, c, g, or t
  misc_feature (3929)..(3929): n is a, c, g, or t
  misc_feature (3935)..(3935): n is a, c, g, or t
  misc_feature (3938)..(3939): n is a, c, g, or t
  misc_feature (3941)..(3943): n is a, c, g, or t
  misc_feature (3946)..(3954): n is a, c, g, or t
  misc_feature (3956)..(3957): n is a, c, g, or t
  misc_feature (3959)..(3959): n is a, c, g, or t
  misc_feature (3961)..(3963): n is a, c, g, or t
  misc_feature (3966)..(3966): n is a, c, g, or t
  misc_feature (3968)..(3968): n is a, c, g, or t
  misc_feature (3970)..(3971): n is a, c, g, or t
  misc_feature (3973)..(3973): n is a, c, g, or t
  misc_feature (3975)..(3977): n is a, c, g, or t
  misc_feature (3979)..(3980): n is a, c, g, or t
  misc_feature (3985)..(3985): n is a, c, g, or t
  misc_feature (3989)..(3995): n is a, c, g, or t
  misc_feature (3997)..(3999): n is a, c, g, or t
acaatatttatatgatacagataaagtgttttgtgttcaatatgatagaagaaaatacctatatagtatgggacgacagtctggaatgtgtaatcattgactgtggtgctttctatgaagaagaacgccaaacaatagtgaatttcataaaaganaaccatcttaaacccgtacatttgctgacaacgcatgcacatttggaccataatttcggcataaacaccattaacgatacgttcggactgttgccagaggtgtctgaaaaagangctcctgctttgcgttcgctcaaagaacaggcgcaaaatatgtttggaatgcagctaaactacgacttcccacctgttgaacacacctttaacgctggcgaaataataaagtttgggcatcacgaactaacggttatagagtgcccaggacacaccccnggtggtgtaacattctattgtaaagacgaaaaagtggcatttacaggcgatactctcttccgtggtagtgtaggaagaaccgactttgcgggcggtagtatgtttcagctgattagtagtttacgagagttatcgcagcttcccgacgatactgtgctttacccagggcatggagagcaaacaacaatgggctacgaactggcgcataatccgtatatggatagatagaaatatgacaacagcgcagcaaaatcngtctaaaatcatattaggcatagaccctggtactaatgttatgggctatggcgttatccgtgtacacggtaataaggctgaaatggtggtgatgggagttatagatatgcgcagagagaaagacgtttatctacgtttaggtaaagtttttgaacgcgttacaagtataatagaaacttatttacccgatgaaatggctatagaagctcccttctttggtaagaacatacaatctatgttgaagttagggcgagcacaaggggtggctattgcagccgcaatacaacgcgatgtgcccatacacgaatatgccccattgaaaataaaaatggcaataacaggcaatggttctgcttctaaagaccaagttgcgggtatgttgcaacgtttgttgcacttgcaagacagcgaaatgccgcaatttatggacgcaaccgatgctctgggtgctgcctattgccactttctgcagtctaatcgtcctaattcagatgctaaacactatggatcgtggaaagattttgcacttaaaaacaagtcgcgcattagtaataaataacataaaactctataaaaaataagcgttttgtacggttttaagttataagagttgtacttttgcacaaagataggtataattagtaaatataaataacactatttctacattgttgaatagcaattaagacgatgcgaaagcaagaacaaacattataagatagttaaaataaatagtattaaacaataacgataacaattaaactcaataacaatgatgaattttaaaaaggtaactatggcacttgtagccatcttgtttacagccactgcttatgctcaaacaccacaacgcgtatacgaccagatttatagaagttcatataaagtggcttcagataagtctgaagataccgagattcgtaagatagcatcgtttagagtagacgcaatatcttacttaaaaaccaagacgctggaagcattgtctgtttccgacaaggaattaacgggtaaagaagtagcccatctgaatgcacagttagactcaatggcatattatatgtacgacttcgtgaacctttatctaaagaattatgcgaaggcnggtaccgataaagacaaaaaccgcataaaaaagatattccgcgatgctagtataaacaacccattgtatggcgataaggacgacgaagtggtattagcatactacaatcgtgaggattatcctacgcaattctccctcgataccaattggattgctgcactcgaagaggtgaaaagagagttaaagtaatactttaagtatcttancaaaanatttaaagacttataatatacaactatcaataagtcgtttcttaatatacagcggacgcttctaacagcgtccgcacatcgaaaaacatacattaaaccaactatattcgtgtaaacaatttgttgtgatactgtttgttacaacattccattaagtttctacttttgtttacaataatagctccagaccatacatatagtcctctcgcataaccataaatgcaagtttagtagaaacgaagttggaaggttataaacagtgcttatttgtttattctcaataagatagaacatcttagatatttagaaaaatctgctaaatacagttactttcttttcagatatctatcacgcttgtttcagatatctgtcannnncgtttcagatatctgtcagnaacgtttcagatatcanncnnnatcntnacanatatnatnnannnanncnacanatnanatntannatnnnnacnnnnnaannntnnaattnannnannnnnannannnnntnnannnnannnnntnntttnntnnnnnantanntataatttnnnnnnnnnnnanntgttntttntncnnnnaatnnatnnnntttnnnctnnnnanncnnntnnntnntantnntnattcnnntnnntttnnnttttnannnnaatanntntnnnttttnanacnaatanntnnnnntnttnanaaanatnnntntnnanntnnanananatnnnnntnttnntanatatananntnnnnnaannnanntatnnnngtanaaanannnanatatannngtanaaaaanngnnannnnnnnnnnnaaaaaangnnaatnnnnnnnanaaanaannanaatnnnataatnaanaaanngnanncanannatnaaaanannnntnnctannnnntnnnnnnnnatannnnnnnntntnannnngnntnnnncnnnnnntntnncngcnnnnncnnnnnnnnntnnnnncnnanntcnnntnnnnnnannnnnnaannnnnntnnnnatangnnnnnaanannntntnnatnnnannnnantnnngtnnnnanaanannntananannnnnnnatnnnantntnanngnnnnanannnnnactntnntnnngngaaanangnnnnnnntnnnngnananannnntnnntntnnntnnnnaannncnacnatntnnnnnnnanannnnnnnnnnnnnnnnnnnnnnanangnnnnnnannnnntnncnannngncnacnannnnnnnncnnanangntannnnnngnnnncnnanangnnacnanntannnncnnnnnannnncnanntanccannnannannnnnaancnntnnncnnannnnncnnnaannntnnnnnnanngncnnnaannannnnggnnannnnnncnnaannannnnnnnannnnnnntnnnnnaantcnnaanannnnntgnnanannnnnananntannntnnnnnnnnnnnnnnnnnnnnnnnnannagtnnncancnnncnnnncaanngncannaacnnnctttntnngnnnnnannncncnnnnntnngnncnnnanancnngcntttnnnngnnnnannnnnngnntnannnnnnnnnaanncnangcnantnnaannannannnanngnttnntnnnnnnnnnntnnnngntaagntnnnnannnnnggnnnnnnngnngnncnnnnagnnnnnnttnnnnanntcnnnnnnggngntnngnnagnnnaaanaggnnttncngcancnncaaaaannnnnganngnnannnnnnnannggnnntnngacnnncaannnnnnnnnnnnngncnnnnnannnacnngngnnnnnncnnnnnnnnnncnggntnnnncnncngaannnacnnnnnnncnnnncnnananancnnngnngcnannnnganananncnnnangcnanggcganaanncnnnaannnnnnnnntnnangnnnganangnnanannnanncaggngaannnnnnnannnt

SEQ ID NO: 673 - DNA, 4000 bp, Escherichia coli
  misc_feature (1993)..(1993): n is a, c, g, or t
cgaaatgagggcggggacctgctgcgcctcccggtcctgctgccgggccagaaggtctggctccgcgcctggcaggtccaggtcggtcgcgtggtgctctacctcctggacagcaacgacccggccaacccgcctgcgatccgcggcatcgccagcgagctgtacggaggcggagcggagctgcggctgcagcaggagctcctgctcgggatcgggggctggcggttgctgcgagcgctccggctcgagcccgaggtctgccatctcaacgaggggcacgcggccttcgccgtgctggagcgcgcccggagcttcatggaggacaccgggcacccgttcgacgtggcgctggcggtcacccgtgcgggaaacgtcttcaccacccacaccccggtcccggcgggcttcgaccgcttctccccgaccctcatcgagcgctttcatcgggagtacgccgaggagcaccttggcgtctcgctgcgcgacctgctggcgctcggccgggagaatccggacgacccgaatgaacccttcaacatggcgtatctcgccatcaggggcagcggcgcggtcaacggcgtgagccgcctgcatggccaggtgagccggcgcatcttccagtcgctctttcctcgttggccggacatcgaggttccggtcgcctatgtcaccaacggcgtgcacaccccgtcatgggagtccgcggcggccagcgcgctgtggacgaagacctgcggcgccgagcggtggcgccaaactctgacgacgatcgagcgggacgttgcgcgcgcgtccgacggcgagctgtgggccctgcggaccgccgcgcgcaaggtcctcgtcgactacgcccgggagcgcatcgcgcagcaggtcgcctccatgggcttaccaccggacgaggcatcggcggtcggcgtgggcctggaccccgccgtgctcacgctcggattcgcgcggcggttcgccacctacaagcgtcccaaccagttgctccacgatccggcccggctgctccggatcctgacgaacgcggagcgcccggtccagctcgtcatcgcgggaaaggcgcatccggccgatcgcctcgggcaggagctgatccggacgtggatccagttcattcgtcgccccgaggtgcgcgaacgggtgatcttcatcgcggactacgacttgctcctggccgagcacttcgtgcggggcgttgatgtgtggatgaacacgccacggcggccctgggaagccagtggaacgagtgggatgaaagtgcttgtcaacggcggcctgaatctctcggagctcgacggttggtgggccgaggcgtacgagcctgatgtcggctgggccctgggggacggccaggagcatggcgacgatccgacctgggacgctgccgaggccgaggccctgtacgcgctgctcgagcgtgacgtcgtgcccgccttttacacgcgagacgcgcgcgggattccgcaagcctggatcgcgaagatgcgcgcgagcatggctcgcctcaccccgcggttctcgacgaaccgcgtggtacgggagtacacggacacgtattacgtgccggcgtcggcgcgctaccgggcgcgggccgccgacaaagccgcgctcgggacgcagctcgtgggctggacgcgcgatctcgcccagcactggcccgacgggcggttcggcgcggtccgcgcggccacggagggaacccggcaccacatcagcgtcgaggtctacctcggtcgcctcgacccagaggctgtccgcgtcgagctgtacgccgaagcggcgaatggcttggagccggagcgccacgccatggcgcgtggccggaagctcgacgggccgagccatggctacgagtacgatgtgagggttcctgccgtgcgagcgaccgacgactacacgccgcggctcctcccataccaccccgccgccgtggtgcccctcgaagcccacgagatcctctggcagcggtgaacggcgaacgacnggactgagacatggcgatttcgccgctcgcgggcaagccggctcccagggagatgctggtcgacctggcccggctcgaagcgaagtactacgagcacaagccggacgtgggaaacccagaggagcgtgtcagcttcggcaccagcgggcaccggggctcttcgctgcgcggctcgttcaccgaggcgcacatcctggccatcacccaggccatctgcgactaccggcggagccagggcaccgatggtccgctctacatgggcaaggacacgcacgcgctgtcccgtccggccgagcggacggcgctcgaagtcctggcggccaacgacgtggacaccatcatccagcgcgacgatggcgtgacgcccacgccggtcatctcgcgggcgatcctcgtttacaaccgtggccgcacaacgcgccccgcggacggcatcgtcgtcaccccgtcgcacaacccgccgcaggacggcggcttcaagtacaacccgccgaacggcggaccggcggacacgcacgtgacgggatgggtgcaggacagggcgaacgagctgctgcggcacggcaactccggcgtcaagcgcgtcccgttcgcggccgccatcaaagccgcgagcacccatcaggaagacttcgtcctgccatacgtccacgacttgagaaacgtgatcgacatggacgccatccgcgacaccggccttccgctggccgtcgacccgctcggcggcgcgacccgagactattgggggccgatcaattccgtctatcgactcgacatcgccatcgtgaacccggtggtcgacccgcaattctccttcatgaccgtcgaccacgacggccagatccgcatggacccctcgagcccgtacgccatggcccggctcgtcggcctcaaggatcggtaccgggtcgtgttcgccaccgaccccgacgctgaccggcacgggatcgtcactccgtcgacggggttgatgaaccccaacgagtacctcgccgtcgccatcagctatctcctcacgaaccgtccccgctggccggcgcgggccgccgtcggcaagacgatcgtgagcagcagcatgatcgaccgggtcgtggaaaagtgcggctacccgttgtgcgaggtgcccgtggggttcaagtggttcgtgccgggcctgttcgatggctcgctgtgcttcggcggcgaggagagcgccggggcgagcttcctgcggcacgacggcaccgtgtgggcgaccgacaaggacggtccgatcatggccctcctggcggccgagatcaccgcgcggaccggaaaggacccgggcgagcactatcgcgcgctgaccgcggagttcggcacgccgtactacacgcgcatcgacgcgccggcgacgcccgagcagaaggcgaggctggagaagctctcgcccgaggccgtccttgagtcgcagctcgccggcgaatccgtcacggccacgctgacccgcgccccgggcaacaatgcgccgatcggcggtttgaaggtcatcgctcgcggcggctggttcgcggcgcggccgtccggcacggagaacatctacaagatctacgcggaaagcttcaaggaccaggctcacctcgacgccgtcgtgcgcgacgcgcaggcgatcgtgaaccgagccctccggaggtgacgcgatgaacgcgacccaacgtcttcacgacctggggcagagtctctggctcgacaacatcacccgtgacctgctggacagcgggacgctgaaacgctacatcgacgacctgtcggtgacggggctcacctcgaaccccacgatcttcgatcacgccatcatgagcagcgccgcctacgacacggcgatccgcaagaagcccggcgccgggacatcggccgacgccctcttcttcgagctggcgctggaggatctcggccgggcggccgacctcttccgaccgattcacgaccagacggacggcgtggacgggtgggtctcgctggaagtgtcgcccctcctggcatacgaca

SEQ ID NO: 674 - DNA, 4000 bp, Escherichia coli
atatttggaagccctttccaatcagttatctagatcagcatgtagggggtggattgggtattatgcttgacgattatgttgctgcattttttgcactacttatttatttctcaatgcaatgacccaatcaatcattcaagatacatgccttcaggtcagcaatgccctcattaaaaatcacttgcggatagcacttgctgagtcatgcactggcgggttagtttgccaacatctcacaaatattcctggaagctccgcctggttcgaccgaggattcattacatatagcaatgaagcaaaaattgaattacttaaggtcgatccaacgacacttttaaaatatggtgcggtgagtcatgaggttgcttccgaaatggccttaggcgcccttaaagagagtcatgctcaaatagctctatcaattacaggcattgcaggtcccgcaggggggtcaactgaaaagcctgtaggtacagttttctttgctattgctcatcaaaataagatcatttttaatgcttcaaaagtcttccctggatcaagggaaaatatacgtgaatcttcttgtctatttgctctaaatcaggtcttagcgcttactttaaacccccaagtatgaaataattattagtgataaaaacactttaattaaaggcaaatttagatggatgacaataaaagtaaggcacttgctgccgcattagcgcagatcgaaaaacaattcggaaaaggctccgtcatgaggatggatgattccgaagtcatccaagatatccaatcagtttcaacaggttccttaggtcttgatattgcgcttggcataggtggtcttcctagagggcgtgttgttgaaatatatggcccagaatcctcaggcaagacatctttaacgctatcagtcatcgctcaaatgcaaaaactgggtggcgtcgctgcttttatcgatgctgaacatgcacttgatcctcaatatgctgccaaattaggtgttgtagttccagacctactcatatctcaacctgatacaggcgaacaagcccttgaaattgcagacatgcttgtacgaagtggttcagtagatattgtcgtcatagactctgtagcagctttgacgccacgtgcagaaattgaaggtgaaatgggtgactctcatatgggccttcaagctcgtcttatgtcacaagccttaagaaaattaacaggcaatattaaaaaaacaaatactcttgtcatattcattaaccaaattcgtatgaagattggggtcatgtttggcaatccagaaacaaccacgggcggcaatgctttgaaattttatgcgtccgtaagacttgatatacgacgtattggtgcaatcaaaaaaggtgatgaagtcgtgggtgctgaaacaagagttaaagtggttaaaaataaggtggcgcctccatttagacaagctgaatttgacgtgctttatggtgaaggcatttcaagagaaggtgaaatcattgaaattggtgctcaattaaatttcgttgaaaaagcagggtcatggtatagctataatggcgagaaaattggccaaggcaaagacaatgccagagaatttttaaaagaaaatcctaaaattgctcaagaaattgaagataagattagggcaaactcatcaactctaagtgaagcgatgactgcacctcaggaaacagacgaaactgagtaacacaaaaaataatccattagttttacttaaaaaaagagcgttatattacctagcaaaaagagagtactcacatctcgaattgaaattgaaattaagtgagtacgctcatacgctcgaattgaatgaagatgcattagatctttttatatcgtctcttgtgtcagatggatggctttctaatgagcggtattgtgaacaatttattcatgcaaaaaaaaataaattcgggcgatataagatcattcgagaacttgaagaaaaaggaatagagcaggctcttatagaggagtacataggtcctcttaaaaaccaagaattattatatgcaaaacaagtatggcaaaagaaatttaaactccctccctcttctaaagaagaatggtcaaaacaagcgcgctttttgcaaagtcgcggatttgatgtttcacttataaaaaaaatattgaatgccaaggaagaatagctagcgtatgtcaactgcatcgaatcatcccattatttctagtgaagaaattagaaatattttcttagattttttcaagaacaaacaacatcagattgtagcttcaagctctttagtgcctggggaagatcctactttattgtttacaaatgctgggatgaatcaattcaaagatgtgttcttaggatttgataaacgtaactatgctagagcgacttcaagccaaaagtgtgtcagagcaggcggcaaacacaacgacttagaaaatgtaggttatacagcaagacatcatactttttttgaaatgctcggcaatttcagcttcggtgattattttaaaaaagatgccattcaatatgcttgggaacttctcactgaagtttataaaatacccaaagaaaaacttctcgtgactgtctatagtgaagatgatgaagcatacgatatttgggctaaatcaatcggcattcatccggataaaattattcgtattggcgacaacaagggtgccaagtatgcatcagataatttttggatgatgggtgacacaggtccatgtggtccatgtactgaaattttttatgatcacggaagccatatccctggaggcccgcctggatcgaaagatgaagatggtgatcgattcatcgaaatttggaatattgtttttatgcaatataaccgcgatgaaaaaggcgtcatgcatacattaccaaaaccttctgtggatacaggtatgggcttggagagaatatgcgcagtcctgcaaggtgtgcatgccaattatgaaacagatttatttgtccccctcattcaatcagctgcaaatattacaaaaacatcagacatccatcacccctcactcaaagtattgtcggatcatattcgtgcttgtacattcttaatttcagatggtgtgattccaggtaacgaaggccgcggttatgttttaagaagaattattcgtagagcgatcagacatggctataaactaggatgtagacaacctttcttccataagttagtggatgatgttgtgcgtatgttaggcaaagcttatcctgacattgaaagaaataaacaaaatattgctttatcactaaagcaagaagaagaacgattctttgaaaccattgaaaatggtatgaatatattagaagagtctattcaagcgcttgttaaaaaaaatcaaaaaacttttgacggtcaaattgctttcaagcttcacgatacttttggatttccacttgatctgaccgctgatatttgtcgagagaaaaatatatccatcgatcaaaaaggttttgatgaggcgatggaagctcaaaaatctatggctcggtcttctaataaattcaaaatgaaaatagatgtcgattataacggtgacgctacacattttagtggatatgaggccatggaatgcaaggcaaaagtcttggctttatttaaagacgatatctcaaagatggagcttctcaaaggtgagtctggcattgtgattcttgacaccacccccttctatgcagaatcaggcggccaggtaggtgacaaagggttgattaaaacttctaatagctcttttaaagttgaagacaccataaaaatcaaagcaaaaatttatgctcactttggtgtagttgaaacgaatagcttaaaagtatctgatgaagtcatggcatccgttgaaaatgattcccggaaaaatattatgcgaaatcattcagcaacccatttattacataaaggtcttaagaataccttaggctctcatgtagaacaaaaaggctcgctcgttgacgaatcgaaaacacgttttgacttttcacaccccaaag

SEQ ID NO: 675 - DNA, 4000 bp, Escherichia coli
  misc_feature (1)..(1): n is a, c, g, or t
  misc_feature (4)..(7): n is a, c, g, or t
  misc_feature (9)..(9): n is a, c, g, or t
  misc_feature (11)..(12): n is a, c, g, or t
  misc_feature (16)..(16): n is a, c, g, or t
  misc_feature (18)..(19): n is a, c, g, or t
  misc_feature (21)..(23): n is a, c, g, or t
  misc_feature (26)..(26): n is a, c, g, or t
  misc_feature (30)..(30): n is a, c, g, or t
  misc_feature (33)..(35): n is a, c, g, or t
  misc_feature (41)..(47): n is a, c, g, or t
  misc_feature (50)..(50): n is a, c, g, or t
  misc_feature (52)..(52): n is a, c, g, or t
  misc_feature (55)..(57): n is a, c, g, or t
  misc_feature (59)..(63): n is a, c, g, or t
  misc_feature (65)..(72): n is a, c, g, or t
  misc_feature (74)..(76): n is a, c, g, or t
  misc_feature (80)..(86): n is a, c, g, or t
  misc_feature (88)..(92): n is a, c, g, or t
  misc_feature (94)..(98): n is a, c, g, or t
  misc_feature (100)..(100): n is a, c, g, or t
  misc_feature (102)..(103): n is a, c, g, or t
  misc_feature (106)..(115): n is a, c, g, or t
  misc_feature (117)..(117): n is a, c, g, or t
  misc_feature (120)..(120): n is a, c, g, or t
  misc_feature (122)..(123): n is a, c, g, or t
  misc_feature (126)..(126): n is a, c, g, or t
  misc_feature (128)..(130): n is a, c, g, or t
  misc_feature (132)..(135): n is a, c, g, or t
  misc_feature (140)..(140): n is a, c, g, or t
  misc_feature (143)..(145): n is a, c, g, or t
  misc_feature (147)..(148): n is a, c, g, or t
  misc_feature (151)..(151): n is a, c, g, or t
  misc_feature (155)..(155): n is a, c, g, or t
  misc_feature (159)..(160): n is a, c, g, or t
  misc_feature (162)..(167): n is a, c, g, or t
  misc_feature (170)..(174): n is a, c, g, or t
  misc_feature (176)..(178): n is a, c, g, or t
  misc_feature (181)..(181): n is a, c, g, or t
  misc_feature (183)..(183): n is a, c, g, or t
  misc_feature (185)..(185): n is a, c, g, or t
  misc_feature (188)..(189): n is a, c, g, or t
  misc_feature (191)..(194): n is a, c, g, or t
  misc_feature (196)..(198): n is a, c, g, or t
  misc_feature (201)..(201): n is a, c, g, or t
  misc_feature (204)..(210): n is a, c, g, or t
  misc_feature (212)..(220): n is a, c, g, or t
  misc_feature (222)..(224): n is a, c, g, or t
  misc_feature (227)..(230): n is a, c, g, or t
  misc_feature (232)..(232): n is a, c, g, or t
  misc_feature (235)..(238): n is a, c, g, or t
  misc_feature (240)..(240): n is a, c, g, or t
  misc_feature (242)..(243): n is a, c, g, or t
  misc_feature (245)..(245): n is a, c, g, or t
  misc_feature (250)..(251): n is a, c, g, or t
  misc_feature (253)..(255): n is a, c, g, or t
  misc_feature (257)..(261): n is a, c, g, or t
  misc_feature (263)..(267): n is a, c, g, or t
  misc_feature (269)..(269): n is a, c, g, or t
  misc_feature (271)..(271): n is a, c, g, or t
  misc_feature (274)..(274): n is a, c, g, or t
  misc_feature (278)..(280): n is a, c, g, or t
  misc_feature (282)..(287): n is a, c, g, or t
  misc_feature (289)..(290): n is a, c, g, or t
  misc_feature (293)..(294): n is a, c, g, or t
  misc_feature (296)..(296): n is a, c, g, or t
  misc_feature (298)..(302): n is a, c, g, or t
  misc_feature (306)..(306): n is a, c, g, or t
  misc_feature (312)..(317): n is a, c, g, or t
  misc_feature (319)..(319): n is a, c, g, or t
  misc_feature (322)..(322): n is a, c, g, or t
  misc_feature (324)..(324): n is a, c, g, or t
  misc_feature (326)..(326): n is a, c, g, or t
  misc_feature (328)..(331): n is a, c, g, or t
  misc_feature (333)..(340): n is a, c, g, or t
  misc_feature (346)..(346): n is a, c, g, or t
  misc_feature (348)..(354): n is a, c, g, or t
  misc_feature (356)..(363): n is a, c, g, or t
  misc_feature (365)..(367): n is a, c, g, or t
  misc_feature (369)..(369): n is a, c, g, or t
  misc_feature (371)..(371): n is a, c, g, or t
  misc_feature (375)..(375): n is a, c, g, or t
  misc_feature (377)..(377): n is a, c, g, or t
  misc_feature (379)..(384): n is a, c, g, or t
  misc_feature (386)..(391): n is a, c, g, or t
  misc_feature (393)..(394): n is a, c, g, or t
  misc_feature (396)..(398): n is a, c, g, or t
  misc_feature (402)..(402): n is a, c, g, or t
  misc_feature (404)..(407): n is a, c, g, or t
  misc_feature (410)..(416): n is a, c, g, or t
  misc_feature (418)..(421): n is a, c, g, or t
  misc_feature (423)..(424): n is a, c, g, or t
  misc_feature (426)..(430): n is a, c, g, or t
  misc_feature (433)..(433): n is a, c, g, or t
  misc_feature (435)..(437): n is a, c, g, or t
  misc_feature (439)..(440): n is a, c, g, or t
  misc_feature (442)..(446): n is a, c, g, or t
  misc_feature (448)..(448): n is a, c, g, or t
  misc_feature (451)..(453): n is a, c, g, or t
  misc_feature (455)..(457): n is a, c, g, or t
  misc_feature (462)..(463): n is a, c, g, or t
  misc_feature (466)..(470): n is a, c, g, or t
  misc_feature (475)..(475): n is a, c, g, or t
  misc_feature (482)..(483): n is a, c, g, or t
  misc_feature (485)..(487): n is a, c, g, or t
  misc_feature (489)..(490): n is a, c, g, or t
  misc_feature (494)..(494): n is a, c, g, or t
  misc_feature (496)..(498): n is a, c, g, or t
  misc_feature (500)..(500): n is a, c, g, or t
  misc_feature (502)..(503): n is a, c, g, or t
  misc_feature (505)..(505): n is a, c, g, or t
  misc_feature (507)..(507): n is a, c, g, or t
  misc_feature (509)..(509): n is a, c, g, or t
  misc_feature (511)..(512): n is a, c, g, or t
  misc_feature (515)..(515): n is a, c, g, or t
  misc_feature (518)..(518): n is a, c, g, or t
  misc_feature (523)..(524): n is a, c, g, or t
  misc_feature (528)..(547): n is a, c, g, or t
  misc_feature (549)..(553): n is a, c, g, or t
  misc_feature (556)..(561): n is a, c, g, or t
  misc_feature (563)..(564): n is a, c, g, or t
  misc_feature (567)..(570): n is a, c, g, or t
  misc_feature (572)..(576): n is a, c, g, or t
  misc_feature (578)..(580): n is a, c, g, or t
  misc_feature (582)..(585): n is a, c, g, or t
  misc_feature (587)..(587): n is a, c, g, or t
  misc_feature (589)..(598): n is a, c, g, or t
  misc_feature (600)..(602): n is a, c, g, or t
  misc_feature (604)..(606): n is a, c, g, or t
  misc_feature (610)..(611): n is a, c, g, or t
  misc_feature (613)..(614): n is a, c, g, or t
  misc_feature (617)..(620): n is a, c, g, or t
  misc_feature (622)..(640): n is a, c, g, or t
  misc_feature (644)..(645): n is a, c, g, or t
  misc_feature (647)..(649): n is a, c, g, or t
  misc_feature (651)..(652): n is a, c, g, or t
  misc_feature (654)..(655): n is a, c, g, or t
  misc_feature (658)..(659): n is a, c, g, or t
  misc_feature (661)..(663): n is a, c, g, or t
  misc_feature (668)..(669): n is a, c, g, or t
  misc_feature (673)..(675): n is a, c, g, or t
  misc_feature (677)..(677): n is a, c, g, or t
  misc_feature (679)..(683): n is a, c, g, or t
  misc_feature (688)..(688): n is a, c, g, or t
  misc_feature (690)..(690): n is a, c, g, or t
  misc_feature (693)..(693): n is a, c, g, or t
  misc_feature (695)..(697): n is a, c, g, or t
  misc_feature (700)..(701): n is a, c, g, or t
  misc_feature (705)..(705): n is a, c, g, or t
  misc_feature (709)..(709): n is a, c, g, or t
  misc_feature (711)..(714): n is a, c, g, or t
  misc_feature (716)..(718): n is a, c, g, or t
  misc_feature (723)..(726): n is a, c, g, or t
  misc_feature (728)..(728): n is a, c, g, or t
  misc_feature (730)..(734): n is a, c, g, or t
  misc_feature (737)..(737): n is a, c, g, or t
  misc_feature (739)..(742): n is a, c, g, or t
  misc_feature (744)..(746): n is a, c, g, or t
  misc_feature (748)..(748): n is a, c, g, or t
  misc_feature (751)..(751): n is a, c, g, or t
  misc_feature (753)..(753): n is a, c, g, or t
  misc_feature (756)..(759): n is a, c, g, or t
  misc_feature (761)..(761): n is a, c, g, or t
  misc_feature (763)..(769): n is a, c, g, or t
  misc_feature (772)..(773): n is a, c, g, or t
  misc_feature (775)..(784): n is a, c, g, or t
  misc_feature (786)..(787): n is a, c, g, or t
  misc_feature (789)..(789): n is a, c, g, or t
  misc_feature (791)..(794): n is a, c, g, or t
  misc_feature (797)..(800): n is a, c, g, or t
  misc_feature (804)..(805): n is a, c, g, or t
  misc_feature (809)..(817): n is a, c, g, or t
  misc_feature (820)..(820): n is a, c, g, or t
  misc_feature (822)..(824): n is a, c, g, or t
  misc_feature (826)..(826): n is a, c, g, or t
  misc_feature (828)..(831): n is a, c, g, or t
  misc_feature (833)..(833): n is a, c, g, or t
  misc_feature (835)..(838): n is a, c, g, or t
  misc_feature (840)..(842): n is a, c, g, or t
  misc_feature (844)..(847): n is a, c, g, or t
  misc_feature (849)..(849): n is a, c, g, or t
  misc_feature (851)..(860): n is a, c, g, or t
  misc_feature (862)..(864): n is a, c, g, or t
  misc_feature (866)..(869): n is a, c, g, or t
  misc_feature (872)..(877): n is a, c, g, or t
  misc_feature (879)..(879): n is a, c, g, or t
  misc_feature (881)..(883): n is a, c, g, or t
  misc_feature (887)..(887): n is a, c, g, or t
  misc_feature (889)..(893): n is a, c, g, or t
  misc_feature (895)..(897): n is a, c, g, or t
  misc_feature (901)..(901): n is a, c, g, or t
  misc_feature (904)..(906): n is a, c, g, or t
  misc_feature (908)..(910): n is a, c, g, or t
  misc_feature (912)..(915): n is a, c, g, or t
  misc_feature (919)..(921): n is a, c, g, or t
  misc_feature (924)..(924): n is a, c, g, or t
  misc_feature (926)..(930): n is a, c, g, or t
  misc_feature (933)..(940): n is a, c, g, or t
  misc_feature (942)..(945): n is a, c, g, or t
  misc_feature (947)..(953): n is a, c, g, or t
  misc_feature (956)..(957): n is a, c, g, or t
  misc_feature (959)..(959): n is a, c, g, or t
  misc_feature (963)..(970): n is a, c, g, or t
  misc_feature (974)..(975): n is a, c, g, or t
  misc_feature (977)..(978): n is a, c, g, or t
  misc_feature (980)..(980): n is a, c, g, or t
  misc_feature (982)..(983): n is a, c, g, or t
  misc_feature (987)..(987): n is a, c, g, or t
  misc_feature (989)..(990): n is a, c, g, or t
  misc_feature (992)..(994): n is a, c, g, or t
  misc_feature (996)..(999): n is a, c, g, or t
  misc_feature (1002)..(1007): n is a, c, g, or t
  misc_feature (1009)..(1009): n is a, c, g, or t
  misc_feature (1012)..(1016): n is a, c, g, or t
  misc_feature (1018)..(1023): n is a, c, g, or t
  misc_feature (1026)..(1026): n is a, c, g, or t
  misc_feature (1028)..(1032): n is a, c, g, or t
  misc_feature (1034)..(1038): n is a, c, g, or t
  misc_feature (1040)..(1049): n is a, c, g, or t
  misc_feature (1051)..(1052): n is a, c, g, or t
  misc_feature (1054)..(1054): n is a, c, g, or t
  misc_feature (1056)..(1056): n is a, c, g, or t
  misc_feature (1059)..(1071): n is a, c, g, or t
  misc_feature (1074)..(1075): n is a, c, g, or t
  misc_feature (1077)..(1081): n is a, c, g, or t
  misc_feature (1083)..(1085): n is a, c, g, or t
  misc_feature (1089)..(1090): n is a, c, g, or t
  misc_feature (1093)..(1094): n is a, c, g, or t
  misc_feature (1096)..(1096): n is a, c, g, or t
  misc_feature (1101)..(1106): n is a, c, g, or t
  misc_feature (1108)..(1109): n is a, c, g, or t
  misc_feature (1111)..(1111): n is a, c, g, or t
  misc_feature (1113)..(1119): n is a, c, g, or t
  misc_feature (1121)..(1127): n is a, c, g, or t
  misc_feature (1129)..(1130): n is a, c, g, or t
  misc_feature (1132)..(1133): n is a, c, g, or t
  misc_feature (1135)..(1136): n is a, c, g, or t
  misc_feature (1138)..(1142): n is a, c, g, or t
  misc_feature (1146)..(1152): n is a, c, g, or t
  misc_feature (1154)..(1158): n is a, c, g, or t
  misc_feature (1161)..(1161): n is a, c, g, or t
  misc_feature (1163)..(1167): n is a, c, g, or t
  misc_feature (1170)..(1171): n is a, c, g, or t
  misc_feature (1173)..(1173): n is a, c, g, or t
  misc_feature (1175)..(1176): n is a, c, g, or t
  misc_feature (1178)..(1180): n is a, c, g, or t
  misc_feature (1182)..(1182): n is a, c, g, or t
  misc_feature (1185)..(1186): n is a, c, g, or t
  misc_feature (1190)..(1192): n is a, c, g, or t
  misc_feature (1194)..(1195): n is a, c, g, or t
  misc_feature (1197)..(1198): n is a, c, g, or t
  misc_feature (1201)..(1201): n is a, c, g, or t
  misc_feature (1203)..(1207): n is a, c, g, or t
  misc_feature (1209)..(1212): n is a, c, g, or t
  misc_feature (1214)..(1215): n is a, c, g, or t
  misc_feature (1219)..(1221): n is a, c, g, or t
  misc_feature (1224)..(1227): n is a, c, g, or t
  misc_feature (1230)..(1234): n is a, c, g, or t
  misc_feature (1236)..(1236): n is a, c, g, or t
  misc_feature (1239)..(1239): n is a, c, g, or t
  misc_feature (1241)..(1242): n is a, c, g, or t
  misc_feature (1244)..(1250): n is a, c, g, or t
  misc_feature (1254)..(1257): n is a, c, g, or t
  misc_feature (1260)..(1261): n is a, c, g, or t
  misc_feature (1263)..(1263): n is a, c, g, or t
  misc_feature (1265)..(1265): n is a, c, g, or t
  misc_feature (1268)..(1272): n is a, c, g, or t
  misc_feature (1274)..(1283): n is a, c, g, or t
  misc_feature (1286)..(1289): n is a, c, g, or t
  misc_feature (1291)..(1291): n is a, c, g, or t
  misc_feature (1294)..(1294): n is a, c, g, or t
  misc_feature (1296)..(1296): n is a, c, g, or t
  misc_feature (1298)..(1299): n is a, c, g, or t
  misc_feature (1302)..(1307): n is a, c, g, or t
  misc_feature (1309)..(1311): n is a, c, g, or t
  misc_feature (1314)..(1316): n is a, c, g, or t
  misc_feature (1318)..(1322): n is a, c, g, or t
  misc_feature (1325)..(1326): n is a, c, g, or t
  misc_feature (1328)..(1338): n is a, c, g, or t
  misc_feature (1342)..(1342): n is a, c, g, or t
  misc_feature (1344)..(1344): n is a, c, g, or t
  misc_feature (1348)..(1348): n is a, c, g, or t
  misc_feature (1352)..(1352): n is a, c, g, or t
  misc_feature (1354)..(1357): n is a, c, g, or t
  misc_feature (1359)..(1360): n is a, c, g, or t
  misc_feature (1362)..(1363): n is a, c, g, or t
  misc_feature (1365)..(1365): n is a, c, g, or t
  misc_feature (1367)..(1369): n is a, c, g, or t
  misc_feature (1371)..(1381): n is a, c, g, or t
  misc_feature (1384)..(1388): n is a, c, g, or t
  misc_feature (1390)..(1390): n is a, c, g, or t
  misc_feature (1394)..(1407): n is a, c, g, or t
  misc_feature (1409)..(1411): n is a, c, g, or t
  misc_feature (1413)..(1416): n is a, c, g, or t
  misc_feature (1419)..(1425): n is a, c, g, or t
  misc_feature (1428)..(1430): n is a, c, g, or t
  misc_feature (1432)..(1433): n is a, c, g, or t
  misc_feature (1435)..(1441): n is a, c, g, or t
  misc_feature (1447)..(1447): n is a, c, g, or t
  misc_feature (1449)..(1451): n is a, c, g, or t
  misc_feature (1453)..(1455): n is a, c, g, or t
  misc_feature (1459)..(1460): n is a, c, g, or t
  misc_feature (1462)..(1462): n is a, c, g, or t
  misc_feature (1465)..(1465): n is a, c, g, or t
  misc_feature (1467)..(1468): n is a, c, g, or t
  misc_feature (1471)..(1482): n is a, c, g, or t
  misc_feature (1484)..(1484): n is a, c, g, or t
  misc_feature (1486)..(1490): n is a, c, g, or t
  misc_feature (1492)..(1496): n is a, c, g, or t
  misc_feature (1501)..(1502): n is a, c, g, or t
  misc_feature (1504)..(1505): n is a, c, g, or t
  misc_feature (1507)..(1508): n is a, c, g, or t
  misc_feature (1512)..(1512): n is a, c, g, or t
  misc_feature (1516)..(1516): n is a, c, g, or t
  misc_feature (1520)..(1530): n is a, c, g, or t
  misc_feature (1533)..(1535): n is a, c, g, or t
  misc_feature (1989)..(1989): n is a, c, g, or t
  misc_feature (1991)..(1992): n is a, c, g, or t
  misc_feature (2003)..(2003): n is a, c, g, or t
  misc_feature (2012)..(2012): n is a, c, g, or t
  misc_feature (2015)..(2016): n is a, c, g, or t
  misc_feature (2018)..(2019): n is a, c, g, or t
  misc_feature (2024)..(2025): n is a, c, g, or t
  misc_feature (2030)..(2030): n is a, c, g, or t
  misc_feature (2045)..(2046): n is a, c, g, or t
  misc_feature (2055)..(2055): n is a, c, g, or t
  misc_feature (2057)..(2057): n is a, c, g, or t
  misc_feature (2064)..(2064): n is a, c, g, or t
  misc_feature (2076)..(2076): n is a, c, g, or t
  misc_feature (2266)..(2266): n is a, c, g, or t
  misc_feature (2385)..(2385): n is a, c, g, or t
  misc_feature (3261)..(4000): n is a, c, g, or t
ngcnnnntntnntcancnncnnnaanaatnttnnngccgcnnnnnnngtngnaannngnnnnnannnnnnnngnnntttnnnnnnnannnnnannnnntntnnaannnnnnnnnntnttntnnttntnnncnnnnaatanttnnnannttntttntttnntnnnnnncannnnncnnnaanantnttnntnnnnannnctnttnnnnnnntnnnnnnnnncnnnatnnnnanaannnncncnncngctgnngnnntnnnnnannnnntnanaanaaannntnnnnnngnngtnntncnnnnntttnttcttnnnnnntnttntnanannnntnnnnnnnntttttntnnnnnnnannnnnnnngnnnanantttntnannnnnnannnnnncnncnnnaaanannnnggnnnnnnnannnntnntnnnnngangnnntnnannnnncngcnnngnnnaaaannacnnnnnttttnttttttnntnnnannaaanannntntnntncntngnnaanaanaaaannatcnnnnnnnnnnnnnnnnnnnntnnnnnttnnnnnntnnttnnnnannnnntnnnannnntngnnnnnnnnnntnnngnnnaatnntnntgnnnnannnnnnnnnnnnnnnnnnntttnncnnntnntnntgnngnnnatttnntcannnanannnnncagcngntgntnnnctnntttntttntnnnnannnttttnnnnangnnnnnatnannnntnnnanaananttnnnnanannnnnnnttnntnnnnnnnnnncnncncnnnnctnnnnaaanntttnnnnnnnnnttntnnngncnnnngngnnnntnnnannnntncnnnnnnnnnngnnntnnnngannnnnntntnnnaaanannnnntnnnatgntgnnnannncnnnntgcnnnacncnnnnnttnnnnnnnngnnnngnnnnnnnccnncntttnnnnnnnnaaannannananntttntnntnnncnnnnttnnnnnntnctnnnnncnnnnnntcntnnnnntnnnnnannnnnnnnnncnnanantannnnnnnnnnnnnacnncnnnnngnnntgtnnttnntnttttnnnnnncnnanannnnnnntnnnnnnngnngnnannannnnntttnnnnnnnannnnnttntnnnnnttnntntnntnnnancannaaannngnnannagngnnnnncnnnncnnctannngcnnnnccnnnnntnttntnntnnnnnnntccnnnnttnngngnaannnnngnnnnnnnnnntgnnnncnccncntnntgnnnnnnannntcnnngnnnnnaannannnnnnnnnnngggngntgcngcancnnnngnngnngntnnngnnnnnnnnnnncgnnnnntngttnnnnnnnnnnnnnnannngnnnncannnnnnncannntnncnnnnnnngccgcngnnnannncccnncngcngnngtnnnnnnnnnnnncncnnnnncnnnnngaaannannanntttnttanaaannnnnnnnnnnttnnnccccccccccacagcaaattttttataccagccgccaagcattcttcctatttcattgacaagcttagaggcgtattcatattgctgagttgaaatgaactgaaaatctttggccagcctaaagtagattctaagtttatccagctccacaattgtatattgcagggcttttgttttgtcgaactcgttgttggactgtattaccccctccataacattcaatcctgtattttcaattttctgacccaaagtccacttttctgattttggaaatttgttcagcagtgtatgcagccattttaccatttcatatgttttgtggaaaattttcatatcttcaagcattttatcacctcaatttttttcccgaccgttttagattcaacattccagattcacctcagattctcagatttcaacctcaagatgcactcctgcagcaacggaagccgangnncgggtacacantcgacggtncgnngnncaagnncgcanagaacgggccagcannggcaccatngncccaacngccgccgcgganaaccgcccggcctgtctgcgtccctgccgcaaaatacaccccgtcattcccgtattttgttgtgtttgcattcgttgatgtgtaaaagccgctgtcagacggataataccatcctgctgttccagacggagctattgctgtcactgtatcattcacccattcccagacatttccgaccatatcatacacnccttcagatgacacgcatccagtcctgttcattgcaaggcatgcacgattgcttgctgctgatgcattcagagagcaggctgagttggtgttgcagttgtacgggttggctgagaggtntgccggcagattccacactatgcccttcagattggctgctgcaagccattcttcgcttgtgcataagtatttgcctgcgttggcgcacatctgcctcgcctgcttctgggaaacttgaacgaacggggcagcatttggacgggaggaggcattgactgttgttcctgtgtatgaatccactccgccgaatacgcctgagtaagagcctgaagaacatgcatcgcagtagctggtgtaattggctctgcagtttattcctatgttctcgcatccttccacagaggcttcatacttgtctatgcagaatccgccaagcttgtcaatataagtcatattctcagggcatgtccctggcttgccctgccactccaatcttacaaatgtcgagttttggccaaaatctatcacagaggatatatattcaccctctgaaacataagttgtattggtcccgtcagtccagtttaactgaacagcctgcagggtgctgttatataatgtgttgttgaatgctccccctgccaaattgctgcctaaatgactgtaattaaaaccaaccacagccatgactaaaaacaaaaaaatcgaaatccagcctattaaacctattttttttattttcatttttttccacctctgtttaagttgcgatatgaacatgatttaaccgccgctaataatgatataatcatccaccccgtcaaacaccatccctgccccgaacttgcctcctgaagtccacccgctagaagagttgcagttcaaagttgtgcaagcaaaaccagcagcagcgccgttatttccatagcctgaataatccgtgacattggttccatcagcatcatcaaatctccaccacacgaccaagctattatnnnnnnnnnnnnnnnnnnnnnnnnnnnnnnnnnnnnnnnnnnnnnnnnnnnnnnnnnnnnnnnnnnnnnnnnnnnnnnnnnnnnnnnnnnnnnnnnnnnnnnnnnnnnnnnnnnnnnnnnnnnnnnnnnnnnnnnnnnnnnnnnnnnnnnnnnnnnnnnnnnnnnnnnnnnnnnnnnnnnnnnnnnnnnnnnnnnnnnnnnnnnnnnnnnnnnnnnnnnnnnnnnnnnnnnnnnnnnnnnnnnnnnnnnnnnnnnnnnnnnnnnnnnnnnnnnnnnnnnnnnnnnnnnnnnnnnnnnnnnnnnnnnnnnnnnnnnnnnnnnnnnnnnnnnnnnnnnnnnnnnnnnnnnnnnnnnnnnnnnnnnnnnnnnnnnnnnnnnnnnnnnnnnnnnnnnnnnnnnnnnnnnnnnnnnnnnnnnnnnnnnnnnnnnnnnnnnnnnnnnnnnnnnnnnnnnnnnnnnnnnnnnnnnnnnnnnnnnnnnnnnnnnnnnnnnnnnnnnnnnnnnnnnnnnnnnnnnnnnnnnnnnnnnnnnnnnnnnnnnnnnnnnnnnnnnnnnnnnnnnnnnnnnnnnnnnnnnnnnnnnnnnnnnnnnnnnnnnnnnnnnnnnnnnnnnnnnnnnnnnnnnnnnnnnnnnnnnnnnnnnnnnnnnnnnnnnnnnnnnnnnnnnnnnnnnnnnnnnnnnnnnnnnnnnnnnnnnnnnnnnnnnnnnnnnnnnnnnnnnnnnnnnnnnnnnnnnnnnnn

SEQ ID NO: 676 - DNA, 4000 bp, Escherichia coli
  misc_feature (1043)..(1043): n is a, c, g, or t
  misc_feature (3121)..(3121): n is a, c, g, or t
  misc_feature (3439)..(3439): n is a, c, g, or t
  misc_feature (3523)..(3523): n is a, c, g, or t
  misc_feature (3525)..(3525): n is a, c, g, or t
  misc_feature (3564)..(3564): n is a, c, g, or t
  misc_feature (3642)..(3642): n is a, c, g, or t
ttatatgtagaagcacaaagcacggttagacctaaataaacgtaaattagtctaagtgaaatttcttttgattttggtaatagtttttcagaagaatcattacttgaaattttaaacaattgcattccaccaacattcattattggcattaaggttattgccattacaataataccaattccacctaaccattgaagcattgctcgccacaaaagtatcgatcttggagcactctctaagttggagataattgtcgaccctgtcgtggtgattccagacatactttcaaagaaagagtcagtaattgaaagttcaagagtagaaaaaataaaaggtaaagaaccaaatattgcaatacttaaccaagaaagagcagttaataagaacgcttgttgtagatttaattttttatcatgatttaaatttgttaaaaaaaataaaacaccaaatattatagaaattatagagcctccaataaaagaggagtcaatttctgaatatataaactgagctataattggaatcatcatggaaattccaagaataatttgcaaaacacccaaggtaaaaaaaacagttttataattagacattttgaaagaacattattttatggtaaataaatttcaactctataagaattaataaaaacaccaaatataagatatttgttattaaacaaagtgattgaaaaagataatttagataaaactaacgcatggccctttgttgaggctaaaaaattactgcgtgaaagaaagtcctttattgataaaaaaggtaaaataattttacaaactggttatggtccaagtgggctgccccatataggtacatttggtgaagttgcaagaacatcgatgatggttaatgctttaaaacaactcacagatataccaacggaaatcataactttctctgatgacatggatggctttagaaaagttccagaaaacgttccaaatcaagagctcttaaataacaatcttcataagcctttaactcaagtgccagatccatttgaaaaattttcaagttttggngaacacaataatgaaatgttaaaagattttttaaataaatttaattttgaatataattttcaaagctcttcagttctttataagagtggtttttttaatcccacattacagataatcctagaaaattatcaaggtattatggatataattcttccaacactagggaaagaaagacaaaaaacttacagtccatttttaccaatttgtccagacaccggtaaggttttagaaattccagttttagaaatactaaaagaaaaatccaaaattatatttgataataatggaaaaaaacttgaggtaagtatcttcgatgggaattgcaaattacaatggaaagtagattgggcaatgagatggtacgctcttgatatagattttgaaatgtatggaaaagatctaattgaaagtgcaatattatcatcaaaaataatcaagttaattggaaaaacaaacccatctgggtttgcttatgagctttttttagatgaaaaaggagaaaaaatatccaaatcaaaaggaaatggaattacaattgatcagtggctggagtatgcatcacccgaaagtctttcattgtatatgtatcaaaatcccaaaagagcaaaaaaactatataaagaaatagttcctaaaacagtcgatgagtacttggactttatagaaaaagctaaaacacaaaatgagttacagctattaatgaatcctgtttggcatgtgcataatggattaattcctaaagaagatactattatgagcttttcaatgcttttaaatttagtagaaacgagcaatgcagactctaaggagttactttggaagtttgtaaaaaaatataaaaaaaaccttttagaaaaagaacacccaatttttgataatcttataggttatgcgattaagtattttaatgacgtaataaaattacaaaaaaaatacaaaacccctgatgcaaatgaaaaagtcgcattagaagcactggttaagtctcttgatagctgcaatgataagatgttgcctgaggatattcagacattaatttattcaacgggaaaagaaaatggttacgcagaaaacttgcgtgattggtttaaattaatttatgaggttgtttttggagatgaaaatggaccaagaatgggattttttataagtttttttggagtaaacgaaactaaagagttaattaaagaaaaaataaaataatgttttcaaaattcagatcactaattttcaaaattgatcctgaaactgctcataatttagcaattaagtctttaaaactaaacatattaccaaacatagctgatcaaaataaaggagatccaatatttaagactaatttatttggtaagaatatagataatccaataggaatggctgccgggtttgataaaaatgctgaagtttataacccactgtttaaacttgggtttggttttgttgaagtaggaacggttaccccacttgagcaatatggaaatccaaagccaagagtttttaggttggttgaagatcaggctcttataaataggttaggttttaataatttaggagcagaaaatattagccatagaattagatctaattcacataaaggtttattaggaatcaacataggtcccaataaagatagtgaagatagattaaatgattatttgattggacttagaaacttttatgatatcgctgactatattacagttaatatttcttcgcctaacacagaaaatctaagagcttttcatgatgagactaaatttgatgaattgttgaatgcaatagaaaaagaaaaagttaaacttaaatcaaaaattccaattgtagtaaaaatctctccagatatttcagacgaacaaattgaactaataagtaaaattttaattaaacataaagttagtgcaataattgtttcaaacacaacagctaaaaatagagaaaaattgaataatattttaaagcatcaaaagggtgggctatcaggcaagccactagaggaagaggccaataaactaataagtaagttttataaactgcttaagggcaagattgaaattataggtgtaggaggtgtggactcnggagaaagtgcttataaaaagtttcaggcaggagctagctatgttcagttatatacaggaatggtttttcaaggaccaaacattgtaggaaagataaaaaaagagcttaaagaaatattaattgacgaaggtattaagaattttaaagaaataataggaaagaagctgactaattgatcctaataaacttgacgagatcatgaacacatcttatatagtcactaaatattatgtctaaaaaatgtgaattaactggtaaaattcctatgaaaggtcacaatgttagtcacgctaacaataagactaaaagaagatttntacctaatttaaaaaaagctaaatttacaagtgaacttttgaaaagaagcctaactttaactgttagtaatgccggtgttagangngttgataaaaaaggtacttttgatcagtttttaaagacngtaaaaaataaaaatatttcgcctagactaaaaaaattaaaaaaaagtatattaattaaatcaccttttattaaaaangcaccaaaagcatctcctagtaaatcagcttaatgaaaaagttttttatactactctcatttataatgggagttgttgtcttaacttcaaattatttagtacaatttccaatcaattattatggtttagaagaaatattaacttatggtgcttttagctatccagttgcttttttaattacggatctggcaaatagatcttatggcaaggttgtagctagaaaaattgtttatgttggttttattatagggattgtatttactcttttcttttcaacaaattttgcagacttaatttcagttagaattgctataggttcaggtatagcatttatggttgcacagttgttagatgttca

SEQ ID NO: 677 - DNA, 4000 bp, Escherichia coli
  misc_feature (399)..(399): n is a, c, g, or t
  misc_feature (722)..(722): n is a, c, g, or t
  misc_feature (735)..(735): n is a, c, g, or t
  misc_feature (738)..(738): n is a, c, g, or t
  misc_feature (764)..(764): n is a, c, g, or t
  misc_feature (906)..(906): n is a, c, g, or t
  misc_feature (974)..(974): n is a, c, g, or t
  misc_feature (1216)..(1216): n is a, c, g, or t
  misc_feature (1506)..(1506): n is a, c, g, or t
  misc_feature (2377)..(2377): n is a, c, g, or t
  misc_feature (2422)..(2422): n is a, c, g, or t
  misc_feature (2857)..(2857): n is a, c, g, or t
cgcgagtcggccgactgccggcacccgcgcgtagcggaccgaggcgcacaggagcccgatcgcgatggcgagcaggatgcccagcgccgagacctcgacggtgacgagcaccgcccgaccgtagacgggcagatagcgcccgatgacctgtggatccatgcccgcccctagagtgcgccgccctcgacgacgagttcctcgggcttggccgccttgccgtagaccggtttgagggtccgctcgtagtccttgtggaagaacttctcctcgccgagctggacgagctcctcgttcagccagctgaggagctcgacgttgcccttctgaaccgcgcccgctatggagtcgacggggccgagctgggtgatgccggtgacgaaccggtcctcgttcttcagngagaaggccatcgcctcggtgttgtcggtgacccacacgtctccccgaccgtcgatgagcgcgttggtcgcctcggtgtactgctcgaatttggtgatcttccagtcggggtgcttggcctggatgtaggcgtcggcggtcgtgcccttgacgacgatgaccctcttgcctgcgagctgggactcccgggtgaccgccttccccttcgggctgaccgcgccgagggagaccttcatgtacggcttggcgaagtccactttctgcgcccgttcgggggtcaccgtgaaattggcgaggatgacgtcgaccttccccgaggtcangaactccacccgngangcggcctccaccggcacgaatcggancttgaccttgaggtcctcggcgatccgcttggcgtagacgatgtcgtatccctcgtactgtccgtcttggccgaccgagccgaacggctttttgtcggagaagaccccgacgcggatggttccgctcttcgcgatctcggcnggggtgcgcgcaccgacggagtcgatgggcgcacccctcgatcccgcgcccgcagacgacgcctgacncggcgagccggagtccccgagaagggcgcggactgcgaggaaggcgaggacgaaggcggcggcgaccgcgacgacgccgagggccccgcgcccctttcgcctggacgtcgcctccgcgacgagttcgtcgatggccctgcgggcctcgtccggcaggtctgcctccgcgtccgagccggccgagggccctccggccctttcggagccgccgacgcccctcgtcgcctcggcgtccttctccngctcgtcggcgctctctccgtcgacgagccgatcgtcgggagtcgtggacatgtgctgttcctcttctcgtcttcttctcttgccgttcgatggacacggcctggggtacggcgcagcgcagggaggtccgcgaaaatggagaacgacgtccgatcgccgcgcattcgggagtccgcctcaggcgaacgccgatgcccaccgggaatgctcgaccggtctagcgacagcacgcgccgcccgcgaagagcggacgcattcgggacatcgcacgggaggtcatgggggcgantgtaacaccgcgcaggacgcgcgcatccggcgtctcagggattggaacgccccggtttcgcccgccgaagcgtcttcggaggaggccgggttccccgagcccagcgcccacaatgtgaaaacggctggtttcccccgctcgagccactagagtgtcacttacgtgccctgcgccacgcagcaccggccggccacggagtccacggtccggcccagcattgaacaatcccccctcgagaggagtctcgatgtcgagcattcccgcatcttctcaacgttcgcgcatcacgccgctcgtcattcgcagcgcggtcgtcgccgcgatcggcggcctgatcttcggattcgacaccgctgtcatctccggcgccaccgacaccctgaaggacgtcttccacctcagcgaattcggcaagggcttcctggtcgccatcgcgacgatcggaacgatcttcggcgcgatcatcggcggtcggctcgcggacgtctacggccgccgtaaggtcctcttcgcgatcggcatactctacgtcctgggttccctgggcacggcgttcgcccccactcatctcttcctcctcgtcttccgcatgatcggaggcatcggagtgggcatgtccagcgtatgcgcgccgatctacacggcggagatagcccccgcggcggttcggggccgcctggtcggcctcgtccagttcaacatcgtcctgggcatcctcctggcgtatctgagcaacttcatcatccgcatcacgctcggaggccacgaatggcggtggatgctcggcgtcatggtcatcccctcggcggtcttcctcctcttgctgttcaccgtccccgagacgcctcgctggctcatggcgcacggcaancccgacgaagccgtcgggataagccgccaactctgctcgaccgangaggagtccaagtctcagatcgccgagatcaaggcgcagatagccgcggattcgcagtcccgggcgtccctggtcgaattcttctcgaagcgctatcgcaaggtcatcctcctggcgttcgccatcgccgcattcaaccagctctccggcatcaacgcgatcctctactacgcccccgaggtgatgaagcaggccggggcgtcggggaacgccgcctcgctgatgagcgtggcggtcggcttcatgaacctcatcgccaccatgaccgctctgacggtcatcgacaagatcgggcgccgctcgctcatgatcgtcggctcgatcgggtatctcgtcagcctggggttcatctccggagtcatgttcaagtacgagggccacttcgacagcacctcgtcggttctcgtgctcgtcggccttctcgtgttcatcgcngcgcacgcgttcggccaggggtcggtcatctgggtcttcatctccgagatcttccccaacaaggtgcgcggcctcggccagtctctgggaagcctgacccactggtcgttcgccgccttgacgacttacgccttcccgccgctgatcgacgcctggggcggcggaaccgccttcagcttcttcttcgtctgcatgtgcggacagctgttctgggtcctgaagatcatgcctgaaacgaagggaatcccactcgaagacatggaagccaagctaggattggataagtaatgacggccacacctgaggagacgcccatggaattggcgagcaccccacccgttctctgtctcggcgaagccctgatcgacgtcgtgctccgggagggggaggaaccccaagaacacgtcggaggcagtccgctcaacgtggcctgcgtgctcaccgagctggaacgccccgccctcatcggcgcctggtggggaagggatcgccacgggcggatgatcgaagagttcgccgaggagcacagcgtcggcatcgtctccggcagcgaaggcgccgaccgcacgtccctcgcctatgccaagctcgacgagatgggccgggcggagtacgaattcgacctcctgtgggaggttccagagcttcctccggcgtcctcgctggcgcatctgcacaccggcagcctggccgccaccctggagccgggaggcacggacgtgcttcgcgcggtcaaggcgatggccattctcggcacggtgtcctacgatcccaatgcccggcccgccatcatggggtcgccggaagacgtcctcccccgcatcgaggagctcgtctcgctggccgacgtcgtcaaggcgagcgacgaggacatcgcctggctcttcggcgaggacaccccggtcgaggaggtcatgaggcggtggtcggcccaagggcccggcttggtcgtggtcacacgggggccgtggggcgcctatgcgaggctgtcggcagaacgcgacatgctcgtgatcgacccgctcaacgtggaagtcaccgacaccgtcggcgcaggcgactccttcatggggggccttctctcgggccttctggacgccgggctgctcggcagcgcggacgcgaagaaacggctgcgggagg

SEQ ID NO: 678 - DNA, 4000 bp, Escherichia coli
  misc_feature (1)..(2): n is a, c, g, or t
  misc_feature (4)..(19): n is a, c, g, or t
  misc_feature (21)..(22): n is a, c, g, or t
  misc_feature (24)..(26): n is a, c, g, or t
  misc_feature (28)..(30): n is a, c, g, or t
  misc_feature (32)..(37): n is a, c, g, or t
  misc_feature (39)..(39): n is a, c, g, or t
  misc_feature (41)..(46): n is a, c, g, or t
  misc_feature (48)..(59): n is a, c, g, or t
  misc_feature (61)..(66): n is a, c, g, or t
  misc_feature (68)..(73): n is a, c, g, or t
  misc_feature (75)..(80): n is a, c, g, or t
  misc_feature (82)..(90): n is a, c, g, or t
  misc_feature (92)..(92): n is a, c, g, or t
  misc_feature (94)..(98): n is a, c, g, or t
  misc_feature (101)..(101): n is a, c, g, or t
  misc_feature (103)..(104): n is a, c, g, or t
  misc_feature (106)..(108): n is a, c, g, or t
  misc_feature (110)..(111): n is a, c, g, or t
  misc_feature (114)..(149): n is a, c, g, or t
  misc_feature (151)..(154): n is a, c, g, or t
  misc_feature (156)..(156): n is a, c, g, or t
  misc_feature (158)..(161): n is a, c, g, or t
  misc_feature (163)..(194): n is a, c, g, or t
  misc_feature (196)..(210): n is a, c, g, or t
  misc_feature (212)..(217): n is a, c, g, or t
  misc_feature (219)..(220): n is a, c, g, or t
  misc_feature (222)..(222): n is a, c, g, or t
  misc_feature (224)..(227): n is a, c, g, or t
  misc_feature (229)..(229): n is a, c, g, or t
  misc_feature (231)..(236): n is a, c, g, or t
  misc_feature (238)..(243): n is a, c, g, or t
  misc_feature (245)..(251): n is a, c, g, or t
  misc_feature (253)..(256): n is a, c, g, or t
  misc_feature (258)..(263): n is a, c, g, or t
  misc_feature (265)..(265): n is a, c, g, or t
  misc_feature (267)..(271): n is a, c, g, or t
  misc_feature (273)..(276): n is a, c, g, or t
  misc_feature (278)..(283): n is a, c, g, or t
  misc_feature (285)..(289): n is a, c, g, or t
  misc_feature (291)..(301): n is a, c, g, or t
  misc_feature (303)..(312): n is a, c, g, or t
  misc_feature (314)..(319): n is a, c, g, or t
  misc_feature (321)..(323): n is a, c, g, or t
  misc_feature (325)..(340): n is a, c, g, or t
  misc_feature (343)..(344): n is a, c, g, or t
  misc_feature (346)..(350): n is a, c, g, or t
  misc_feature (352)..(355): n is a, c, g, or t
  misc_feature (357)..(357): n is a, c, g, or t
  misc_feature (359)..(398): n is a, c, g, or t
  misc_feature (401)..(403): n is a, c, g, or t
  misc_feature (405)..(410): n is a, c, g, or t
  misc_feature (413)..(417): n is a, c, g, or t
  misc_feature (419)..(424): n is a, c, g, or t
  misc_feature (426)..(426): n is a, c, g, or t
  misc_feature (428)..(431): n is a, c, g, or t
  misc_feature (433)..(433): n is a, c, g, or t
  misc_feature (436)..(456): n is a, c, g, or t
  misc_feature (458)..(460): n is a, c, g, or t
  misc_feature (463)..(468): n is a, c, g, or t
  misc_feature (470)..(474): n is a, c, g, or t
  misc_feature (477)..(482): n is a, c, g, or t
  misc_feature (484)..(496): n is a, c, g, or t
  misc_feature (498)..(499): n is a, c, g, or t
  misc_feature (502)..(508): n is a, c, g, or t
  misc_feature (510)..(514): n is a, c, g, or t
  misc_feature (517)..(517): n is a, c, g, or t
  misc_feature (519)..(522): n is a, c, g, or t
  misc_feature (524)..(524): n is a, c, g, or t
  misc_feature (526)..(528): n is a, c, g, or t
  misc_feature (531)..(531): n is a, c, g, or t
  misc_feature (533)..(536): n is a, c, g, or t
  misc_feature (540)..(540): n is a, c, g, or t
  misc_feature (542)..(546): n is a, c, g, or t
  misc_feature (548)..(557): n is a, c, g, or t
  misc_feature (559)..(573): n is a, c, g, or t
  misc_feature (575)..(587): n is a, c, g, or t
  misc_feature (589)..(593): n is a, c, g, or t
  misc_feature (595)..(614): n is a, c, g, or t
  misc_feature (616)..(628): n is a, c, g, or t
  misc_feature (630)..(636): n is a, c, g, or t
  misc_feature (638)..(641): n is a, c, g, or t
  misc_feature (643)..(648): n is a, c, g, or t
  misc_feature (650)..(650): n is a, c, g, or t
  misc_feature (652)..(662): n is a, c, g, or t
  misc_feature (664)..(668): n is a, c, g, or t
  misc_feature (670)..(675): n is a, c, g, or t
  misc_feature (677)..(682): n is a, c, g, or t
  misc_feature (684)..(688): n is a, c, g, or t
  misc_feature (690)..(692): n is a, c, g, or t
  misc_feature (694)..(694): n is a, c, g, or t
  misc_feature (697)..(700): n is a, c, g, or t
  misc_feature (704)..(707): n is a, c, g, or t
  misc_feature (711)..(711): n is a, c, g, or t
  misc_feature (1023)..(1023): n is a, c, g, or t
  misc_feature (1878)..(1878): n is a, c, g, or t
  misc_feature (2673)..(2673): n is a, c, g, or t
  misc_feature (2755)..(2755): n is a, c, g, or t
nncnnnnnnnnnnnnnnnnanncnnnannngnnnnnngncnnnnnncnnnnnnnnnnnngnnnnnngnnnnnngnnnnnngnnnnnnnnncntnnnnnatncnncnnncnncannnnnnnnnnnnnnnnnnnnnnnnnnnnnnnnnnnngnnnnangnnnnannnnnnnnnnnnnnnnnnnnnnnnnnnnnnnngnnnnnnnnnnnnnnncnnnnnncnnancnnnnancnnnnnncnnnnnncnnnnnnnannnntnnnnnntnannnnngnnnncnnnnnncnnnnncnnnnnnnnnnngnnnnnnnnnngnnnnnngnnnannnnnnnnnnnnnnnnganncnnnnncnnnnancnnnnnnnnnnnnnnnnnnnnnnnnnnnnnnnnnnnnnnnntgnnncnnnnnnccnnnnncnnnnnncngnnnncngannnnnnnnnnnnnnnnnnnnncnnncannnnnnannnnncannnnnnannnnnnnnnnnnnanncgnnnnnnngnnnnnggnannnngnannnggnannnngcangnnnnncnnnnnnnnnntnnnnnnnnnnnnnnngnnnnnnnnnnnnngnnnnncnnnnnnnnnnnnnnnnnnnncnnnnnnnnnnnnncnnnnnnngnnnncnnnnnncngnnnnnnnnnnntnnnnncnnnnnncnnnnnncnnnnngnnncnggnnnnaggnnnnaggnacaaggaacaaggaacaaggaacaaggaacaacgggatgcttttgcagggcagaaaagcaaattaatgaacatgagttttcgctaatactgactgaacatggcaagaagacagacagaaacattcaatatcgccttcctcgacatcatgtcgtgtggcttcggtgcgattattctgttgttgatgatcaccaagtcttcggcacccacgcccctggaagtttcagagacacctgtcgagggcagcgtgctggagctgcagcgccagctgtttgaaattcgcggcgagaccaacatcctcaaccgtgagctcnatgccaagcatgagcagttgtctcaatacgaagagcgcattgcccgcctgcgtcgtgagctgagcacccttaacggtcagttcaacagcagcaaccaggagtccaccgtcaacgagatcctggaaggccaactggccatggcccggcaacagctgactgccgaaatgcagcgcctgcaggccaacatggaccaggaacgcctggacgactccgtcggcggagtccccgtggacagtgaatacattatcttcctgattgatacctccggcagtatgttcaactacagctggtcgcgcatgctggaagtcatggtcgataccctggacatctaccccgaggtcaagggcatccaggtcatgaatgacatgggcgaatacctgttctccagtttccggggtgactggataccggatacaccggcccgccggcaggcgattttgcaacggcttcgaacctggaacccgttcagtaactccagcccggtggaaggcatcaccgccgccatccgcacctattacgatccgggcaagaaaatcagcctgtatgtgcttggcgatgaatatccgccggccagcggatcaatccgggaagtgattgaaaccgtagacaggataaacgtggcagatgccggtggtgaccgcctggtgcgaatacatggtatcggttttccggtctacttctcgcagccggaccgctaccagagcactggcgagcgctttgctaccctcatgcgggagctggcacggaaaaatggcggtactttcgtcggtttgaacgatttttactaggaaccccgtttaaccggctggatattgatgtaattggaaactggagtacactatggagcccccttgnggaaaacaccctgttttcccgaccaaaggggaccgcaagatgatcatgaacaactgtcttaacaacaaggttaacctccgggcgagcaagactgttcgtcagccgcaactctttgatttagcaaagaaactttgcgctatgggagctgttgttttactcagcgcctgcgcagcgtcaaccattaatatcgagggcagctttccggcgcccctggttcagaagctgcctttgaccgttggtgtttattacgacgagaatttcgttaaccacacctttattgaaattaacgacaatacaggtgacgaccagtacatcatcaactccggcgcctcccagatggagctcttcaacaccatgctccccgctgtattcgaggaggtggtcatgctggacagtatcgacagtgcggccagccagaataacctggacgccgtgtttgtaccttccattgaagaattccaggtgggtctgccgcaaaagacacgcctgaacgtttacgaaatctgggtcaagtacaacatgcgcctggcccaggccaacggtgactatattgctgactgggtgatgaccgcctacggcaagtcacctgaagaaacattccagtccgtggatgacggcgtcaatgatgccgccaatgtggccttacgcgacctggctgccagctttaccttcggcttcagcaatgttcccgaagtcaacgagtggctccggtccaaaaacgccctgagtgactgaaccgaacaatggaatatcaatcacacataatagtgatgcagaaaaaacaagatttaattnaagcgaaataacggttgcaccgatagtaaacaaaggtaagaaacaagagccatgtagagaaagaaaccttatttgattacanagtcatcatcatgagcacatattcaattttcaaaaggctggcccgttacgcgtttgcacttcctgcagctgcgatattgagcagttgtaccactactgaaattgatgaattcaggcaaagcgccactactatcgaagagcatgaaagtatcgtcattctcggtcgccgccagaacaacaattatgaaaccgaggaaagctttgtcgactgcgttgccaatgtcgtaggcagcggccagaacggcatcaacgtggtcaacgaaaaagaatttctcgatgccatgtttccctttttcgaaccccgtactgcacccatgcgtacaggtcaccttgagcaattaatggctgtcgatatcgccgcacagcgcatggaagacttcggtattgaatatatcgtctggctggacggcatcacgcagcgctctgaccagtccggttccatttcctgcactatcggaccaggcggcggtggctgtttcggtttcggcacctggtcagatgactccaattttgaagctgaaatctgggacatggataccctgagcactgtcgggtcaatcagcaccgaagccaatggccagtcctatatgcctgcagttgttgttcccattcccctgattgccagggtcgaagccaatgcctgcagcggcctgggtaaccagctcaagcaattcatcaacggcacctgaatgcagcagtcgtcactgacgcaacctctgattaatattttattcaggtgttcccgggtaggatgacatcatggaaagccttcgaaacactcttgatgcgataagcaaacattcccgcctgacagcatgcgctgtcggcgtttccctgctgctcagcgcctgtgcgggcaaccccaccggcggtgccaatttcgtgctgatgtcggaaaatgccgagatcgagaaagggcgtgagctgcaccaggaaatgctcaaccagaacccgatctacaacgatccggacctgaatgcctacgtggaacgcatcggccagaaaatggcggctgtatcacatcgtcccgaactggactatgtctttaccgttatcgacagcccggacattaacgcctttgccctgccgggtggttttgtctacgtcaatcgcggcctgctgacttacctgaattccgaggcgcagcttgcagccgtgcttggtcacgagattggccacatcactgcccgccatgccgtgcgtcagcaaaccgcctcacggaccgccaatgccgcctcgatagcgc

SEQ ID NO: 679 - DNA, 4000 bp, Escherichia coli
  misc_feature (20)..(20): n is a, c, g, or t
  misc_feature (710)..(710): n is a, c, g, or t
  misc_feature (1099)..(1099): n is a, c, g, or t
  misc_feature (1829)..(1829): n is a, c, g, or t
  misc_feature (1986)..(1986): n is a, c, g, or t
aggtcctcgtccgggaggcnatgtcgtcccccgtggtgaccgtgagccccctcgcgaccctgcgggccgccgcgcggctcatggtcgaccggaacgtccggcggctcgtcgtgacgcgcctcgacgacgtggaagggatcatcacggcgcgggacgtcacggaggggttcctcgaggcctacgcgaaggcctccaagcggggcgcaccgttcggctgaccgcgggcgcgctcacccgggccaaaggaccgggatgagccacaggatcacgagggtccgcacgatcccgccgatgacgttcgagaggacgaaatgcgtgcggggcaccgccttgccatcctcgttgagcagggcgtagaagtagttcacggcggtgtcgctcatgaacgggatcgagaggaggacgaggaggccgatccatcccgtcttccggacgaaggcctcgagggccttgaggaaccgccgccatgtgggcctacgagacatccaccgttcgagccacgggttcaccttgtggcccacgaggaacacgacgatcgcgccgatccccttccccgcgcccacgacggccgccttcacgagggggtcgatgtcgttgtggaacgggaggagggcttccacgggaaggggcagggcgacggccgcgaggaccgcgtagacgaagaggaggacgaggtacgcgacgtcgtccgccgtgtcgagccccaggangaacgtcccgatctcgaaccaaccgatggagaacccctcgcgggccgcgggatgggcccccgcccctaaagctttcgggcggactgccgcgcccgtccaggccgcggacggggatgccctggcggcgggcctcccggagcagccccgcccacgtccgctccgccaggccggacgtctcggagacggacaagggtccgtatcgtaggcggaccagatcctcgccgagacggcccagacgcgcgagcccaatgaagatcgtcgcatccgaggccgggacacggcgtctaaggtccaggagggcgagcgccgccccgcccgtgtaccagattgcgaactccctcgcggccccggggtcccctgcgtcgaccgcgttgcggatcttccccagntcctcgaacgccccgaggagctccacgcgggcggcccctcggaactgggaggcgggaggcctccgggcccgggcggtcagccggcgaaggagcccgtcagggtcgtggaggggacgcatcgaacgccagcctccgagggcctcggggagaccgaggtgcgccccgcggacctccccccacgcctcctcccttgtttcctggaggaacgtgacgagggagccctcccgcatttggaactgggggcacgcgacgcgccggcggacgaggaggacgaggtcgacgtcggagtggcgccggtccgtcccgcgggcgaccgaccccatgacccccgcggcgaggaggtcccgtccgaagcgtccctcgagttcggccgcgacccggcgggcgagggcgaggcgcggggactccatgcggcggcgatggacgccccgggataaaggcttgaactcgcctccctccgacccccgcgaggctttatcccgtccccggccttcgcgcgcagccatgcagctgtcctcggtcgccgtcatcgtgaaggaccgcgcgaaagcctcccgctggtacgaggagaagctcgggttcgaggtccgggacgagcacgggcactgggtcaccgtcgcgcccaagggatccgacgtcgtgatccatctctgcgacgagttctacgacctcgaacccggcaacacggggatctccttcacgacgaagaacgtggcccgggtccagaagnagttcgagaagaagggcgtgaagttcacccaggccacctcgacggaggattggggcacctacgcgatgttcgcggaccccgacgggaatgagtactggctcatcgaggattgaggtctacccgaaaagggccgcgtagctcgcctcgaccgcgggantccggcccccgaggatccgcgcgacctccgtatctagccgagcccgcgcgaacgtcggcaggtcgggccggcccgggagcgccttcttcggcaaccggtggaaggacttcgcgtaatcctcgagccaggcgacgacctcctcccggtagtcttcccggggcggtttcgtccagcgcatgcacatccgcgtgtgggggattgcgtagcactccacgagggagtcgatgatccgctccatctcgcggtacgtctcctcgattgcctcgggcatccttccgcccgactcccggcccttgctcatcggcctcacgatcgtcccacccccgtcactcctcggcctccccgccccgcgcgaccgcgaggacgggccgcagcttctcctgctggttcacgaggaggtccacgaccgcgcggctcatcaccccgcacgcgtcggcgatcttgggatccgcgagccggtagaagacgaagttgccgtccttgcgggtctccacgacgcccgccttgcgcatgaccgcaaggtgttgggacgtcgccgcctgggcgatcccgagggacgtcgcgaggtcggagacggtccgctccccgtggttcaggaggtcgatgatctcgagccgcttggggttcgcgaggaccgcgatgatcctcgctttgatctcgtagaaggactcgtctgtcgcgtccatcgtgtgcgaacaggagcgtggcagtacttgcgccctcgcgaatattcgcatatgcaggtatgttcaaccgtttcggcagggcctaatcacccggcgtcgaagggtccctcggaggcaccacatgccgaacaagctctcgatggtggtcttcagcgggaccgtggacaagctctaccccgccgcgatcatggcgtccggcgccgtcgcgatggggatggacgtggagatcttcctcacgttctacgggctcgactcgttccgccagggccagccccagacgaaccagaagatggacgtgaactacgcagagctcgcgccgatgctcgcgcagctcatgaaagagaagaacgtgccctcgtggtacgacatgctcctccaagcgaagagcatggggaacgtgaaggtccacgcgtgcgcgatgaccctcgacctcatgggcatgaagaaggagcacctcgacccgatcgtcgacgacgtcgtcggcgtgggcgagttcgtgagcaacgcgaaggaaggcgagatcaccctcttcctgtgagggggcgacatccatggtgtctgcggaacagaagattgtcctcgacgcccgaggatcgttctgcccgggcccgctcatggaactcatccgcgggatcaagcaggcgaaggtcggcgaggttctcgaggtgtggtcctcggaccaggggtcccggaaggacatccccttctggatccagaaggccgggcacgagctcgtcggcgtgttcgaggagccgagctacgcgcgattcgtcgtgaagaagctgcgctgaatcggggcgatggccgtgaagaaggtcgtggtcctcggcggcggggtcggcggtacgatcgtcgcaaacctcctcgcgaagcggttccggcccgaggaggccgaggtgaccctcgtcgacaagacggggaaacacgtgtaccagccgggcttcgtgtacgtcgcgttcggccggacgaagccgaagtccctcgtacgggacgagcggaagctcctccggaagagggtccgcctcgtcatcggcgaggccgtgcggatcgatcccgcggggcggaaggtccacctcgcggacgggaccgccctggcctacgaccggctcgtcatcgcgctcggcgcgcggctcgtgcccgacgagctccccggctacgccgaggccgcccaccacttctatagcctcgagggagcgctcaagctcaaggaggccctcagggcgttccggggcgggcggatcgtcgtcaccgtggccagcgtgccgtacaagtgcccgcccgcgccctcggaggccgcatgccagctcgactactacttcacgaagaag

SEQ ID NO: 680 - DNA, 4000 bp, Escherichia coli
  misc_feature (3)..(3): n is a, c, g, or t
  misc_feature (81)..(81): n is a, c, g, or t
  misc_feature (2844)..(2844): n is a, c, g, or t
  misc_feature (3231)..(3231): n is a, c, g, or t
  misc_feature (3609)..(3610): n is a, c, g, or t
  misc_feature (3612)..(3614): n is a, c, g, or t
  misc_feature (3617)..(3618): n is a, c, g, or t
  misc_feature (3620)..(3620): n is a, c, g, or t
  misc_feature (3622)..(3622): n is a, c, g, or t
  misc_feature (3625)..(3634): n is a, c, g, or t
  misc_feature (3636)..(3637): n is a, c, g, or t
  misc_feature (3639)..(3652): n is a, c, g, or t
  misc_feature (3654)..(3658): n is a, c, g, or t
  misc_feature (3660)..(3688): n is a, c, g, or t
  misc_feature (3690)..(3692): n is a, c, g, or t
  misc_feature (3694)..(3700): n is a, c, g, or t
  misc_feature (3702)..(3735): n is a, c, g, or t
  misc_feature (3737)..(3743): n is a, c, g, or t
  misc_feature (3745)..(3746): n is a, c, g, or t
  misc_feature (3749)..(3749): n is a, c, g, or t
  misc_feature (3751)..(3755): n is a, c, g, or t
  misc_feature (3757)..(3758): n is a, c, g, or t
  misc_feature (3760)..(3765): n is a, c, g, or t
  misc_feature (3768)..(3770): n is a, c, g, or t
  misc_feature (3772)..(3772): n is a, c, g, or t
  misc_feature (3774)..(3778): n is a, c, g, or t
  misc_feature (3781)..(3781): n is a, c, g, or t
  misc_feature (3783)..(3783): n is a, c, g, or t
  misc_feature (3785)..(3787): n is a, c, g, or t
  misc_feature (3789)..(3789): n is a, c, g, or t
  misc_feature (3791)..(3791): n is a, c, g, or t
  misc_feature (3793)..(3793): n is a, c, g, or t
  misc_feature (3796)..(3796): n is a, c, g, or t
  misc_feature (3798)..(3798): n is a, c, g, or t
  misc_feature (3800)..(3809): n is a, c, g, or t
  misc_feature (3811)..(3812): n is a, c, g, or t
  misc_feature (3814)..(3815): n is a, c, g, or t
  misc_feature (3817)..(3819): n is a, c, g, or t
  misc_feature (3822)..(3832): n is a, c, g, or t
  misc_feature (3834)..(3839): n is a, c, g, or t
  misc_feature (3842)..(3843): n is a, c, g, or t
  misc_feature (3845)..(3846): n is a, c, g, or t
  misc_feature (3848)..(3852): n is a, c, g, or t
  misc_feature (3855)..(3855): n is a, c, g, or t
  misc_feature (3857)..(3859): n is a, c, g, or t
  misc_feature (3861)..(3862): n is a, c, g, or t
  misc_feature (3864)..(3865): n is a, c, g, or t
  misc_feature (3867)..(3869): n is a, c, g, or t
  misc_feature (3873)..(3874): n is a, c, g, or t
  misc_feature (3876)..(3876): n is a, c, g, or t
  misc_feature (3880)..(3880): n is a, c, g, or t
  misc_feature (3882)..(3882): n is a, c, g, or t
  misc_feature (3887)..(3889): n is a, c, g, or t
  misc_feature (3892)..(3892): n is a, c, g, or t
  misc_feature (3894)..(3894): n is a, c, g, or t
  misc_feature (3897)..(3899): n is a, c, g, or t
  misc_feature (3903)..(3907): n is a, c, g, or t
  misc_feature (3909)..(3910): n is a, c, g, or t
  misc_feature (3912)..(3912): n is a, c, g, or t
  misc_feature (3915)..(3916): n is a, c, g, or t
  misc_feature (3919)..(3922): n is a, c, g, or t
  misc_feature (3924)..(3924): n is a, c, g, or t
  misc_feature (3926)..(3928): n is a, c, g, or t
  misc_feature (3930)..(3930): n is a, c, g, or t
  misc_feature (3932)..(3934): n is a, c, g, or t
  misc_feature (3936)..(3937): n is a, c, g, or t
  misc_feature (3941)..(3943): n is a, c, g, or t
  misc_feature (3945)..(3946): n is a, c, g, or t
  misc_feature (3948)..(3948): n is a, c, g, or t
  misc_feature (3952)..(3954): n is a, c, g, or t
  misc_feature (3956)..(3956): n is a, c, g, or t
  misc_feature (3958)..(3958): n is a, c, g, or t
  misc_feature (3960)..(3960): n is a, c, g, or t
  misc_feature (3965)..(3967): n is a, c, g, or t
  misc_feature (3969)..(3988): n is a, c, g, or t
  misc_feature (3990)..(3992): n is a, c, g, or t
  misc_feature (3994)..(3994): n is a, c, g, or t
  misc_feature (3998)..(4000): n is a, c, g, or t
ccncctttagcagtaccatcaagttttgtcataataagaccagtgattggaataattttattaaattcttcaacttgattnattacattttgacctgaggtagcatctaaaactaaaattacgtcgtgaggagcttcaggatctattttttttgttacatttgctatttttttatattcttccattaaattttttttattttgtaatcttcccgcagtatcaattaagacttgattaaaattattagcaattgcttcttcaatagctttataggcaacagatgcagggtctgcaccttgggaagattttgttatctcaacttctactttatttgcccaattttctaattgttcaattgctgcagccctaaaggtatcagatgctgccagcatgactttatttccatttgcttttaatattttactaatttttccaatagttgttgtttttccaactccattaacacccgaaactaatgtggcattaattttttctttcttttgaaaaaaagaggtattttcaagaggcttcatcaaagaaacaatatactctttgagaataatagttatttcatcagtaatatctttacttggatcaattttactatctgaaattatttccttaatttcagatgcagctacaattccaacatcagattgaattaaatattcttcaattctatccaaagttttgtcgtctatttctttttttacaactatatctcttaagccagacgtaaaagcagacgcactttttttaaaaccagatttaaatttatcaaaaattcccattaaatattaatctcaatatttttaatatctgagacaggccctttcatatgaacactattatttgcatcaattgatattgataatttacctaatgcaaattcaatatcagtttttttatcagttaatccattaatgtttgcggctacagctgtagcacatgccgctgttccacatgcctttgttagtccagctcctctttcccaaactttaactttaattaattttctactaataacctttgcaagagtgacattacatttttctggaaaataattatgattttctatttcaggtccaattttttttaggtcatagtcctcaatattatctacaaaaaagacaacatgaggatttccaacattaatagaagtaccacctatatgttcagcattatttttgttaacaattttaatgtttaagttttttgtatctaaatttttgattaatggaatttcatcccaattagtttttgggattccaatttcagtttccactaaattattatctaaaatttttgattttaactccccagaagaagtccaaagtataatttctttatcattattttcttttgataaaagatcagctacacatctagtaccatttccacaagcaccagaaacacttccgtctgaattatagaatgccaattcagcatctttcttatcacttttttggataaaaattagctgatcacatccaataaaattacgatcacaaattttaataatttgatcttttgtgagattataattttgatttctttgatcaataattacaaaatcattgcctaaaccatccattttaaaagctttaatatccatacatagatatttaacttatttattgactttttgaacctctattataggttgttgccgtttccgcaaaaacattaactttgcggtgtctttggaaacaaagagatcgacactagtcagcgaggcttcgcccactagtgcgattactgctgtgcgtaataattatgtttgaaaacttaacaagtaaattcgaagaaattttttcttctttaaaaaaggctccttcacttgatgaagctcaagtagatgagggactaagaggtatcagacaggccctgttagaggctgacgttactttagaagtagctaaagatttcattgaaaatgtaaaaccaaaagttctaggtcaagaaatcatcagatcaacttctcccggggatatggttgttaaaattgtttatgatgagttggttaatctattaggaggatcaaataatgagataaatcttaatgctgtgccaccagttcctatgatgcttgttggattacaagggtcaggaaaaacaactacaactgcaaaattagcaaaatatttagagaccaataaaaagaaaaaagtaatgatggtcagtcttgatatttatagaccagctgctcaagaacaacttagatcacttggagagcaaaataatattttaacattacctattattgagggtcagcaaccaacagatatctgtcaaagagcaattagtgcagccaatttaaatggagctgaaattattttatttgatactgctggtagaactcaaattgatttacaaatgatgagtgaaattaagcaaattgaaaatgtaataaaccctacagaaacatttttagttgcagactcattaacaggacaagtagcagcatctgtagcaaaagaatttaaaaatacagttaatctttctggaataattttaactagagcagatggggatgccagaggtggtgctgctgttagtatgaaatatgtttccgatgttccaattaaatttttaggtattggagaaaaagttgataatcttgaggtatttcaccctgacagaatagctaacagaattcttggaatgggagatattgtatctcttgtagaaaaagctgcacaagatttaggtgaagagaatattaaaaaagcagaggaaaatttaaaaaaaggtcaattttccatgcaagattatttaactcagttgagacaaatgaaaaaaatgggtggtatcgagggaataatgtcttttatgccaggagtntcaaaaatgaaatctcaaatggactcagctggaattgatgaaagtattattactaaaaatgaagcgattattttgtcgatgactaaaagagaaagagagaacccaaaacttatcgatggttctagaaaaaaaagaattgctaatggctctggcacagatccggccactatcaataaattgcttaagcaatttaaaatgatgtctgaaatgatgaagaagatgtcaaaaggaaatctgaaaggtatgtctgataaaggaataccgccagagctatttaatcaattaaaataataaaaaggagaacgaatgttaaaattaagattatcaagaggtggaacaaagaaacgacctgtttacaaagttgttgtagcagatagtcgttttgcnagagatgggagatttattgaaaaagtaggattttttaatcctcttttacctaaagataaaaaagagagagttggtcttgaagctgaaagaattaagtattggttaggtcaaggtgctcagccaacaactagagttgcaagaattttgggtgaaaatgaattaatgccaatgcctgcaaatggtaataaccctaaaaaagcagttccaaaaaaagagagaaaaaaagaaggtgaagaagctccggcagctgcaccgaaagcagcagctccagcagcagaagcggcaccagcagcagaagctcctaaagaagaagctccagcagcagaagcggcaccagcagcagaagctcctaaagaagaagctccagcagcagaagcnncnnnagnngnanaannnnnnnnnnannannnnnnnnnnnnnnannnnnannnnnnnnnnnnnnnnnnnnnnnnnnnnntnnncnnnnnnntnnnnnnnnnnnnnnnnnnnnnnnnnnnnnnnnnnannnnnnntnnaanannnnnannannnnnnatnnngntnnnnntananannnancngnagntnannnnnnnnnngnngnngnnncannnnnnnnnnnannnnnnganntnntnnnnnaancnnnanntnnannnaaanntnaagntnaaaannnaantnaannntaannnnnanntnaannatnnnntnannntnannntnntgannnanntnatgnnnangnantatcnnntnnnnnnnnnnnnnnnnnnnntnnngntgannn

SEQ ID NO: 681 - DNA, 4000 bp, Escherichia coli
  misc_feature (111)..(111): n is a, c, g, or t
  misc_feature (219)..(219): n is a, c, g, or t
  misc_feature (306)..(306): n is a, c, g, or t
  misc_feature (408)..(408): n is a, c, g, or t
  misc_feature (620)..(620): n is a, c, g, or t
  misc_feature (788)..(788): n is a, c, g, or t
  misc_feature (833)..(833): n is a, c, g, or t
  misc_feature (890)..(891): n is a, c, g, or t
  misc_feature (1536)..(1536): n is a, c, g, or t
  misc_feature (1541)..(1541): n is a, c, g, or t
  misc_feature (1604)..(1604): n is a, c, g, or t
  misc_feature (2259)..(2259): n is a, c, g, or t
  misc_feature (2343)..(2343): n is a, c, g, or t
  misc_feature (2909)..(2909): n is a, c, g, or t
  misc_feature (3154)..(3154): n is a, c, g, or t
  misc_feature (3176)..(3176): n is a, c, g, or t
  misc_feature (3446)..(3446): n is a, c, g, or t
  misc_feature (3449)..(3449): n is a, c, g, or t
  misc_feature (3452)..(3452): n is a, c, g, or t
  misc_feature (3454)..(3455): n is a, c, g, or t
  misc_feature (3458)..(3458): n is a, c, g, or t
gttgcgatgatgctgccgatgagaaagtaagcaccgtagtaaggcaaaattgtgcccgcccaaatccactcgacgccgtaaccgagagtgaacaagaacaagccccgccgngcgagccgccatcggatgtcagagatgttgtcgttgcgtagttgcgctgctgcatcgcgattaaagagcagcgcgacgcccatgccggcgaccattacgaatccaacnggaaacggatttgccaaaacaccttcaaacggatgccaccatcgctcaaaaattgacggactcgccgacgctgaaacactttgaaanttcaaatagccgtgatagttgagcacgatgatgccgaacagagcgatcgtgcgcatcacatctaaagacgcaatacgttgatcggggttctcagttcgacgntcactttcgtgcgtcaacattgctaaagccaggtggttacgtctgggtaaacgcgggtgagtggttgttgaacgtccacttgatcgccaacttttggcgcattttcttttgccgaaacaaaaaccattgacgtgtgcatgtgtggtggctcgagcaactcaagacgcttttgtttgaaatgaaacggactttgctcggcacccacgaggtgnactccgtggctagaacctgtcccgatcatcaccagaacaccatcgctggcgacttttacgttgcggtagccggcagttgaaccagcgctaattgctcgcgtatcgagcacatcggctgtgagtttgagcatcgacttatctccgagccaaagttgtgtgccacttcgnacccgaatctttttgtcggcaaattttgcgcgaagttcgcgcaangacgatgcatcaacatgactgatcaaccacggcaagtctgaggcaactttgccgatnntttcgccgacttcttttgcatgatcttgcatcgtgccgtctaatggcggatgcaccgaccagccaacttgcttgagccccgcgccctgcacagcagcttgcattgctgcaacatcacttgtgtcggcgccataacggttcatgcttgagcgcaatttaatgacaatgtcgccgctccaagacgcattcttgaggttctgcacatgttgcagcgaaccaacggtcagcacaacatttttcggcaaatcttttggaatgtgttggccgactggggtcaagaccaaagcagtgcaattagccggcacgtcttgagcttcaaagaccgtgccgacggcgatctgatttgcgatttttacggcgtgcgccatcaagtttgcgcgaccaaagccgtatccgttgcctttgacaactggaatcaaatcgcccaaatcgctcgcagtctgcgaaacgtgacgatcccacgctgccgaatcaacactgagttgcaaagtcactgctattaactttacagccgcttgtttagcgaattactttttgccgttaaccctgtgtgtaatggcgcgtgcgacttcaatcaagatcgtgactgagaacgcactggcaaatgcaatcaagaatgctttggtgtgattgtcggcgaaagatnttccnccaatgaacccgagaagtgacgcataagtcgaccagacacttgcggcgacaatcgcccaaccnataaaccacttacgcggttgcttggtgacaccgcacgaaagcgtgagcagagttcgcccacccggaataaaccttgcagtaatcaaaagtaggccgccgcgattgcgaatttgttcgacgatgttctctagttgcttggcacctttttcggttcgtgttcttcgtttcacgacccagtcgctggcttcacgtccgagaaagtaactcatgttgtcgccgacgaatgcgccggcacctccgcacaaaatcaccagagcgattgaaagatctccggtgccagcagttacgccaccgatgatcaccagagtttcacttggcacaatcggcaacacagaatcaagaaccgcgatcgtgaaaatcaccacataaaaccacggcgaagacgaagtttctttcagccaatcgaagaaagtattaaaaaccgaaagcacgtctagattgtctcagattttttggttagatgtcgggttcttcgtgggtcttgaggcggcgaagattgggtagatgtttcacaatgatgaaagcaacaagagccaatgttgcgccaatttcccacgcttcggctccttcataaaaaatgccaaaaggtagcgcaaccgagattgtcagcgacgcaacagacgccttatgtgtcgtctttgtcagtacaaaccangacgtaaataaaatcaaactggtcaacggaaacaacacaaacattccgccaccaccgcatgccacacccttgccgcctttgaanttgcgcgtaatcggatacgagtgaccaagaatcgcggcaaacaaacttaaatacgacaaaggatcatgcctgtcaccggtgacgccccacgcgagcccaaccgcgagtgcagccttggccatatccatcaagaaaactgcaagaccgaccttccaaccgagattgcgaattacgtttgaggcgcctgggttacccgaaccgactttggtgatatcaagattcttttttctggccacgattgccgcacttggaaaagttccaaaaccatacgcaacgacaaaaatcaaaaccccaattaatatttgcatttacagccccttgcttatgttagtcagcggcaggcagggtcattaggcggtacaacaccatcaatcttttgggacagcaatgccgtcgaagtcagagcaacacgaaacgccgccaattcaaatttctgtttttgacctgagcgcaaagttgcactctctacaacaagtggtgctcgcccctgaaaaattgcaagagcgtttttcatttcttctgacttgagcgccggaattagcaccgacatttcgccgatccgtttnggatacgagtcaattgtgtaggtcgcaatcgattgtgtgttcaaatcgcgcatcgcttgggcgagagtcaacattccacgtgggcttagctgatcgtcggtgatcacgtttttaagtgcagcgtttaacaagttgttcgccaccgagagactctttgaacctttatctagtgcgcgttgcattgagcgtcgcaagaaatcttgctgacgtttgattcgccctaggtcaccagttgggtcttcaanccacgtttgtgacgtcgggtcnaagtatcgatagccagatcttgatcgcacgtatgccaaggcggtatcgccatcaaaatttatgcatcctggcgtcgtgacgttaagccctgtttttttgtcgcgtgtcggatacaagaacggaaccttcacgccatcaacggcagtgacaatttctttgaatgcgcagaagttgatgtttacatagtgatcaacaggcacatcaaaattttgcttgatggtcgcgacaagacgattcgggtctgtgctttgaaatgcagagttgattcgnttntgncnngtngtgcctgcgatgtcaacccataggtctcgtggaaacgaaagtattgccgcacgtttcgtgctcgggtcgatgcgaataatcatgatcgtgtcgcttcgttcaccagaacttgtacggtcaccgataccgccagatgttgcgctgcttgggtcagtgcatgctccgttatctgagccggtcagcaaaaagttttgtgcatcaagaccctcggtgtccaaatcccatgcgctgccgacaggggaggtttcatcgaactggcccgagttagttggtttgtcgagcgtcaccacgagcctttgattgatcaggccgtttagccatagaagcccggctgcacttgcaaccagcgaggtgatcacaaaaatattgaaaaccaaaattacataatgcagttttggtcgcgcgcgaacgccagtttttgctctttttgcccgcaccatgttgttcttagtttagtggtgcagccagagttacctgagcagtgatctcgcgtgattcaccatctgaactcgactcggtatattcaatttcttgaagagcgc

SEQ ID NO: 682 - DNA, 4000 bp, Escherichia coli
atcttggagatataactgcccaagtcggtactgtgcagtcgagtcgtgagggttcagtgcgaccgccttctcgagcgcttgcacagcaccgctgctgtcaagcgagagacggcgcattccaccgagatcagaccacgcttccgcatactcaggacgcaactgaatactcttctcaagctcgtcgatcgatttgtcgatttggttctctgctccccagattttcgctcttaagtaatgcgtatacgctgcggcccgcacatcgccttggagtttgatggcctggtcgagatggtcacctgctgaaatcagttcgccggcttgcgcgagaatcaatgacaggttgacgtgggcttccgcgagcgccgggttgagttccagcgctttttcgaactcctggcgggccgccttcgcttcgatgaagcgacttaacaccatgccgtactgattgtgcacgcctgctgaatctggacgtagttgcacggctgccgccatctggttgatggattcgctacgttctcctatcagggccaacgctattcccaacaacaaatgagcgtcaacattgcggggatcgtccgcaacgatttggcgtaactcgaccacagcttccgcagtcgcgcccttcgaaagcaaagattcggccttctcgagtgaattttgccctgcgcgaagatgttctgctgagaggaatgcggcgagtaacgcaactgtcgcgaaacagggtttgacgtgggcccgtctcatcgatatcccaatccagctaaatccattcggctgattctgcttcggctgtcgaaatgccccattagaaatgtatgccagtgaaatcgccactctgtcccatctcaggaagaaaatattttcgttgcaatgcagcgcttctcctgctctattaacagcaagtttcgctctcttatgttcctcttacaaccagccgacgacgaccgtcgcggacacgttccgtataacgaattattggagctcggcgacgagcccctcatgcaggaacttcaagccgggaacacggacgcatttgcgatcgtcttcaaacggtatcatcggctggtgcatgccacagccctgcacattttgcgagacgcgcatgaagctgaggacttaacgcagtcagttttcttggaaacctatcgccgcgcggcacaatttgacgcccgccgaggcactcttaaagtgtggcttcttcagtacgcgtatacccgcagcatcaaccggaggaattacctgttagtgcggcacttctacagccaaacagaagtggatgccgcggatgaggaggcaagcctttggtctccatcacgtcttcagtttcaagaagcgagtcggctcgcaaatgaagcgcttgacgccctgccggatgtgcagagaaagacgatcgaaatgttcttctttgaaggcttaagttttaaagaaatagccaaacaaagaaatgagagcttgtcgagcgtgcgtcaccactactatcgaggtttagagcggcttcgttcgtacctcgacagccgcccgcaaagggaccagcgtgcgaagcagttgtcgctagaaagaggtgcggcgtcgtgaagcacgagcgtttcaaagagctctgtgccgccgctagtattgggcaggcgacgcatgaagagctcgtggtgttggagcggcacaccgctcaatgtgacggttgccgccaggcgtattttgattatttgagcgttgcatcgctggagtttgccgccgccaagcaagctccgaccctgtccgtgaaagattttgaggaatcgatcaactcagagcttttcacgcgccgcttcttcgatcgcgctaaacaggaaggaatcgtattttctcgagaagtcgacaccagcataaagcttaggccggtccctctcaggcactccagaaaatccgcctggcaatactggcgaatcgctggcgcagccgccctttttgttgcggtggccgcctcgggtggctatgtgtactggaacggctcgataaaaaccaggaaaactacatctgagcaaacgcaaaatagcgtccccaaagggcagtcgcctgcgacaagctttgacgcgcgcatccacgagttaatggccgcgaatgcggacttcaaacttcagatcagctatctacaggccgaactgcgcaaagccaacgatcaactggtcgcaaccgaaagcgacctgcgagaaacatctcaggatcgccaaaaggtggcagctgctcgcgacgttttgcagtccaagctcgacgaggcgcatcgcgaactcgataaatcagaatcgatcgtagcaagcgcccaacaggaagcaaactctcagcgatcgaatgccaacgacacggaagcgaagttgatcgccgatgaaattaaactccatgatctggatgaagagttgaaggaaaagtctgcgctgctcgatcaggagcgccaactcctaggcgcgagtcatgacgtcacagatctgatgggcgctcgcaatcttcacatcgtcgatgtagtggatacagatccgcacggcaagagccgcccagccttcggacgagtctttttcactgagggcaaatcgctcattttctatgcgtacgatttaaatgagcagaagatgcataaggctaactatcaataccaggtttgggcgaaaaaggaaggaccaaatcaacggccgttgaggctaggcattttttattcagatgataaggtacagcgccgttggatgttccgatgcgatgacccgaagattctacgggaaattgattcggtgtttgtgacgttcgagcgctcggacagcgatccgtcacatccggaaggttcgagtctcatgtatgcgtacctacgcggccaggcaaatcatccataggttgctcaccttgctgccggcgtccaccgcatggcagtgacaattcagaagcgcgtccgttcatccagttgctcaataaccttcaaccagaaaaggagggtgtgggacagatcgcgcacgcgccaggaatacttagcaaaagggggtgttcatgcgaagcaagcgcgttcttgtgtgtggatttgttgcctgcctaatcgcctcagttgttgtcgtgctcggtcccggcgcacagtacacgctcgcgcagaccgaaaaggcctccatatccggtcgcatcaccgatcagagcaacgcggtcatgcctgacgctgaagttgagctaaagaacaccgacactggtatcgtcacggtgacgaagaccaacgaccaaggcgtatacgtgtttccgtctttggccccgggcaattatgtaatgaacgtgcgaaagcaaggttttcgcacagtgtcggtcatggacgtcaagctctacgtgcaagacaacgtttcacgaaattttgtgctacaggtgggatcctcggtcgagtcggtcacggtaactgccgaatctggcgcgggattagttaacgtgacgggttccgaactggggactgtgatcacgcaggaagccatccacgaattaccgctcaatggacgcaattttacccagctgctgaccctcaccccaggcgccacgccgatcagcaccgcccaaagctcaggtgtcggggtaaacgatctggccgtgctaggcgtgcctacagccagtgtgtctcagccgtccattcagggtcaggccaaccgttcgaacctatacatgttggacggtgtcatcaacacggagttgaacaccagcacctatgtgattccgccgattgttgacgccattcaagagttcaaggtgcaatcgcacgatgacaaggccgaatacggtggcgttctcggtggcgtggtcagtgttgtgactcgtagcggcggcaaccagcttcacggaagcgcgtgggaattcgtgcgcaataacgcttttgacgcccgcgatccgttccgggacgagttccgcagctctccctctgcctttcaccagaaccagtttggggcgacggtcagcgggcctgtcttcattcccaaggtgtacaacggacgcaaccgcacattcttcctgttcggat

SEQ ID NO: 683 - DNA, 4000 bp, Escherichia coli
  misc_feature (1958)..(1958): n is a, c, g, or t
  misc_feature (1986)..(1986): n is a, c, g, or t
  misc_feature (1988)..(1988): n is a, c, g, or t
  misc_feature (3526)..(3526): n is a, c, g, or t
tactgctcccaacgcagggaggctttatccgctaagcgatacaggactacaccggcaggaccaattggcactaggaaccagaagaaaactccaaaaacatggcgatgggcgccaatgatggctttctcaagtgctaatgcaattatctcggtctcggatagatgcgcaacatcaatatcaccccctagccagttttgaagggcaatacgagctgctggtacatcatgattttgaatagcctcatgaacctctgtaaacgaatggctaaattgtctaaagccaaaaaagagataaacaatgatgatgttccacacaaaagccaacagaggatgaaccacaaatgccacgatataaatgatgaatacaaaaacggtaggtagtccaaagcccactaagcaggctagcctagcgcctactggagtggccccatcagcagatttgccaccaaactctttagcaacccaatccagccaaacagtactcatcctccgaatccaatgggatgcagtaacaggccgatattgctcggcaatcagagcgaagagaattgagaaaaaggtcatgctttaagaagatgatatagatttcgtaacataccagcagttgcgccccaaataaaacgatccgcatagggcattgcgtaaaaacggcgtgaaccctctgggccttgccagacccgaatctcatgattagcaggatccattaagaagcgtaaggggacctcaaatacatccgcaacctcaaaaggatctggccgatattgaggaatgggctttaccaaagcaaccaccggcgtaacctgataccccgagaccgttaaatattccggcaataagccaagcacctcaatgctctgacttggaagcccaatctcttcctcgctctcccgaattgcagtggcaacaagtgactcatcgccctcatccatccgcccccctggaaaactaatctgccctgcatggtcatgcaaatgatccgtgcgctgggttaatagaacatgtaagccgcttgcctgcatcacaagaggtatcagaacggccgctttcgtagtaatcccccgctcttgtttacgcgtaatgatattgctggctaagacatgacggttttcatcggtaatctctggagaccatgtgggtgcagctttaaactgagcccgaagtccactctcgcaacacaaggtctctggcaccggcttttgattaatacaacgacgatcgatgggcactaaacatggattaaatccaggtggtgccgctaagctttttttgagagagtccagagtgtttgacatggatccattttaggtgatttaaacaaacaaaaaggcgaccgaggtcgccttaatggatgacagagtagattactctgctactgtctgagtaactgtttctttaacgcgcgcctttagcttctctttaatacgagcagacttaccagaacgatcgcgcaagtaatacaacttagcacgacgcacatcgccacgacgcttcacttcaatacttgcgattaatggtgaatacgtttggaaagtacgctccactccttcgcccgatgaaatcttacgcacgatgaagcttgagttcaggccgcggttacgtttagcgattacaacgccctcaaaagcctgagcgcgcttgcgagtaccttcaaccacatttacgctcacaactacggtatcgccgggagcaaaacttggaattgttttgttggcggttagacgagcaacttcttcttgctcgattttttggatcaagttcattacaactccttaggcatcatgttggcgttaatcccgtgatcaatcagcgggcccaatagaggatgcagttaaaacaattctgccaaaccaagactcttcattacgaagagagtttctttaaaaaaagctcatcatcttgatttaacaacccatttgcgcgcgcagcctcaatgaggtccgggcgacgctttaacgtcanctctaaagacatttgccgacgccaatcnantattttagcgtgatgtccgcctaaaagcacgtctgggacgcataaattttcataaatttcaggccgggtatagtgggggtggtccaaaaggccattgacaaagctatcttgcaaggcggagttctcatcccctaacacccctggaatcaagcggatcatggcatccataatagccatggcagggatttcacccccggaaagcacaaaatctccaatggaaagctcaaaatctatattgcggtcaataaagcgttgatcaactgcctcgtaccgtccgcaaataagggttaaattgctgtatttgagcatatctgtcgctaacttctgggaaaatacctttccctgtgggcttaataagcaaactggcccagacgaaatctgagctttatgatgggaatttcgaattgcggccaaggtatcctccaagggtttaatgagcatcaccatgccaggaccacccccataggcccgatcatccacagttttacgagaatcttcgcaaaaatccctgatattccatgtacttacagttgtaagtctttgctcacatgcgcggcctgttaccccgctttttgtcaaagcagtaaacatttcagggaaaagggtcaccacatcaaagtgcatataggtcattaaatcacttactcactccaattgggctgccaagcaaccacaatggttccaatacctccaggatcgctcgcctgaagatcgactgaccttacaagggctggtacaaaaggaattaattctttgcctaccgtcatgacgggatgggccccaaattcagagatctcatccagatacccgagttgagtaccctcctcattaagtactctgcatccaattagatcaatccagtaataggagtctacctccgccttagggaagttagctctaggcagctttaacgaagagccctttaaaaacaaagcggcgtcacgatccgtaatcccatcaagaaccataattacatatccgctatgtaattttgcttgggtcaccgtgtaagtcgcatcgatgggggcaccacgcgtgccatcccgttgcacataaatctgcttgcaatgaagcagtgcgatggggtcttgggagtaagggcgaaccttaatatgtcccttaagaccttgggcatcaaatacttgcccaagttctaccagatcagaaggaggctgatgactcacaacacctccataaaaactcgttagccagttaattaggctgcgggatgatccttgatcaagcgcttgacggttggagagatctgagcaccaacgccagtccaatacgttaaacggtcttgagcaagacgcattgcctgctccttttcagatgccttgggattaaaataacccaagcgctcaatgtaattagagtcacgacgattttgtttatcggtagcaacaatgctataaaaggggcgcttttttgagccgccgcgtgcaagtcgaatgacgaccatagttattccttaaaatcctagtaaaacgggttaattaattggttaattacatcgttttcctgcccaattagctatntcaagcagattaatgcgatgcaaacttcagaaaacctcatattctagacgaaaacccttataaactctagacaccttatgaagatttatccgagtagacggtaaaaatatatataaatcaatgacttataatgtactaatggctaagcaattaatcctgtcctgcaaacgaatacagcgaactctctttttgatgggtggggtctgcttattaggtgcttgcgccaatatcgtccctccatgtgctggtaaaaatacccctcccgccgccgaacttcatggaacgcactgggaactatctcgctggaatctgccaccgaattccatgggcgaggttcgtctgcgttccttgcctaatgatcaaggtcaaaaaattcaagtgcagttcagcggcactcgaataagtggctttggcgcctgcaatcgctttacaggtcagctcacagaagatagtcgcggcttttcaatcacacaa

SEQ ID NO: 684 - DNA, 4000 bp, Escherichia coli
  misc_feature (1990)..(1990): n is a, c, g, or t
  misc_feature (1993)..(1993): n is a, c, g, or t
acgaagcgtggctctggctctccccggcgcaccccgaagccgctcgcaggaactcgtgcgtcttctacagcgctttccactcggcgcacgcggacgagcccggggacgtcattcacggcaccgcgtgcaccaatcctcacgcctccgtcgccaacggctgtcgcaaccacgcgcgacacgctcaaaacgaaatcgagggttgggcacacgcgacgcacacctacgcagaaggcttcggcaaagccaagggtccgggtgactgcaagcgatacgccaagcaacacggatacccgagttttctcttcatcaacgaaaagcacccgtccgcgcagcaccgtttcagttgcgcgtactacctcagcaacggggcgggcgaggttgagccgggatgggggccgtactctgcgtcgacgcaaatcgtcaacagcgggaacgacgacattcacattctcgggtgcgccgacgactcgaagacgccgctcgaagggtgcgcgtgagccgagctcggcgtcgtccgtcgtcgagacattttccccgacagacgtcccgagcgacaaagtgcaagacacacaagacatcatttaccactacagtatactgtacattaaacgagaatcgcggcaccggcgccggcgcgcgcggcgacccgccggacggcgtccgcgtcgtgtaataattccacgaatgaacaaagaaatcatcgtcgagctaacttgcgttcgtcgctatcgatcttgccgccgagagcctcttcgagttccgaaacgcccgccgcatcggtgtccgttcgcccgcttaagaggctcgagaaccagttgtacgtcgacgttccgagtccgagtcgactttgtaagctacatttcgagtcagccatttcgtccgtgaaccggtcggagtcgcagtgacagctgtgacctttcggttcgttgaagttcaacaccgacgtcttcaccgggcacaacccaaacgtttgatcgagcaacgtcttgaacttattatctcgcgcgacggcaacgatggtgagctcgatcccagaattcggtgtggcgaaaatatcatcccacgcaccgtgatcgactctcaagtacgccgtcggcgtggcctttccatcggcatccgcgctcgcgcccgcgagatagactgagtacccgtactgcgcgacgagcttaacttcccccagtaacgccttacgctgcgccttgctcgtaatctcacgtcgccaaataatcgtactgacttttccactcgccaaacctttcttgaaccgcgcgaattgcgagcgagagcgcttcgcgtcgttgatcaaaaccgtcagcttcgccttgggcgacgtcttcgcgatttgctcaaactcctcatcgagctgtcgactcactcgtcgatcgttccataacttctccactatcgaattgtcgtgtccgagatccttcagcgtcgcgctcaacgtctccaccgcgcgctcgtccacgtacgtcctcgtctcgcactcaaacgctcccgcgttcgccatcgcgttcacccaaaatcccatcttcgtcgccatccccgcgtccacgcttccccgccttcgcatcactctcgcatcgtcgccctcgcgtccggaccctggttccggcaatccgatcgtcatcaccacgcacggtcccggcgcgtgtctcgctcgcaccgtcaacgccagctccgccgcgatgaaatccgcccgcgcctccctcgcgctgtagtgacacgcccggtgctcgaaccacgatcgctgcgtctctttcagcgttcgcacgcaccgcgcgtccagcgccgggtcgtacgcgccgcccagcgatacctgcgcgagtccgagcgcgagcgcgacgacggtggcgagcgcgacgcacgcggcgcacgcgcggccgcgcttgacgccctggcgcagcgcgcgcgagcgccgacgaagttgctctttgctcagccccatctcggcgcgacgaggacgcgcgcgcgggcgtcgacgaatgcngancgatcgatcgatgtaatcgcgtcgcgacgctgttacaggacgaggcgccgggacgggacgaagagacgcgacgctagaccggacggagcgcctcgcccccgagcgcggcctcgcgcgcgcgacgagcgatgcgaggcgttaaaagctcgccgaactcgcaccaaaacttgccctgctcgcgctgcgcgagacgcacggcgtcgcgcttggcccaaccggcgcgccgacgatggcgccgcgagcgaccgcgcacgggcaaatcgccgagtttcaacccgcccaggggatcgccggcgtcgacggcgtcgatcacgcgatcctcgatcgtctgtcggtggccgatctgctgcaaaccgacgagctcggtgagggtgttcagatcgaagacgcccggatatcgtctgccgccgacgcgccacgtcggcgtcgtcgcgcaccgcgcgcacgtcaagcacctcgacgcgttcccgcaatcgacgtagtgctgtcgccatcgcgtcgggaggagctcggcgaggagttgtttttgttgcttgcacttctcgcaccacggcgcgccgaggagcgcgacgtcgagtcgacgcagcgcctggccgagcgcgcggattttgtccccatcggtgtcatcgttcgcgcgcgtcgcgctctgcgcctccgcggcgcgacgcgcgcgcgcggagagctcgacgtcgtccttgcgcgcgtgtcgaggctcgcacgcgcgcgtgcgcgcgcggagattgatcgcgagcgccatcgcggcgtcgaatgcgggttcgaactttcaagccgcggggacgcgcgcggaactttgcgacgcgcgcgacgcgccttcgcgagcgcgcgcgagagagaacgtccgtgagtatgattagcatcgcacggcgcgaacgcgcgcgtcgttgagcgcacgatgacgcgtggagagcgccgcgcgcgcggcaacgctgggacaacggccggacgacgcgcgcgcggtgctcgagcgctgtgcgcgatcgcgctcgcgcgcgcgctcgtgggtgacgtttcgcgctactttgtgctcgcgcagacggtcagcacgggagcgccgctggtcggggcgacgaacggcgccgcgcaggcggtgctggacttcgcgagcgcgccgggcggacggtgctcgccgaacgacgactcgaacacgatggcgtgcgaaaagctcgaaccgccgtcgacgaagaattacgcgtcgtttgacttttatgtgaacgacgtcaacggcgcgcggtgcgataagtgtgggagggagtgtagtttggacggcgccgcgtgggcgtattgcggcgcgacgccggtgtggtactttgggttgtcgtacgggcaacaccagttcaaggtgcgaggactcggtggagataacgtcgcggggacggccgtggtgtatgactggatgaatgaagaaccgttgaaggtggagtgggattcgggatattccacgccttcgtcgtacttgaattcaaacgctgtgttgacgtttcatttggcgtcgtcgcggccgagctcaaattacgtgcagtttgaatacagtacgacgaatgattacatcaagacgttcacgcgattatcgattggggtgacatcggtgagcgtgacaccgagttatgggtcgaataggtttacattcagggcgatatccatagagtcgttcacggggaaatcgctcaccgagtcttcggtgaacgagattgagcttttgtacgtcgccgataacgtcaacccctcgttggccttcgtgagtggactcgcaaacggaggaacgacgcagaaaggatcgatggagtacgtaattagcgctttagacgtggacccaacgaatggatacgaatctggattggcaacgctcgacgtgcagctctttcggctggataacggggcaacgtcgccgtcgccgttgcgcgcatggacgacgtatcacacatttagtggcgctcctgtggacaaaaacgtaacggtgactttaacaaacatcgcgtcgctggcgga

SEQ ID NO: 685 - DNA, 4000 bp, Escherichia coli
  misc_feature (1)..(2): n is a, c, g, or t
  misc_feature (4)..(5): n is a, c, g, or t
  misc_feature (7)..(7): n is a, c, g, or t
  misc_feature (9)..(13): n is a, c, g, or t
  misc_feature (16)..(19): n is a, c, g, or t
  misc_feature (21)..(24): n is a, c, g, or t
  misc_feature (27)..(27): n is a, c, g, or t
  misc_feature (29)..(33): n is a, c, g, or t
  misc_feature (36)..(37): n is a, c, g, or t
  misc_feature (41)..(45): n is a, c, g, or t
  misc_feature (48)..(49): n is a, c, g, or t
  misc_feature (52)..(55): n is a, c, g, or t
  misc_feature (59)..(68): n is a, c, g, or t
  misc_feature (70)..(71): n is a, c, g, or t
  misc_feature (73)..(74): n is a, c, g, or t
  misc_feature (76)..(76): n is a, c, g, or t
  misc_feature (78)..(78): n is a, c, g, or t
  misc_feature (83)..(84): n is a, c, g, or t
  misc_feature (88)..(90): n is a, c, g, or t
  misc_feature (97)..(99): n is a, c, g, or t
  misc_feature (101)..(105): n is a, c, g, or t
  misc_feature (109)..(109): n is a, c, g, or t
  misc_feature (111)..(111): n is a, c, g, or t
  misc_feature (113)..(117): n is a, c, g, or t
  misc_feature (119)..(120): n is a, c, g, or t
  misc_feature (122)..(122): n is a, c, g, or t
  misc_feature (124)..(128): n is a, c, g, or t
  misc_feature (130)..(131): n is a, c, g, or t
  misc_feature (136)..(136): n is a, c, g, or t
  misc_feature (139)..(144): n is a, c, g, or t
  misc_feature (146)..(146): n is a, c, g, or t
  misc_feature (149)..(150): n is a, c, g, or t
  misc_feature (152)..(152): n is a, c, g, or t
  misc_feature (154)..(158): n is a, c, g, or t
  misc_feature (163)..(163): n is a, c, g, or t
  misc_feature (165)..(165): n is a, c, g, or t
  misc_feature (167)..(170): n is a, c, g, or t
  misc_feature (173)..(173): n is a, c, g, or t
  misc_feature (175)..(175): n is a, c, g, or t
  misc_feature (177)..(177): n is a, c, g, or t
  misc_feature (179)..(180): n is a, c, g, or t
  misc_feature (182)..(183): n is a, c, g, or t
  misc_feature (187)..(189): n is a, c, g, or t
  misc_feature (191)..(192): n is a, c, g, or t
  misc_feature (196)..(196): n is a, c, g, or t
  misc_feature (198)..(201): n is a, c, g, or t
  misc_feature (204)..(208): n is a, c, g, or t
  misc_feature (211)..(217): n is a, c, g, or t
  misc_feature (219)..(219): n is a, c, g, or t
  misc_feature (221)..(222): n is a, c, g, or t
  misc_feature (225)..(226): n is a, c, g, or t
  misc_feature (228)..(231): n is a, c, g, or t
  misc_feature (233)..(233): n is a, c, g, or t
  misc_feature (235)..(235): n is a, c, g, or t
  misc_feature (237)..(237): n is a, c, g, or t
  misc_feature (239)..(240): n is a, c, g, or t
  misc_feature (242)..(244): n is a, c, g, or t
  misc_feature (246)..(246): n is a, c, g, or t
  misc_feature (248)..(249): n is a, c, g, or t
  misc_feature (251)..(251): n is a, c, g, or t
  misc_feature (254)..(257): n is a, c, g, or t
  misc_feature (261)..(262): n is a, c, g, or t
  misc_feature (264)..(265): n is a, c, g, or t
  misc_feature (269)..(271): n is a, c, g, or t
  misc_feature (274)..(274): n is a, c, g, or t
  misc_feature (277)..(278): n is a, c, g, or t
  misc_feature (280)..(280): n is a, c, g, or t
  misc_feature (282)..(283): n is a, c, g, or t
  misc_feature (285)..(291): n is a, c, g, or t
  misc_feature (293)..(293): n is a, c, g, or t
  misc_feature (296)..(298): n is a, c, g, or t
  misc_feature (300)..(301): n is a, c, g, or t
  misc_feature (303)..(306): n is a, c, g, or t
  misc_feature (309)..(313): n is a, c, g, or t
  misc_feature (315)..(329): n is a, c, g, or t
  misc_feature (332)..(334): n is a, c, g, or t
  misc_feature (336)..(340): n is a, c, g, or t
  misc_feature (342)..(356): n is a, c, g, or t
  misc_feature (359)..(363): n is a, c, g, or t
  misc_feature (365)..(366): n is a, c, g, or t
  misc_feature (368)..(369): n is a, c, g, or t
  misc_feature (372)..(377): n is a, c, g, or t
  misc_feature (379)..(383): n is a, c, g, or t
  misc_feature (385)..(391): n is a, c, g, or t
  misc_feature (393)..(394): n is a, c, g, or t
  misc_feature (398)..(399): n is a, c, g, or t
  misc_feature (401)..(405): n is a, c, g, or t
  misc_feature (407)..(410): n is a, c, g, or t
  misc_feature (412)..(417): n is a, c, g, or t
  misc_feature (423)..(424): n is a, c, g, or t
  misc_feature (426)..(427): n is a, c, g, or t
  misc_feature (429)..(433): n is a, c, g, or t
  misc_feature (436)..(437): n is a, c, g, or t
  misc_feature (439)..(440): n is a, c, g, or t
  misc_feature (442)..(448): n is a, c, g, or t
  misc_feature (451)..(453): n is a, c, g, or t
  misc_feature (455)..(456): n is a, c, g, or t
  misc_feature (459)..(460): n is a, c, g, or t
  misc_feature (463)..(463): n is a, c, g, or t
  misc_feature (466)..(467): n is a, c, g, or t
  misc_feature (470)..(470): n is a, c, g, or t
  misc_feature (472)..(472): n is a, c, g, or t
  misc_feature (476)..(477): n is a, c, g, or t
  misc_feature (479)..(480): n is a, c, g, or t
  misc_feature (482)..(482): n is a, c, g, or t
  misc_feature (486)..(489): n is a, c, g, or t
  misc_feature (492)..(502): n is a, c, g, or t
  misc_feature (504)..(507): n is a, c, g, or t
  misc_feature (509)..(509): n is a, c, g, or t
  misc_feature (513)..(513): n is a, c, g, or t
  misc_feature (515)..(516): n is a, c, g, or t
  misc_feature (518)..(519): n is a, c, g, or t
  misc_feature (522)..(534): n is a, c, g, or t
  misc_feature (536)..(538): n is a, c, g, or t
  misc_feature (540)..(545): n is a, c, g, or t
  misc_feature (550)..(552): n is a, c, g, or t
  misc_feature (554)..(554): n is a, c, g, or t
  misc_feature (558)..(558): n is a, c, g, or t
  misc_feature (560)..(562): n is a, c, g, or t
  misc_feature (564)..(567): n is a, c, g, or t
  misc_feature (569)..(571): n is a, c, g, or t
  misc_feature (573)..(575): n is a, c, g, or t
  misc_feature (578)..(578): n is a, c, g, or t
  misc_feature (580)..(581): n is a, c, g, or t
  misc_feature (583)..(583): n is a, c, g, or t
  misc_feature (585)..(585): n is a, c, g, or t
  misc_feature (587)..(589): n is a, c, g, or t
  misc_feature (591)..(592): n is a, c, g, or t
  misc_feature (594)..(595): n is a, c, g, or t
  misc_feature (597)..(601): n is a, c, g, or t
  misc_feature (603)..(607): n is a, c, g, or t
  misc_feature (609)..(618): n is a, c, g, or t
  misc_feature (622)..(622): n is a, c, g, or t
  misc_feature (624)..(625): n is a, c, g, or t
  misc_feature (629)..(630): n is a, c, g, or t
  misc_feature (633)..(634): n is a, c, g, or t
  misc_feature (638)..(643): n is a, c, g, or t
  misc_feature (645)..(646): n is a, c, g, or t
  misc_feature (651)..(652): n is a, c, g, or t
  misc_feature (655)..(655): n is a, c, g, or t
  misc_feature (657)..(658): n is a, c, g, or t
  misc_feature (663)..(665): n is a, c, g, or t
  misc_feature (667)..(667): n is a, c, g, or t
  misc_feature (669)..(669): n is a, c, g, or t
  misc_feature (675)..(675): n is a, c, g, or t
  misc_feature (678)..(678): n is a, c, g, or t
  misc_feature (680)..(683): n is a, c, g, or t
  misc_feature (685)..(685): n is a, c, g, or t
  misc_feature (687)..(687): n is a, c, g, or t
  misc_feature (690)..(691): n is a, c, g, or t
  misc_feature (693)..(699): n is a, c, g, or t
  misc_feature (701)..(706): n is a, c, g, or t
  misc_feature (708)..(716): n is a, c, g, or t
  misc_feature (719)..(719): n is a, c, g, or t
  misc_feature (721)..(722): n is a, c, g, or t
  misc_feature (726)..(728): n is a, c, g, or t
  misc_feature (730)..(732): n is a, c, g, or t
  misc_feature (734)..(734): n is a, c, g, or t
  misc_feature (736)..(743): n is a, c, g, or t
  misc_feature (745)..(746): n is a, c, g, or t
  misc_feature (749)..(749): n is a, c, g, or t
  misc_feature (752)..(755): n is a, c, g, or t
  misc_feature (757)..(758): n is a, c, g, or t
  misc_feature (760)..(762): n is a, c, g, or t
  misc_feature (766)..(767): n is a, c, g, or t
  misc_feature (771)..(771): n is a, c, g, or t
  misc_feature (774)..(774): n is a, c, g, or t
  misc_feature (777)..(778): n is a, c, g, or t
  misc_feature (780)..(780): n is a, c, g, or t
  misc_feature (782)..(782): n is a, c, g, or t
  misc_feature (784)..(784): n is a, c, g, or t
  misc_feature (786)..(786): n is a, c, g, or t
  misc_feature (791)..(792): n is a, c, g, or t
  misc_feature (794)..(795): n is a, c, g, or t
  misc_feature (797)..(798): n is a, c, g, or t
  misc_feature (800)..(800): n is a, c, g, or t
  misc_feature (802)..(805): n is a, c, g, or t
  misc_feature (808)..(810): n is a, c, g, or t
  misc_feature (816)..(817): n is a, c, g, or t
  misc_feature (821)..(822): n is a, c, g, or t
  misc_feature (824)..(825): n is a, c, g, or t
  misc_feature (827)..(827): n is a, c, g, or t
  misc_feature (829)..(829): n is a, c, g, or t
  misc_feature (831)..(831): n is a, c, g, or t
  misc_feature (833)..(834): n is a, c, g, or t
  misc_feature (836)..(837): n is a, c, g, or t
  misc_feature (840)..(845): n is a, c, g, or t
  misc_feature (850)..(852): n is a, c, g, or t
  misc_feature (854)..(862): n is a, c, g, or t
  misc_feature (864)..(871): n is a, c, g, or t
  misc_feature (873)..(873): n is a, c, g, or t
  misc_feature (876)..(881): n is a, c, g, or t
  misc_feature (885)..(886): n is a, c, g, or t
  misc_feature (888)..(888): n is a, c, g, or t
  misc_feature (890)..(892): n is a, c, g, or t
  misc_feature (895)..(896): n is a, c, g, or t
  misc_feature (898)..(898): n is a, c, g, or t
  misc_feature (900)..(900): n is a, c, g, or t
  misc_feature (903)..(905): n is a, c, g, or t
  misc_feature (909)..(910): n is a, c, g, or t
  misc_feature (912)..(920): n is a, c, g, or t
  misc_feature (922)..(924): n is a, c, g, or t
  misc_feature (927)..(928): n is a, c, g, or t
  misc_feature (933)..(933): n is a, c, g, or t
  misc_feature (936)..(938): n is a, c, g, or t
  misc_feature (941)..(941): n is a, c, g, or t
  misc_feature (943)..(944): n is a, c, g, or t
  misc_feature (946)..(949): n is a, c, g, or t
  misc_feature (951)..(955): n is a, c, g, or t
  misc_feature (957)..(957): n is a, c, g, or t
  misc_feature (960)..(960): n is a, c, g, or t
  misc_feature (962)..(962): n is a, c, g, or t
  misc_feature (964)..(965): n is a, c, g, or t
  misc_feature (967)..(967): n is a, c, g, or t
  misc_feature (969)..(969): n is a, c, g, or t
  misc_feature (971)..(973): n is a, c, g, or t
  misc_feature (975)..(977): n is a, c, g, or t
  misc_feature (980)..(990): n is a, c, g, or t
  misc_feature (992)..(992): n is a, c, g, or t
  misc_feature (994)..(995): n is a, c, g, or t
  misc_feature (999)..(1002): n is a, c, g, or t
  misc_feature (1004)..(1005): n is a, c, g, or t
  misc_feature (1007)..(1012): n is a, c, g, or t
  misc_feature (1015)..(1019): n is a, c, g, or t
  misc_feature (1022)..(1026): n is a, c, g, or t
  misc_feature (1030)..(1032): n is a, c, g, or t
  misc_feature (1034)..(1041): n is a, c, g, or t
  misc_feature (1044)..(1045): n is a, c, g, or t
  misc_feature (1048)..(1049): n is a, c, g, or t
  misc_feature (1053)..(1055): n is a, c, g, or t
  misc_feature (1057)..(1058): n is a, c, g, or t
  misc_feature (1061)..(1062): n is a, c, g, or t
  misc_feature (1065)..(1066): n is a, c, g, or t
  misc_feature (1069)..(1075): n is a, c, g, or t
  misc_feature (1077)..(1079): n is a, c, g, or t
  misc_feature (1083)..(1084): n is a, c, g, or t
  misc_feature (1089)..(1095): n is a, c, g, or t
  misc_feature (1097)..(1098): n is a, c, g, or t
  misc_feature (1101)..(1102): n is a, c, g, or t
  misc_feature (1104)..(1110): n is a, c, g, or t
  misc_feature (1114)..(1117): n is a, c, g, or t
  misc_feature (1119)..(1120): n is a, c, g, or t
  misc_feature (1123)..(1129): n is a, c, g, or t
  misc_feature (1132)..(1135): n is a, c, g, or t
  misc_feature (1137)..(1139): n is a, c, g, or t
  misc_feature (1147)..(1152): n is a, c, g, or t
  misc_feature (1156)..(1156): n is a, c, g, or t
  misc_feature (1158)..(1159): n is a, c, g, or t
  misc_feature (1161)..(1163): n is a, c, g, or t
  misc_feature (1165)..(1171): n is a, c, g, or t
  misc_feature (1173)..(1175): n is a, c, g, or t
  misc_feature (1177)..(1177): n is a, c, g, or t
  misc_feature (1180)..(1180): n is a, c, g, or t
  misc_feature (1182)..(1182): n is a, c, g, or t
  misc_feature (1184)..(1187): n is a, c, g, or t
  misc_feature (1189)..(1193): n is a, c, g, or t
  misc_feature (1195)..(1196): n is a, c, g, or t
  misc_feature (1198)..(1200): n is a, c, g, or t
  misc_feature (1202)..(1208): n is a, c, g, or t
  misc_feature (1210)..(1210): n is a, c, g, or t
  misc_feature (1213)..(1213): n is a, c, g, or t
  misc_feature (1218)..(1218): n is a, c, g, or t
  misc_feature (1220)..(1220): n is a, c, g, or t
  misc_feature (1222)..(1223): n is a, c, g, or t
  misc_feature (1225)..(1225): n is a, c, g, or t
  misc_feature (1227)..(1227): n is a, c, g, or t
  misc_feature (1229)..(1232): n is a, c, g, or t
  misc_feature (1235)..(1243): n is a, c, g, or t
  misc_feature (1245)..(1247): n is a, c, g, or t
  misc_feature (1250)..(1250): n is a, c, g, or t
  misc_feature (1252)..(1254): n is a, c, g, or t
  misc_feature (1256)..(1257): n is a, c, g, or t
  misc_feature (1259)..(1262): n is a, c, g, or t
  misc_feature (1264)..(1265): n is a, c, g, or t
  misc_feature (1267)..(1267): n is a, c, g, or t
  misc_feature (1269)..(1271): n is a, c, g, or t
  misc_feature (1275)..(1275): n is a, c, g, or t
  misc_feature (1278)..(1279): n is a, c, g, or t
  misc_feature (1281)..(1281): n is a, c, g, or t
  misc_feature (1284)..(1290): n is a, c, g, or t
  misc_feature (1292)..(1292): n is a, c, g, or t
  misc_feature (1294)..(1295): n is a, c, g, or t
  misc_feature (1298)..(1299): n is a, c, g, or t
  misc_feature (1306)..(1307): n is a, c, g, or t
  misc_feature (1309)..(1312): n is a, c, g, or t
  misc_feature (1314)..(1320): n is a, c, g, or t
  misc_feature (1322)..(1322): n is a, c, g, or t
  misc_feature (1324)..(1328): n is a, c, g, or t
  misc_feature (1333)..(1339): n is a, c, g, or t
  misc_feature (1341)..(1343): n is a, c, g, or t
  misc_feature (1345)..(1345): n is a, c, g, or t
  misc_feature (1347)..(1355): n is a, c, g, or t
  misc_feature (1359)..(1360): n is a, c, g, or t
  misc_feature (1362)..(1365): n is a, c, g, or t
  misc_feature (1367)..(1372): n is a, c, g, or t
  misc_feature (1374)..(1379): n is a, c, g, or t
  misc_feature (1382)..(1385): n is a, c, g, or t
  misc_feature (1387)..(1391): n is a, c, g, or t
  misc_feature (1396)..(1396): n is a, c, g, or t
  misc_feature (1398)..(1402): n is a, c, g, or t
  misc_feature (1404)..(1408): n is a, c, g, or t
  misc_feature (1410)..(1412): n is a, c, g, or t
  misc_feature (1416)..(1416): n is a, c, g, or t
  misc_feature (1418)..(1423): n is a, c, g, or t
  misc_feature (1425)..(1426): n is a, c, g, or t
  misc_feature (1429)..(1434): n is a, c, g, or t
  misc_feature (1441)..(1441): n is a, c, g, or t
  misc_feature (1443)..(1443): n is a, c, g, or t
  misc_feature (1447)..(1453): n is a, c, g, or t
  misc_feature (1456)..(1458): n is a, c, g, or t
  misc_feature (1460)..(1464): n is a, c, g, or t
  misc_feature (1468)..(1474): n is a, c, g, or t
  misc_feature (1478)..(1478): n is a, c, g, or t
  misc_feature (1480)..(1480): n is a, c, g, or t
  misc_feature (1485)..(1485): n is a, c, g, or t
  misc_feature (1487)..(1487): n is a, c, g, or t
  misc_feature (1489)..(1490): n is a, c, g, or t
  misc_feature (1496)..(1504): n is a, c, g, or t
  misc_feature (1507)..(1507): n is a, c, g, or t
  misc_feature (1509)..(1514): n is a, c, g, or t
  misc_feature (1518)..(1521): n is a, c, g, or t
  misc_feature (1525)..(1525): n is a, c, g, or t
  misc_feature (1527)..(1528): n is a, c, g, or t
  misc_feature (1530)..(1531): n is a, c, g, or t
  misc_feature (1533)..(1533): n is a, c, g, or t
  misc_feature (1537)..(1538): n is a, c, g, or t
  misc_feature (1540)..(1541): n is a, c, g, or t
  misc_feature (1544)..(1550): n is a, c, g, or t
  misc_feature (1552)..(1554): n is a, c, g, or t
  misc_feature (1559)..(1564): n is a, c, g, or t
  misc_feature (1568)..(1568): n is a, c, g, or t
  misc_feature (1570)..(1580): n is a, c, g, or t
  misc_feature (1582)..(1585): n is a, c, g, or t
  misc_feature (1587)..(1598): n is a, c, g, or t
  misc_feature (1600)..(1600): n is a, c, g, or t
  misc_feature (1605)..(1608): n is a, c, g, or t
  misc_feature (1610)..(1617): n is a, c, g, or t
  misc_feature (1619)..(1619): n is a, c, g, or t
  misc_feature (1623)..(1631): n is a, c, g, or t
  misc_feature (1636)..(1637): n is a, c, g, or t
  misc_feature (1639)..(1639): n is a, c, g, or t
  misc_feature (1642)..(1642): n is a, c, g, or t
  misc_feature (1646)..(1647): n is a, c, g, or t
  misc_feature (1649)..(1652): n is a, c, g, or t
  misc_feature (1654)..(1658): n is a, c, g, or t
  misc_feature (1662)..(1664): n is a, c, g, or t
  misc_feature (1666)..(1666): n is a, c, g, or t
  misc_feature (1668)..(1668): n is a, c, g, or t
  misc_feature (1670)..(1672): n is a, c, g, or t
  misc_feature (1674)..(1676): n is a, c, g, or t
  misc_feature (1678)..(1678): n is a, c, g, or t
  misc_feature (1680)..(1681): n is a, c, g, or t
  misc_feature (1683)..(1683): n is a, c, g, or t
  misc_feature (1685)..(1685): n is a, c, g, or t
  misc_feature (1687)..(1687): n is a, c, g, or t
  misc_feature (1689)..(1690): n is a, c, g, or t
  misc_feature (1692)..(1693): n is a, c, g, or t
  misc_feature (1695)..(1696): n is a, c, g, or t
  misc_feature (1699)..(1699): n is a, c, g, or t
  misc_feature (1701)..(1702): n is a, c, g, or t
  misc_feature (1704)..(1706): n is a, c, g, or t
  misc_feature (1710)..(1711): n is a, c, g, or t
  misc_feature (1713)..(1713): n is a, c, g, or t
  misc_feature (1716)..(1720): n is a, c, g, or t
  misc_feature (1722)..(1726): n is a, c, g, or t
  misc_feature (1728)..(1729): n is a, c, g, or t
  misc_feature (1731)..(1732): n is a, c, g, or t
  misc_feature (1734)..(1735): n is a, c, g, or t
  misc_feature (1738)..(1738): n is a, c, g, or t
  misc_feature (1740)..(1741): n is a, c, g, or t
  misc_feature (1746)..(1749): n is a, c, g, or t
  misc_feature (1752)..(1756): n is a, c, g, or t
  misc_feature (1760)..(1760): n is a, c, g, or t
  misc_feature (1762)..(1763): n is a, c, g, or t
  misc_feature (1767)..(1771): n is a, c, g, or t
  misc_feature (1773)..(1773): n is a, c, g, or t
  misc_feature (1775)..(1778): n is a, c, g, or t
  misc_feature (1780)..(1792): n is a, c, g, or t
  misc_feature (1795)..(1796): n is a, c, g, or t
  misc_feature (1800)..(1804): n is a, c, g, or t
  misc_feature (1806)..(1809): n is a, c, g, or t
  misc_feature (1811)..(1818): n is a, c, g, or t
  misc_feature (1922)..(1922): n is a, c, g, or t
  misc_feature (1925)..(1925): n is a, c, g, or t
  misc_feature (1932)..(1932): n is a, c, g, or t
  misc_feature (1949)..(1949): n is a, c, g, or t
  misc_feature (1953)..(1953): n is a, c, g, or t
  misc_feature (1959)..(1959): n is a, c, g, or t
  misc_feature (1976)..(1976): n is a, c, g, or t
  misc_feature (1980)..(1980): n is a, c, g, or t
  misc_feature (1989)..(1989): n is a, c, g, or t
  misc_feature (1991)..(1992): n is a, c, g, or t
  misc_feature (1997)..(1998): n is a, c, g, or t
  misc_feature (2560)..(2560): n is a, c, g, or t
  misc_feature (2837)..(2837): n is a, c, g, or t
nnannantnnnnnttnnnntnnnnttncnnnnnttnntttnnnnnaannaannnncctnnnnnnnnnncnncnncnanttttnntttnnnttttttnnncnnnnntttngnannnnntnnantnnnnntnnttttnaannnnnnanttnnantnnnnnaaaantnannnnttncnantnncnncccnnntnncttnannnnctnnnnnaannnnnnnantnnttnnannnncngnantnncnnnancnntnttnnnntttnntnntttnnnaanttnnancnntnnnnnnnanttnnntnnannnnttnnnnnannnnnnnnnnnnnnnttnnntnnnnntnnnnnnnnnnnnnnnaannnnntnntnnttnnnnnncnnnnngnnnnnnnanntttnncnnnnntnnnntnnnnnnaaaaannanngnnnnnttnncnntnnnnnnnttnnntnnttnnaanttnnttngntttnntnnantttnnnnttnnnnnnnnnnncnnnncntttnanntnnttnnnnnnnnnnnnngnnntnnnnnnttttnnntnaaantnnnannnntnnnannnttnanncnancnnnannanntnnnnntnnnnnannnnnnnnnnaagntnncttnnttnntttnnnnnntnnttttnnccntnnttttnnncntnaaaaanttncnnnncntnaanntnnnnnnncnnnnnnannnnnnnnnccnannaaannnannngncnnnnnnnnannttnaannnntnncnnntttnntttnaanttnngncntncnttttnnanntnnantnnnnttnnntttttnntttnntnnantncntnntnnttnnnnnnaaaannnannnnnnnnncnnnnnnnntnaannnnnntttnncntnnnttnntncnttnnnaaanngnnnnnnnnntnnnaannaaaanttnnnaancnntnnnnannnnnanttncngnntngnannncnnnttnnnnnnnnnnnantnntttnnnnannannnnnnaannnnnccnnnnntttnnnannnnnnnnaannttnntttnnntnnttnnttnnttnnnnnnngnnnaaannttttnnnnnnnannttnnannnnnnntttnnnntnnttnnnnnnnttnnnnannntttttttnnnnnntttncnncnnnannnnnnncnnngnttngnannnnannnnnannannntnnnnnnntnccnttttnantnntngntnnnnttnnnnnnnnnannnccnannnannannnngnncngnnnaaanttnngnttnnnnnnnantnnttnnttttttnntnnnncnnnnnnnantnnnnnttttnnnnnnngnnntngnnnnnnnnntttnntnnnnannnnnntnnnnnnttnnnncnnnnnaaaantnnnnntnnnnnannntttnannnnnncnnttnnnnnnttttttncntttnnnnnnnttnnnannnnntttnnnnnnntttncnttttngntnntttttnnnnnnnnnttncnnnnnntttnnnntttncnncnngntttnntnnttnnnnnnncnnnttttnnnnnnaaangnnnnnnnnnnncnnnncnnnnnnnnnnnnanttttnnnnannnnnnnngnaaannnnnnnnnaaaannanttnaaannannnngnnnnncccnnnantncnnntnnnantnncngnancnntnntnnaantnnannnaaannanccnnnnntnnnnncnntnntnnaantnnccccnnnnaannnnnaaantnnaaannnnnantnnnngnnnnnnnnnnnnnaanncccnnnnngnnnntnnnnnnnntttttttcaaaattttaactactcttgaattaaggtatttataatggaggctggccgcccccatacccctgcttattactggtatttaagaaggcgagccccgnaantccagtncgaattgccggaaccantgcncaaagncaagcaaaagaacccancacnagcaccatngnngaaannacccccagcaaacgctattctgtttccttctgcacaccagtaataatcacagattccagttccggaacttccattagcttctatcggtatttcaatttccggataattttcatcataacctaatttgcttggataacattctgattgttttagatttgtatatccaattggttgatatggtgcaacaaatttatcagaagcatattgagtaggatcatcacaaacatatgctacataatctttgatattaagtccatctattgctgtccacatattactaaatacattctcaattcctctatatataactgaatgacatccgtcatttgatagacaacctgatttcattcctaattcatcacattgtcctgctttctgacctattccccacaaagcatttcctactgctatattaacggcagctccatcaaaatacactgccttaccagttacacttccattagaaaattcttctattttggttattgttctttctgatgctacagaattattccaagcatcagttgctcctattgatacatttctaccaacatacatattncttgaatttgctacaattattctgttaacattattttcagcaattaaggctttttgattaaaccattcagatactcctctacctagtttactttgagaattatagtcagcatattcaactaaatacaacaattgtaatataaagtatctagtatccatttgacaaaatccttcgcctactgcagtcgctaaagttctaaatgctgctattgttttgttatatgcaggaattgttccactaatgctgtgagcatttccttcggcatctatgctaattncatatctaccaacagaaaattctttactatgtttataacctgctctattataatcagatatataaatatattcataatcacctttaacttctcttttgaaccaaaattctggaatccttgtaagtacttctccatttgatccatcaaatttaaaacctggttctccataaaatgctgttatttttttatttttcgtatcataattatatgtaattatatcagaccatggatataaattatcaaaatcgttttgaacttcatccccattttttgttgcatttgcaaccaaacctgtattatcacaaattctctcccattttgaaagaacattatctacaatttttcttctaataccataatttttcccaacaaattctctagcttcagttattgcttcttgtaattctttttcagttacatatatttgagtagaatctaatgtaattgtaacattactagcattatcaacaataacatttatttgaatatgtttttctattttttcagcaatagaattatttatatattctgcattacttcctgcatttgcataagcatataatacttttgcttttgtatccggatcaattgcaaataatccaatttctctaaaataaaatgcactttttgcatcagtatttttaaaaataaaagatacacttgcttgtgtatcccctgttatttttgtttcttcaattggacattctaatacttttgtagttaacgctgttttatctgcagcattaccactcaaatttccgctacctatttcagcatggtcaaattgtattttctttccctgcaatgtttttgctgccaatagggcaccttgctttgttatatagactttttcaaatcccattttaatctttacctcctatttcaatataatcttggcttgctaattgtaaacctaaattagtattttgatttatacttatattttcctttttttcttctgtagttatatttaagtcaatgtaatcttgcctagacactttagaacctatgctttcatctgcatttaatatagtatcttctagtattatatctgtgttcggatcaacattcatatattccatattagaaacaactagtccaatattattttcttgtataattgttatatcctcttttcgttcaaatgctattgcatttagatt

SEQ ID NO: 686 - DNA, 4000 bp, Escherichia coli
  misc_feature (1)..(4): n is a, c, g, or t
  misc_feature (6)..(6): n is a, c, g, or t
  misc_feature (8)..(8): n is a, c, g, or t
  misc_feature (10)..(12): n is a, c, g, or t
  misc_feature (15)..(15): n is a, c, g, or t
  misc_feature (19)..(21): n is a, c, g, or t
  misc_feature (24)..(27): n is a, c, g, or t
  misc_feature (29)..(29): n is a, c, g, or t
  misc_feature (33)..(34): n is a, c, g, or t
  misc_feature (36)..(36): n is a, c, g, or t
  misc_feature (40)..(43): n is a, c, g, or t
  misc_feature (45)..(49): n is a, c, g, or t
  misc_feature (51)..(51): n is a, c, g, or t
  misc_feature (55)..(56): n is a, c, g, or t
  misc_feature (58)..(58): n is a, c, g, or t
  misc_feature (60)..(61): n is a, c, g, or t
  misc_feature (63)..(63): n is a, c, g, or t
  misc_feature (65)..(65): n is a, c, g, or t
  misc_feature (67)..(67): n is a, c, g, or t
  misc_feature (69)..(69): n is a, c, g, or t
  misc_feature (72)..(78): n is a, c, g, or t
  misc_feature (85)..(85): n is a, c, g, or t
  misc_feature (87)..(89): n is a, c, g, or t
  misc_feature (92)..(100): n is a, c, g, or t
  misc_feature (102)..(103): n is a, c, g, or t
  misc_feature (107)..(107): n is a, c, g, or t
  misc_feature (109)..(111): n is a, c, g, or t
  misc_feature (115)..(117): n is a, c, g, or t
  misc_feature (121)..(123): n is a, c, g, or t
  misc_feature (126)..(126): n is a, c, g, or t
  misc_feature (129)..(129): n is a, c, g, or t
  misc_feature (131)..(138): n is a, c, g, or t
  misc_feature (140)..(144): n is a, c, g, or t
  misc_feature (146)..(151): n is a, c, g, or t
  misc_feature (155)..(156): n is a, c, g, or t
  misc_feature (158)..(160): n is a, c, g, or t
  misc_feature (165)..(167): n is a, c, g, or t
  misc_feature (169)..(169): n is a, c, g, or t
  misc_feature (171)..(172): n is a, c, g, or t
  misc_feature (174)..(175): n is a, c, g, or t
  misc_feature (177)..(178): n is a, c, g, or t
  misc_feature (180)..(182): n is a, c, g, or t
  misc_feature (184)..(184): n is a, c, g, or t
  misc_feature (186)..(186): n is a, c, g, or t
  misc_feature (189)..(195): n is a, c, g, or t
  misc_feature (197)..(200): n is a, c, g, or t
  misc_feature (202)..(202): n is a, c, g, or t
  misc_feature (204)..(206): n is a, c, g, or t
  misc_feature (211)..(214): n is a, c, g, or t
  misc_feature (216)..(216): n is a, c, g, or t
  misc_feature (218)..(219): n is a, c, g, or t
  misc_feature (224)..(224): n is a, c, g, or t
  misc_feature (226)..(228): n is a, c, g, or t
  misc_feature (231)..(231): n is a, c, g, or t
  misc_feature (233)..(233): n is a, c, g, or t
  misc_feature (235)..(235): n is a, c, g, or t
  misc_feature (238)..(240): n is a, c, g, or t
  misc_feature (242)..(243): n is a, c, g, or t
  misc_feature (245)..(246): n is a, c, g, or t
  misc_feature (252)..(252): n is a, c, g, or t
  misc_feature (255)..(256): n is a, c, g, or t
  misc_feature (258)..(259): n is a, c, g, or t
  misc_feature (265)..(265): n is a, c, g, or t
  misc_feature (267)..(267): n is a, c, g, or t
  misc_feature (270)..(270): n is a, c, g, or t
  misc_feature (276)..(280): n is a, c, g, or t
  misc_feature (282)..(286): n is a, c, g, or t
  misc_feature (288)..(289): n is a, c, g, or t
  misc_feature (292)..(293): n is a, c, g, or t
  misc_feature (297)..(299): n is a, c, g, or t
  misc_feature (301)..(304): n is a, c, g, or t
  misc_feature (306)..(308): n is a, c, g, or t
  misc_feature (310)..(310): n is a, c, g, or t
  misc_feature (313)..(314): n is a, c, g, or t
  misc_feature (316)..(321): n is a, c, g, or t
  misc_feature (323)..(323): n is a, c, g, or t
  misc_feature (325)..(325): n is a, c, g, or t
  misc_feature (328)..(331): n is a, c, g, or t
  misc_feature (335)..(337): n is a, c, g, or t
  misc_feature (339)..(339): n is a, c, g, or t
  misc_feature (341)..(345): n is a, c, g, or t
  misc_feature (347)..(349): n is a, c, g, or t
  misc_feature (352)..(352): n is a, c, g, or t
  misc_feature (355)..(355): n is a, c, g, or t
  misc_feature (357)..(360): n is a, c, g, or t
  misc_feature (362)..(362): n is a, c, g, or t
  misc_feature (364)..(364): n is a, c, g, or t
  misc_feature (366)..(369): n is a, c, g, or t
  misc_feature (371)..(375): n is a, c, g, or t
  misc_feature (377)..(378): n is a, c, g, or t
  misc_feature (380)..(380): n is a, c, g, or t
  misc_feature (384)..(384): n is a, c, g, or t
  misc_feature (386)..(389): n is a, c, g, or t
  misc_feature (391)..(392): n is a, c, g, or t
  misc_feature (394)..(396): n is a, c, g, or t
  misc_feature (398)..(401): n is a, c, g, or t
  misc_feature (403)..(410): n is a, c, g, or t
  misc_feature (413)..(416): n is a, c, g, or t
  misc_feature (420)..(421): n is a, c, g, or t
  misc_feature (428)..(429): n is a, c, g, or t
  misc_feature (431)..(436): n is a, c, g, or t
  misc_feature (441)..(445): n is a, c, g, or t
  misc_feature (447)..(449): n is a, c, g, or t
  misc_feature (451)..(457): n is a, c, g, or t
  misc_feature (459)..(460): n is a, c, g, or t
  misc_feature (462)..(464): n is a, c, g, or t
  misc_feature (466)..(469): n is a, c, g, or t
  misc_feature (471)..(475): n is a, c, g, or t
  misc_feature (477)..(478): n is a, c, g, or t
  misc_feature (480)..(480): n is a, c, g, or t
  misc_feature (483)..(483): n is a, c, g, or t
  misc_feature (485)..(486): n is a, c, g, or t
  misc_feature (489)..(491): n is a, c, g, or t
  misc_feature (493)..(493): n is a, c, g, or t
  misc_feature (496)..(498): n is a, c, g, or t
  misc_feature (500)..(501): n is a, c, g, or t
  misc_feature (503)..(506): n is a, c, g, or t
  misc_feature (509)..(510): n is a, c, g, or t
  misc_feature (512)..(512): n is a, c, g, or t
  misc_feature (514)..(516): n is a, c, g, or t
  misc_feature (518)..(518): n is a, c, g, or t
  misc_feature (520)..(525): n is a, c, g, or t
  misc_feature (527)..(530): n is a, c, g, or t
  misc_feature (532)..(533): n is a, c, g, or t
  misc_feature (535)..(535): n is a, c, g, or t
  misc_feature (540)..(543): n is a, c, g, or t
  misc_feature (545)..(546): n is a, c, g, or t
  misc_feature (548)..(555): n is a, c, g, or t
  misc_feature (557)..(559): n is a, c, g, or t
  misc_feature (561)..(563): n is a, c, g, or t
  misc_feature (566)..(569): n is a, c, g, or t
  misc_feature (572)..(576): n is a, c, g, or t
  misc_feature (579)..(586): n is a, c, g, or t
  misc_feature (589)..(592): n is a, c, g, or t
  misc_feature (594)..(594): n is a, c, g, or t
  misc_feature (596)..(598): n is a, c, g, or t
  misc_feature (600)..(602): n is a, c, g, or t
  misc_feature (605)..(605): n is a, c, g, or t
  misc_feature (610)..(614): n is a, c, g, or t
  misc_feature (618)..(622): n is a, c, g, or t
  misc_feature (624)..(625): n is a, c, g, or t
  misc_feature (627)..(627): n is a, c, g, or t
  misc_feature (629)..(633): n is a, c, g, or t
  misc_feature (638)..(641): n is a, c, g, or t
  misc_feature (643)..(644): n is a, c, g, or t
  misc_feature (646)..(652): n is a, c, g, or t
  misc_feature (654)..(661): n is a, c, g, or t
  misc_feature (663)..(664): n is a, c, g, or t
  misc_feature (668)..(668): n is a, c, g, or t
  misc_feature (670)..(675): n is a, c, g, or t
  misc_feature (678)..(678): n is a, c, g, or t
  misc_feature (681)..(682): n is a, c, g, or t
  misc_feature (685)..(687): n is a, c, g, or t
  misc_feature (689)..(690): n is a, c, g, or t
  misc_feature (692)..(694): n is a, c, g, or t
  misc_feature (698)..(699): n is a, c, g, or t
  misc_feature (701)..(702): n is a, c, g, or t
  misc_feature (704)..(704): n is a, c, g, or t
  misc_feature (708)..(712): n is a, c, g, or t
  misc_feature (717)..(717): n is a, c, g, or t
  misc_feature (719)..(720): n is a, c, g, or t
  misc_feature (723)..(726): n is a, c, g, or t
  misc_feature (728)..(730): n is a, c, g, or t
  misc_feature (732)..(733): n is a, c, g, or t
  misc_feature (736)..(736): n is a, c, g, or t
  misc_feature (739)..(740): n is a, c, g, or t
  misc_feature (745)..(745): n is a, c, g, or t
  misc_feature (750)..(751): n is a, c, g, or t
  misc_feature (753)..(763): n is a, c, g, or t
  misc_feature (765)..(767): n is a, c, g, or t
  misc_feature (769)..(772): n is a, c, g, or t
  misc_feature (778)..(778): n is a, c, g, or t
  misc_feature (780)..(782): n is a, c, g, or t
  misc_feature (784)..(786): n is a, c, g, or t
  misc_feature (788)..(788): n is a, c, g, or t
  misc_feature (790)..(791): n is a, c, g, or t
  misc_feature (797)..(797): n is a, c, g, or t
  misc_feature (803)..(803): n is a, c, g, or t
  misc_feature (806)..(807): n is a, c, g, or t
  misc_feature (809)..(813): n is a, c, g, or t
  misc_feature (815)..(820): n is a, c, g, or t
  misc_feature (822)..(827): n is a, c, g, or t
  misc_feature (829)..(833): n is a, c, g, or t
  misc_feature (838)..(839): n is a, c, g, or t
  misc_feature (841)..(842): n is a, c, g, or t
  misc_feature (844)..(844): n is a, c, g, or t
  misc_feature (849)..(851): n is a, c, g, or t
  misc_feature (853)..(854): n is a, c, g, or t
  misc_feature (856)..(858): n is a, c, g, or t
  misc_feature (863)..(864): n is a, c, g, or t
  misc_feature (870)..(872): n is a, c, g, or t
  misc_feature (875)..(879): n is a, c, g, or t
  misc_feature (881)..(881): n is a, c, g, or t
  misc_feature (883)..(888): n is a, c, g, or t
  misc_feature (890)..(891): n is a, c, g, or t
  misc_feature (893)..(895): n is a, c, g, or t
  misc_feature (898)..(898): n is a, c, g, or t
  misc_feature (900)..(904): n is a, c, g, or t
  misc_feature (906)..(906): n is a, c, g, or t
  misc_feature (909)..(913): n is a, c, g, or t
  misc_feature (915)..(916): n is a, c, g, or t
  misc_feature (918)..(918): n is a, c, g, or t
  misc_feature (921)..(923): n is a, c, g, or t
  misc_feature (925)..(925): n is a, c, g, or t
  misc_feature (928)..(928): n is a, c, g, or t
  misc_feature (930)..(931): n is a, c, g, or t
  misc_feature (935)..(936): n is a, c, g, or t
  misc_feature (938)..(940): n is a, c, g, or t
  misc_feature (945)..(945): n is a, c, g, or t
  misc_feature (947)..(949): n is a, c, g, or t
  misc_feature (952)..(952): n is a, c, g, or t
  misc_feature (954)..(955): n is a, c, g, or t
  misc_feature (961)..(962): n is a, c, g, or t
  misc_feature (964)..(965): n is a, c, g, or t
  misc_feature (968)..(969): n is a, c, g, or t
  misc_feature (971)..(971): n is a, c, g, or t
  misc_feature (975)..(975): n is a, c, g, or t
  misc_feature (977)..(978): n is a, c, g, or t
  misc_feature (980)..(981): n is a, c, g, or t
  misc_feature (983)..(985): n is a, c, g, or t
  misc_feature (987)..(989): n is a, c, g, or t
  misc_feature (991)..(991): n is a, c, g, or t
  misc_feature (994)..(994): n is a, c, g, or t
  misc_feature (996)..(996): n is a, c, g, or t
  misc_feature (999)..(999): n is a, c, g, or t
  misc_feature (1001)..(1004): n is a, c, g, or t
  misc_feature (1006)..(1006): n is a, c, g, or t
  misc_feature (1010)..(1011): n is a, c, g, or t
  misc_feature (1013)..(1013): n is a, c, g, or t
  misc_feature (1016)..(1016): n is a, c, g, or t
  misc_feature (1018)..(1018): n is a, c, g, or t
  misc_feature (1020)..(1023): n is a, c, g, or t
  misc_feature (1025)..(1025): n is a, c, g, or t
  misc_feature (1027)..(1027): n is a, c, g, or t
  misc_feature (1029)..(1030): n is a, c, g, or t
  misc_feature (1033)..(1033): n is a, c, g, or t
  misc_feature (1036)..(1036): n is a, c, g, or t
  misc_feature (1039)..(1042): n is a, c, g, or t
  misc_feature (1044)..(1047): n is a, c, g, or t
  misc_feature (1049)..(1049): n is a, c, g, or t
  misc_feature (1051)..(1051): n is a, c, g, or t
  misc_feature (1053)..(1055): n is a, c, g, or t
  misc_feature (1059)..(1059): n is a, c, g, or t
  misc_feature (1063)..(1068): n is a, c, g, or t
  misc_feature (1070)..(1071): n is a, c, g, or t
  misc_feature (1074)..(1076): n is a, c, g, or t
  misc_feature (1078)..(1091): n is a, c, g, or t
  misc_feature (1094)..(1094): n is a, c, g, or t
  misc_feature (1096)..(1098): n is a, c, g, or t
  misc_feature (1100)..(1121): n is a, c, g, or t
  misc_feature (1123)..(1128): n is a, c, g, or t
  misc_feature (1130)..(1140): n is a, c, g, or t
  misc_feature (1142)..(1158): n is a, c, g, or t
  misc_feature (1160)..(1163): n is a, c, g, or t
  misc_feature (1165)..(1187): n is a, c, g, or t
  misc_feature (1189)..(1202): n is a, c, g, or t
  misc_feature (1204)..(1211): n is a, c, g, or t
  misc_feature (1213)..(1230): n is a, c, g, or t
  misc_feature (1232)..(1238): n is a, c, g, or t
  misc_feature (1240)..(1244): n is a, c, g, or t
  misc_feature (1246)..(1280): n is a, c, g, or t
  misc_feature (1282)..(1290): n is a, c, g, or t
  misc_feature (1292)..(1313): n is a, c, g, or t
  misc_feature (1315)..(1316): n is a, c, g, or t
  misc_feature (1318)..(1325): n is a, c, g, or t
  misc_feature (1327)..(1332): n is a, c, g, or t
  misc_feature (1334)..(1335): n is a, c, g, or t
  misc_feature (1337)..(1338): n is a, c, g, or t
  misc_feature (1341)..(1342): n is a, c, g, or t
  misc_feature (1344)..(1345): n is a, c, g, or t
  misc_feature (1347)..(1353): n is a, c, g, or t
  misc_feature (1355)..(1357): n is a, c, g, or t
  misc_feature (1359)..(1364): n is a, c, g, or t
  misc_feature (1366)..(1366): n is a, c, g, or t
  misc_feature (1368)..(1370): n is a, c, g, or t
  misc_feature (1374)..(1374): n is a, c, g, or t
  misc_feature (1377)..(1385): n is a, c, g, or t
  misc_feature (1387)..(1398): n is a, c, g, or t
  misc_feature (1400)..(1402): n is a, c, g, or t
  misc_feature (1410)..(1410): n is a, c, g, or t
  misc_feature (1412)..(1412): n is a, c, g, or t
  misc_feature (1417)..(1418): n is a, c, g, or t
  misc_feature (1420)..(1421): n is a, c, g, or t
  misc_feature (1424)..(1425): n is a, c, g, or t
  misc_feature (1427)..(1429): n is a, c, g, or t
  misc_feature (1431)..(1431): n is a, c, g, or t
  misc_feature (1441)..(1441): n is a, c, g, or t
  misc_feature (1446)..(1446): n is a, c, g, or t
  misc_feature (1448)..(1451): n is a, c, g, or t
  misc_feature (1458)..(1458): n is a, c, g, or t
  misc_feature (1482)..(1483): n is a, c, g, or t
  misc_feature (1488)..(1489): n is a, c, g, or t
  misc_feature (1509)..(1509): n is a, c, g, or t
  misc_feature (1512)..(1515): n is a, c, g, or t
nnnnananannntanatannnatnnnnantatnnantttnnnntnnnnnanattnnantnnananantntannnnnnnttataanannnatnnnnnnnnnannattnannntaannntatnnntantantnnnnnnnnannnnnannnnnntaanntnnnttttnnntntnnannanntnnntntnatnnnnnnnannnntnannnattannnntntnnttttntnnnttntnanatnnnanntnntatatnttnnanntttaananttnaatatnnnnntnnnnntnnttnnatannnannnntnnnanatnnannnnnntntnaannnnattnnnantnnnnntnnnatnaanannnnantntnnnnannnnnannantatnannnntnnannnannnntnnnnnnnnaannnnaaannaataatnntnnnnnnaatannnnntnnnannnnnnntnnannntnnnntnnnnnannanaanannatnnntnatnnnanntnnnntanntngnnntntnnnnnntnnnntnnantattnnnnannannnnnnnntnnntnnnttnnnnttnnnnnttnnnnnnnnatnnnnanannntnnnatnttatnnnnnattnnnnntnntntnnnnnattannnnannannnnnnnannnnnnnnannttanannnnnnatnaannaannnannannngtannannanatannnnntattnannaannnnannnannaanaannacatnaatannannnnnnnnnnnannnannnnataaantnnnannnanannaaaaanaaaaanaannannnnntnnnnnnannnnnnannnnnaaaanntnnanaatannnannannnaaaannaaaatnnnaannnnnanannnnnnanntnnnaanannnnnantannnnntnnantannnanaanannaaanntnnnaatanannnaanannaaaaannannaannantaanannannannnannnanaananaanannnnanatannanatnanannnnananannatnaanaannnnannnntnanannnaaanatannnnnntnnaannnannnnnnnnnnnnnnatnannnannnnnnnnnnnnnnnnnnnnnntnnnnnntnnnnnnnnnnnannnnnnnnnnnnnnnnnannnncnnnnnnnnnnnnnnnnnnnnnnntnnnnnnnnnnnnnntnnnnnnnnannnnnnnnnnnnnnnnnncnnnnnnngnnnnncnnnnnnnnnnnnnnnnnnnnnnnnnnnnnnnnnnnannnnnnnnngnnnnnnnnnnnnnnnnnnnnnntnntnnnnnnnnannnnnntnntnnttnntnntnnnnnnnannntnnnnnntntnnngttnttnnnnnnnnntnnnnnnnnnnnntnnntttttttntnttttnntnnttnntnnntntttttttttnttttntnnnnttttttntttttttttttttttttttttttnnaaaanntttttttttttttttttttnaannnnaaaaaaaatttttttttttttttttttttttttttttttgaatgggattctctctaattctcaatcaattggttgtattctggttgaataatgtcgcgatgtatcttctcaatacagactgctaaaacaacagtcatgcatacaccagcggcgatgatgcatccaacagataagaaaggagacatcgagagtgcaactaatacacccccaactaaggccccaatgagatcccaacgagtaatatattttatattaatccgtctacaaatccgtctacaaatccgtccacaaattcttctaaaccacttcatcttagtaaacaaaaatttttatttaatatatttacatttataaattcaattttttcaaattatgtctatttttggtgattttagctaaaaatacgcaaaaatactccatattgcaccgttttgcgcggttttcttattaaaaaaataatatatatattactttatgtgaaataataaaaaattttttttttttttttttttttgttgcgttttttaaaggcctccatccccgcacctagtttctattatagctgcttcttctggggtttctttaggacgcttagaaattaccgcaatagcaacagcagccacacaaatgacaatgccggtaccaaggctaaagcagaatatagtcgccgttacagaaaaaccaagaacaaacaagaacttacgattcttccacatcgtgatttattaatatatttaatttacatttataaattcaattttttcaaattatgtctatttttgtgtattttctctaaaacgcgccaaaatacaccatattgcgccgtttttcgcagatttcttattaaaaaaataatttatatatttataagtaatttatataatctgatattaagttcaatgttctacaaatgcgttgtattgtattataaatgtaagattatcaataaaccagtgtgctataatagcaaaaataataaataacacacataaaatcataatacctacaatacatttagcccaactttctggaatataagttattatgaaaaaaggactacatacacacaaaataaacaaaatattgtctagaaattccattttgttttttggatattaatcattttttaaaataattaattcaattttttaatatttttaaacatataataatattatatattagtattataaatatatgagtaataattaatatatttaatatatttaataaatatgaaaaaatcaaaacataacattataaaaaaaggtaaaagcacaagaacttatattaaacgagataatattaaaaattatagatttaaattatctaaaaaaaatatagattatttaagtaattattatttagttaataatgacaatgttttaaaagttaataaaggttcacttctatcacccggtattatttctattaatatttcaaatgttcctttccatattaatgacccattatcattaagtgcggttaaaatagcgtcaggtgtaatatctataatttcattatgtttatccccaattataattaatatttataataaagataataataaacacaaaatagatttaataattcataaaaaatttaatagattaacaaaatattttgatattaataaagatttatctggagatggtttaatacaaatgaaattactgaaatatatatttaatgaaaatttattgaatattaaaaattttccaaaaaaaagaattgtaaattatttggaagaattaatagaatttagaaatataatttcacataatgtacatattaaaaaagatgctgaaacagatataaaaaagaaaatattaaaaaaaccaaatacaataaaaaaaagaaagacattatttataaaaaacaatccattaagaaatttcaactatgttaaaaaatacattaaaaaaagtcaatatttaattaatattttttataaatatagaaaagaaattcaactagatattaaagaagaccagttttatataccataccatatattagaaacattcaaaacatttttagacgatttatgtttaatgcgagaaagaaggaaaaatatggaaatattagtcaataataaagaaagtgttgataaattagcaagagacaccctacaacatttagaaacaaaattaaatagcaaagataattatattaaagaagaaacagggaggaatattataaatttaataacaactaggttagaagatgatacaatcattaaaaaacattttaataataaaatacttaataaaacattaaaaaaaaaatgtaaaaacatataatacctttatataattaaacattataaacaattccctacaattataaaacataatgtgtttattttataaaataaaaatcaaagcatattttaattaaacactttaaataaattcgtattattattattaataatggaattagaacttgaagatttagtaaataatatatttaacagacaacc

SEQ ID NO: 687 - DNA, 4000 bp, Escherichia coli
  misc_feature (96)..(96): n is a, c, g, or t
  misc_feature (162)..(162): n is a, c, g, or t
  misc_feature (251)..(251): n is a, c, g, or t
  misc_feature (502)..(502): n is a, c, g, or t
  misc_feature (526)..(526): n is a, c, g, or t
  misc_feature (541)..(541): n is a, c, g, or t
  misc_feature (670)..(670): n is a, c, g, or t
  misc_feature (673)..(673): n is a, c, g, or t
  misc_feature (1033)..(1033): n is a, c, g, or t
  misc_feature (1382)..(1382): n is a, c, g, or t
  misc_feature (1483)..(1483): n is a, c, g, or t
  misc_feature (1489)..(1489): n is a, c, g, or t
  misc_feature (1755)..(1755): n is a, c, g, or t
gattcctttgtttgcacacccaaaaagaatcattatttttttataatccttgattagtggactattgaaaactgtaagatcatctttttttatggnatattttgtttcgtttgaaatcgtaatagtcggttggtcagaaaattcggataacggttcttcaantggcacatttagatgtactggttttgaattgtgtaaagtttttataaataagtctaaaagaattctttcattatctctttgagtttttntctgaagatctaatagttcagtagttttaaaagaatcgggtattattctctgcaggttactttctaaaatagaattggtactatgattaacgtcctgaaataaattttcaaaaccaataacgtgatctccaaaaacattgttttgttgaattgtttgtccgtcaccaatatctattttataattaggtctatctgctgaaataacaacaagtggaatttcactataatatgcctctgcaattgctgggtantagttaagaagcgcagaaccagangtgcaaaccaaaacngtaggtttttgtgtttgttgggaaatacctaaagcaaaaaatccagcagaccgttcatccacaatgctatagcatttaaacttgtcattagatgcaaatccaatagctaaaggagcgttccttgagccnggngaaatcacaacattaaaaaactcaaacttttcacaataaagaataattgtttgagctgaattaatttgaggatacatcatttatatgacaaatttataaaatgtagacaatagttgttaaaaaagagcatttatcattgtctcagatttttttaaaatctcctcccactcattttctggtttactatcctttgttattccagatccgacgtaaactgttattttttcattcgtaatatttaaacatcttaagttaacaaataaagaggttttgttgtctttactaaacccaaggaatccagaataaaaggatctttcatatgattcatattctgaaattagttttaaagcattacttctngggtatcccgctattgctgaagtaggaaaaagagcattaataagttgcgagattgaagcttttgtttttccgacaaaatttgttcttaaatgctgtattttccctgcagaaattgtctctgtttttcccgaagaaagagacgagcataaaggattaagagtttcaaatatctcgtcttgaacaattttttgttcagaatattctttttctccccatttagaattaacattgaattttgttcccgctaaagccatggtcgaaatagaattaccttcttttttgaataacaactcagggctcgcacccatccaaaacccttcatttggagtaaagaacaaataacaaaaancttcattgtaaaggtctaggatgtttttaaaaattgaaacggaatctgtgttagaattatcaaaagtaattttttttgaaaaaactatttttgataatttnccacgnttaatttcttttactaaattttttacagaagacttatagcttgtctcctcactcttttttacaaaatcttttatattaagtgatttctttttttttgaatataattttttttctattaaagtttcgtaatcaaaagaggagcttagcatatatccatagttttttttgctaaaaggcataatgaatgttccgttttcattgatttctgagcgtttcagtttttttatgcttccaaagcttatagacaggacattagaattaggcangcgataacaaaagaaagattctttttcagaaagaagattatttattatttcaaaaaagctgttattagaaacttttttaggattgtttttcatcagtttttttttgcaatataaattgatgaggcacccagcattaaaggcaatatttccacactgttaaagccacaagattttaatatttgaccaaacttttttccactcggaaattcctctgcagatttttgtaagtatttataagcctttttatctttagaaaatacagagcctaccaaaggaataaaagttctgctaaacagtaagtagaagaactttataaatctattttgaggaacggatgtttcaagaataattaaagttccaccatttcttagtaccctaaaactttctgatatacctttttcaaggttttgaaaatttctgactccaaatcctatcgaaattaaatcaaaactatttttagaaaaatttagattttcggcatctccggaaattagtacaactttgtcgtttaaattcctgtcagcgactttttgccttcctacatcaagcattttttcagaaatatctaaacctgttactttagagtcttttattttagaaagttctaaagctatgtccgctgttcctgtagctatatccagtatgtcaataggatttaaaggatttgctattttatatatattttctctccacttaacatcatttccagcggaaattaagcggttcagcttatcgtattctaaagaaattgaatcaaacattttttcaacctgcttttttttagaagatttttcgttttggtaaggtttcatttttaagctactctttttaaaagaattaatataagagaaattttttctcagaacttttccatttggcttgatatttataatcaacaaaaaacacttttaaatcagcttcatgttcgttttcacagaaataaatttttttatcagaatcatagggcatattagtaaaataccataagccagaatttttcttggcttcgtaagctcgagagaccttatatacttttaaatcagcctggtattcattgtctacaacatagacattaaagtcagctttatacgattgactagtagaataaattttttgtgcagttataaagccgaagttaattagaaaaattaggcataaaacatttgttttcattattaattatttgtcaaaaacagtgccaatttaaccttatattttccagccttctctatattttctagttacaaattgattagcctcttcaatatttgtgatcttcatattgtctccgtcccacaacagtttttttcttgcataataatcaaaacttcccttagaattttcttttcgtaacatatagcttctaatagcaagattacccataagcactgtttctgtcattggtcccgcgtaatcaaacgaggatgttagatcaaggtgttctttactgttgaatccagccttacaagcgtctacccactttctttgatgtccatattcaggttcaggcatatcttctttttcaggcccaaactctgtttgaccatcgtacaaataaagtttaggagttaatggtgaactatcatttatattagtagaaataatccctttgtctccaatcattaacactccgttttgactgtcttgccctccaatatcactatcagcaggaataatatctggatgtggcggtctaattccaccatctgtccatgttaactgaattggacttttactcttttcagttgaatcaaaatttaaagtaattaacgaagacggaggacaaccctctggatgataatcagggttccacatttttgtaaaaacactccctacactacactcagcacttttagggtattttagacctaaagttctaaaaggaatgtctattaagtggcatccaacatcacctaaagcgccagttccatactcccaccatcctctccaattgaaaggatgtaaatttggagtgtaaggcttttgacttgctggtcctaaccataaattccagtctaatgagtcaggttttaaactagggtcaggcgcttgcatttttaccccttgtggccaaacaggtctattggtccaaactttaacttcagaaactttgccaatttttccctcatcgacccagttttgtaccattttcaataaagggtttgacccaccttggttccccatttgggtaacaactttttgttttctagcaagctcagtaagtattcttgcttcacgaatattg

SEQ ID NO: 688 - DNA, 4000 bp, Escherichia coli
  misc_feature (222)..(222): n is a, c, g, or t
  misc_feature (252)..(252): n is a, c, g, or t
  misc_feature (261)..(261): n is a, c, g, or t
  misc_feature (267)..(267): n is a, c, g, or t
  misc_feature (285)..(285): n is a, c, g, or t
  misc_feature (297)..(297): n is a, c, g, or t
  misc_feature (301)..(301): n is a, c, g, or t
  misc_feature (308)..(308): n is a, c, g, or t
  misc_feature (326)..(326): n is a, c, g, or t
  misc_feature (480)..(480): n is a, c, g, or t
  misc_feature (522)..(522): n is a, c, g, or t
  misc_feature (525)..(525): n is a, c, g, or t
  misc_feature (566)..(566): n is a, c, g, or t
  misc_feature (570)..(570): n is a, c, g, or t
  misc_feature (1197)..(1197): n is a, c, g, or t
  misc_feature (1977)..(1977): n is a, c, g, or t
  misc_feature (1985)..(1986): n is a, c, g, or t
  misc_feature (1989)..(1989): n is a, c, g, or t
  misc_feature (2051)..(2051): n is a, c, g, or t
  misc_feature (2290)..(2290): n is a, c, g, or t
  misc_feature (2301)..(2301): n is a, c, g, or t
  misc_feature (2673)..(2673): n is a, c, g, or t
  misc_feature (3288)..(3288): n is a, c, g, or t
  misc_feature (3519)..(3519): n is a, c, g, or t
gacggcataccgatcggagcctacgtcgaggctctgcactccggccgagtcacggccgccgtctggagcgtggagcgcgccctgcccgcgcagcgcgaagatccgaccatccagctcgggatgtatctcggcaagccggggagcctcgccttcggcctccgcaaggaggacacgcagctccgcgccgcgctcaacgatcacatcgggcgcgtccgccggtcnggagcctggagccggatggtcatcaagtanttcggcganaacgcnctgaccatcctgcaacangccacgggcccngccnttcccgngcggccctagactcgcgnctccgccgccttcggccgcggctccgacttgaacctcgcgcagtcgatctcgtacttcttgaccttgtaggccacgatcctctccgtggtgcccaggaggcgcgccgccttggcccggttgccgcggctcgtcttcagcgcgtcgaggatcagntccttctcgtagccgtcgacggcggtggtcagatcgagccgnggnagcgtccccgagacctccgccgtctgcagggtcggcggcangtgntgcgcgtggatgacgccgccttcacacaccagcaccgcgcgctcgatgcagttctccagctcgcgcacgttgccgggccagtggtagctcatcatcatgtcgatggcggtggtggcgatgcgccgcacgtccttgccgttgtccgccccgtatttctgcacgaagtgatcggccaggagcaggatgtccggccgccgctcgcgcagcggaggcatgtagacgctgaagacgttgagccgatagtacaggtcctcgcggaagctgccctcgcgcaccgcgcgctccaggtccttgttggtggcggcgatgaggcggacgttgatcttgatgggctgcacgccgcccaggcggtcgatctcccgctcctgtagcgcgcgcagcagcttgacctgggtgggcaggctcagctcgcccacctcgtccaggaacagggtgccgccgttggccagctcgaaccggcccttcttcatggcgcgcgcgtccgtgaaggcgcccggctcgtagccgaacagctccgactcgatgaggctctccgggagcgcgccgcagctcaccttgacgaacggcttggccgcgcgcggcgagccgtagtgcacggcgtgcgcgatcatctccttgcccgtgccngactcgccccggatgagcacggtcgtgttggtgcgcgccacctgcgccacctgctcgtacaccgcctgcatgggccggctgttgcccacgatgttgcggaagtcgtagcgctccttcagctcctggcggagctggcggttctcctgcacgagacccttgcgctccgcctccagcagccgctgcacgcggatggcgtggccgatcatggaggcggcgatgccgaagaacttcacctcgcgctcgaaccggccgtccttgtcgtagggcagcgtgacgcccagcgcgcccacactcgcgtcgtccaccgtgatgggcacgcagatgtagctgatctcgcccttgcccgctcccttgaggacgccggtccggtcgaggaagagcggctcgtggctggcccggggcacgacgacgggcttgcccgtctcgacgacccgccccgtgatgccctcacccacgcgatagcgcacgcgccccgtcgcctgccagctgaggccggccgccacctcgatggcgagctgccccgtctccggatcgagcagcaccacgctcgtgttgagcaggccgtggcgttccttgaggagctccacgacgcgggtgagcgcggacttgaggttcagcgtcgagctcaacgtctggctgacctcgagcaggtcgctgagcttgcggatctcggccgtcgcggtgcccacggttgccggcccttctagagtgactctggatgccaatggaaatggacctccctgttgcctcctgaatggcaagtggcgtgcccggcccccngcagtggnncgngtggcttaacccaaacagtcccaataatttagatcgatgtacgtccccatgctcgcttgcgncgaaagcgacggaatcgcgcaggaggacccttatccagacaatttggtatctttccgggccggtcgggatgggctggcgccagcgatggggtgcggcgattcgggcggcccagtcccctgcccaggccatccgacattcttgtcggacaccgccaaaccgccttcagggtcgtatgatcagctcgaaacgactccaacggcgcaggatccggctggtcagggtgcgattcgcgtcttcnttccgtacccnagctcggccccgcccgactggatgtggtccaccccggtggtgaacgtcgcctccgcggcgaggaacacgcagagccgtccggtttcctcggccgtgcccatgcgtcccaggggctgcgcggcctcgccgtcggcgcggcactgcgccggatcgggcgcggcgtcgatcgcctcctgccagagcggcgtgtagatgttcccgggtgagatcgcattcacgcgcacgccgtgggccgcctcgtccacggccaacgccttggtgaaggcggtgatcgcgcccttggtggccacgtaggtcgtggcatggagctggcccatcacccccaccaggctggacatattgatgatgttgccgcgcgtcttccggagatgnggcagggcgcgccggcaggccacgaagacgctcatcacgttgagctcgaggaggtcgcggaactcggcgggggtgaaggcgtcgatgggcttgtgcggagggtgccagcccgcgttgttcacgaggcagtcgatctggccgaagcgctcgacggtggcatcgaccagccgctcgacctcgtccatgcgcgagacgtcgcagcggatgaagacggcctccccgggaccgccggccgtgacctcgcgcgcgagcttctggcccgccgcctcgtcccgcgcgcagaagacgaccttggaccccgcctccacgaaggcgcgcacgcagccttcgccgatgcctttcgtcccgcccgtgacgatgacgaccttcccctcgtagcgcacgcagcgagactattcgtgcccgtgcgaggaggtcaaggcggacagggcctgctcgagggtgtgccgctcctccgccgtgagcttgcgaccttccgacgtgaggtagaacgtgtcgcggatccggcccgcgcgcgtctcgacgtgcgcgatctcgatgctgcaccccgcgtcggagatgcggcgggtgatcgcgtgcaggagcccgaacgcgtcgggcccggacacggtgagnccggtgaacgagggatggggctcctcgtcccagcgcagctccagccgcgcccgtaccgcgccccctctcgtctccagctcccgttccaggtcgatctcgccggccaggaccttctccaggaacgcctggaaccgcctgccctcctcgggctggtcgaaccgccgctgggtatcggaaacggagaacgtgtcgaggacgagggcctccgagttcgagaaggcttccgcgganacgatgtcggcgccgaagaagctcaggctccccgcgatgcgggagaacaggcggctgcggtcccccgccacgaccaccagcttccagccgtcgccgtcccgggccaggcgcgaggacacggcgcggccggcgagagtggccacgagcgcgaaatgggcgacggtctccacgggcgcggtgagctggaggtagcgatgggggaagcccagcacgaagcgggtgaaccgttctcggtccacgcggagcgggatctggtccaggaaggcctggacctcccgcgcgtcggtaatgggaaggaaatcgtgcatcgggggcggcgccgagagtatgctcctctcacacgccatcccggaaactcccttcgccccggcggttgcggtcccctcgggacgttgttactgtgcagccatccatccggccgcgagcgcttcgaaaggaggccctcctgtgagcaaagagcccgacgacatcacccggcgtg

SEQ ID NO: 689 - DNA, 4000 bp, Escherichia coli
  misc_feature (239)..(239): n is a, c, g, or t
  misc_feature (306)..(306): n is a, c, g, or t
  misc_feature (310)..(310): n is a, c, g, or t
  misc_feature (342)..(342): n is a, c, g, or t
  misc_feature (351)..(351): n is a, c, g, or t
  misc_feature (420)..(420): n is a, c, g, or t
  misc_feature (441)..(441): n is a, c, g, or t
  misc_feature (483)..(483): n is a, c, g, or t
  misc_feature (487)..(487): n is a, c, g, or t
  misc_feature (510)..(510): n is a, c, g, or t
  misc_feature (513)..(513): n is a, c, g, or t
  misc_feature (966)..(966): n is a, c, g, or t
  misc_feature (979)..(979): n is a, c, g, or t
  misc_feature (1222)..(1222): n is a, c, g, or t
  misc_feature (1321)..(1321): n is a, c, g, or t
  misc_feature (1384)..(1384): n is a, c, g, or t
  misc_feature (3875)..(3875): n is a, c, g, or t
acagcagcgccagcagcacaatggcgccgaactgcaggatcacccgggcgcgcatgaatttgttggaatgcctggcgttgaagtcgccgccgcggaccatggaaatcagccccagcgccagcgcgcccagcgtggcgatcatgacgacgacgatcaggatgggaagaacggtattcatggacggaatatgatccggatgcgcggaagtggcaatgcggcgttttggtcggttaaaccgncagcacttcccacaatttcccttccacctcgccgcgcggcacgacgaagcggtcgtggtcgtcctcngtcntccatttcacgatggcgtcttcgtaggacggncgcgcctgnacgcggtcgaaccagtcgctgacattcgggcggttgcgggtccacaggctgtccatgcagatcagactnagccggttgacgtagggaatnatgcagatatcggcgaagccgaaatcgcgcccgcccagccanggcntttccgaaagctggcgctccatntcntcgaacgcggcatcgtattgccggacggcggcgccgacgcgcggcgcgtcgaggcccatttcgatgcagtcgcgctggatttcgcggcgctccgggttgggattgcgggcgtaacgcgcctcccgttcttccggcgtcatggtggcgaggaaatgtttgcggttggcggtcgcgaaagtgaccgtcgtgcagccggggtgaagaaattcgtcgacccgcttcatccacaatcgcgtctgcgcccgcatccatggatcgtcgggcatcagggccggcgcgggctcggtttcttccaggtagaacatgatgaccgaggattcggtgatgatccggtcgccgtcgatcagggtcggcacgacagccttggggttcagtttcagataggcgggatcgtgctggtcgcccgcctgcaggttgagcagctcgctctcgaaggaaaggcccttttcgtanagcaccagccgcnccttggccgcgcatacggatgtcgttccgtgatacagtttaagcattcgcacatcccgcatccatcgccgttcggatcatgagtttccttgaccatatcgctttgtgcaatacgcacgacctgtccaactacgtatcgctggtggtcgatggcgatgcggtcgggcatatccggaaagataatctggcccatttagaccgcttccccgacgtcttcgtgcgctcggaccaaagtgtctcgctngcaccgaatattgaatcctacgaagaccgcaccgccgcggtcgacatggtcgtccgcgcgctgttcgaggacggcgtgctgaccggctggcggggcganccttacccggtcggcggacagtggggcggcccgcatgctttcgaggtcgaacgcgccgctgcnccgttcttcggcgcgcgagcctacggtgtgcatatcaacggctatgtcagaaaagaaaacggcctccatatgtggatcgcgcgccgggccgacgaccgtccggtttgccccggccagttcgacaacatgatcgccggcggccagccggtgacgctcagcctgaaggaaaacgtcatcaaggaagcaggggaagaagccggcgtgccgccggatctggccgccaccgcgctgccgaccggggcgattacctattgtgcggaaagcgacatcggcctgaagcccgacatcatgttctgctgggacctggagctaccggcggatttcatgccgttgaacgccgacggcgagatcgccgaattccgcctgcttcctgcggccgaggtgatggagatcgtcgacacgacgttcgacttcaagttcaactgcaatctggtaatcgtcgatttctgcatccgccacgggatcctgccgccggagcatcccgattacgaaacgattttgaaaggattgcggcgttagactgccgcccgtgggtccggaaaagggaccgggccgcgaaaaatacaggtattttattgacttagaggccgcataggcccatataccgctcgttagttgtctcgcgatagcgcgaagtgccgcccaagggcggtatcatttcccgggaacaaataagcaaaaacacctcgtgccggccgcgcccggtacccggaaatagcccgtgccggatggcgttgaatacgcccggaataaatgcacgcggcagaaagaagtaacttagtgaccagtattaatttctcggatctcggcttgtccgacccgatcctgcgtgccttggcggcccgtaatcacgtaacccccacccccatccaggcggaggccattcccggcctgatgcagggccgcgacatgctgggcatcgcccagaccggcaccggcaagaccggcgccttcgcgctgcccgtcctccacaagttccgcgatccgcggcccaaggaaaacatccgccgcccgcgggcgctggttctggcgccgacgcgcgaactggcgatccagatcggcgaggaattcgaggcctatgccgcgcagatgaaactgcgccagaccgtgatcttcggcggcgtgaaggaaaaccgccagatcagcgcgctgaaacgcgggctcgatatcgtcatcgcgacgccgggccgcttgctcgatctctacgggcgcaacttcgtcgatctgtcaggcatcgaatatttcgtcctcgacgaggccgaccgcatgctcgacatgggtttcgtccgtgacgtgcggaagatcgtcgccggcttgccgaaagaccggcagtcgctgctgttctcggccaccatgccgaacgagatcgcaacactgtcgaaagaactgctgcgcggtccgctgcggatcgaagtcacgccgcaggcaacgccggtcgaccgtatcgagcaatcggtgcgtcacgtttccgccggtggcggcaagacccaggcgctcagcgacgtgttcgccgatcccgaactgtcgcgggtgatcgtgttcacccggacaaagcaccgggccaaccgtgtcgccgagcaactcgacaagatcggcgtgccggcggccgcgatccacggcaacaaatcccaggccgcccgccagaaggcgctgaaacggttcagcgccggccagtgccgtgtgctggtggcgaccgatatcgccgcccgcgggatcgacatcgacggcgtgacccatgtcatcaactacgagctgccgaatgagccggaaagctacgttcaccgcatcgggcggacggcgcgagccggcgccagcggcgtcgccatcgcgttctgcgatccgtcggaacgcaaatacctgcgcgatatcgaacgcctgctgaaaatgtcgttgacggtggtcggcgacgggccgcagggcgaggaacaggccccgccgaaacgccagggccacggtggcggcaaaggccggggtggcaaaggcggtggacaccgccagggccagcgtccggccaattccaacggcaaaccccggcgccgcggcgcgaaacggggcggccgcaatcgccagaaagcggcgtagagccgtttagcgatacgttcccgccgcgaggcggacagcaaaacagacatacgacccggctgcgccttcgcgcggccggcaaccgcttggcacggccgggcacgacgcgcccgcgaaagggaaaacaatgacagacggtctccggcggcgaacgtggtgcgggcttggcgtgctctgcctttttctgacggtctccgtcggcgcgctggcgcaatccgccgccccggacaactcgcagaagagccggtatggcgacggctggacctgtaatcccgggtaccaggaagtgaacctgcaatgcgtcaagctggtcgtcccggcgaatgcgtatcgaaacggctctgcctatggacggggttggagctgtctccggggatttctgacagtcggcgacggatgtgtacggatncgaattcctgaaaacgcttacctggattcaaacggcgatggctggtcctgcgatcgcgggtaccgacagcgcgaagacgggtgcgtccgggttcgcgtgcccgctcacgggtatctcaacgtgtc

SEQ ID NO: 690 - DNA, 4000 bp, Escherichia coli
  misc_feature (41)..(41): n is a, c, g, or t
  misc_feature (43)..(43): n is a, c, g, or t
  misc_feature (272)..(272): n is a, c, g, or t
  misc_feature (865)..(865): n is a, c, g, or t
  misc_feature (917)..(917): n is a, c, g, or t
  misc_feature (1226)..(1226): n is a, c, g, or t
  misc_feature (1283)..(1283): n is a, c, g, or t
  misc_feature (1992)..(1992): n is a, c, g, or t
  misc_feature (2004)..(2004): n is a, c, g, or t
  misc_feature (2048)..(2048): n is a, c, g, or t
  misc_feature (2267)..(2267): n is a, c, g, or t
  misc_feature (2321)..(2321): n is a, c, g, or t
  misc_feature (2361)..(2361): n is a, c, g, or t
  misc_feature (2381)..(2381): n is a, c, g, or t
  misc_feature (2384)..(2384): n is a, c, g, or t
  misc_feature (2398)..(2399): n is a, c, g, or t
  misc_feature (2423)..(2423): n is a, c, g, or t
  misc_feature (2446)..(2446): n is a, c, g, or t
  misc_feature (2449)..(2449): n is a, c, g, or t
  misc_feature (2456)..(2456): n is a, c, g, or t
  misc_feature (2548)..(2548): n is a, c, g, or t
  misc_feature (2618)..(2618): n is a, c, g, or t
  misc_feature (2699)..(2699): n is a, c, g, or t
  misc_feature (2756)..(2756): n is a, c, g, or t
  misc_feature (2982)..(2982): n is a, c, g, or t
  misc_feature (3083)..(3083): n is a, c, g, or t
  misc_feature (3094)..(3095): n is a, c, g, or t
  misc_feature (3187)..(3187): n is a, c, g, or t
  misc_feature (3193)..(3193): n is a, c, g, or t
  misc_feature (3200)..(3200): n is a, c, g, or t
  misc_feature (3202)..(3202): n is a, c, g, or t
  misc_feature (3205)..(3205): n is a, c, g, or t
  misc_feature (3211)..(3211): n is a, c, g, or t
  misc_feature (3214)..(3221): n is a, c, g, or t
  misc_feature (3223)..(3228): n is a, c, g, or t
  misc_feature (3230)..(3234): n is a, c, g, or t
  misc_feature (3236)..(3237): n is a, c, g, or t
  misc_feature (3239)..(3241): n is a, c, g, or t
  misc_feature (3243)..(3248): n is a, c, g, or t
  misc_feature (3250)..(3250): n is a, c, g, or t
  misc_feature (3252)..(3258): n is a, c, g, or t
  misc_feature (3260)..(3260): n is a, c, g, or t
  misc_feature (3262)..(3267): n is a, c, g, or t
  misc_feature (3269)..(3276): n is a, c, g, or t
  misc_feature (3278)..(3281): n is a, c, g, or t
  misc_feature (3283)..(3284): n is a, c, g, or t
  misc_feature (3286)..(3289): n is a, c, g, or t
  misc_feature (3291)..(3303): n is a, c, g, or t
  misc_feature (3305)..(3305): n is a, c, g, or t
  misc_feature (3307)..(3308): n is a, c, g, or t
  misc_feature (3311)..(3318): n is a, c, g, or t
  misc_feature (3320)..(3329): n is a, c, g, or t
  misc_feature (3332)..(3334): n is a, c, g, or t
  misc_feature (3337)..(3341): n is a, c, g, or t
  misc_feature (3343)..(3348): n is a, c, g, or t
  misc_feature (3350)..(3351): n is a, c, g, or t
  misc_feature (3353)..(3353): n is a, c, g, or t
  misc_feature (3355)..(3358): n is a, c, g, or t
  misc_feature (3360)..(3368): n is a, c, g, or t
  misc_feature (3370)..(3373): n is a, c, g, or t
  misc_feature (3375)..(3376): n is a, c, g, or t
  misc_feature (3378)..(3378): n is a, c, g, or t
  misc_feature (3380)..(3380): n is a, c, g, or t
  misc_feature (3382)..(3388): n is a, c, g, or t
  misc_feature (3390)..(3396): n is a, c, g, or t
  misc_feature (3398)..(3410): n is a, c, g, or t
  misc_feature (3412)..(3417): n is a, c, g, or t
  misc_feature (3419)..(3419): n is a, c, g, or t
  misc_feature (3421)..(3454): n is a, c, g, or t
  misc_feature (3456)..(3462): n is a, c, g, or t
  misc_feature (3464)..(3488): n is a, c, g, or t
  misc_feature (3490)..(3504): n is a, c, g, or t
  misc_feature (3506)..(3534): n is a, c, g, or t
  misc_feature (3536)..(3542): n is a, c, g, or t
  misc_feature (3544)..(3558): n is a, c, g, or t
  misc_feature (3561)..(3630): n is a, c, g, or t
  misc_feature (3632)..(3658): n is a, c, g, or t
  misc_feature (3660)..(3660): n is a, c, g, or t
  misc_feature (3662)..(3758): n is a, c, g, or t
  misc_feature (3760)..(3803): n is a, c, g, or t
  misc_feature (3805)..(3834): n is a, c, g, or t
  misc_feature (3836)..(3892): n is a, c, g, or t
  misc_feature (3894)..(4000): n is a, c, g, or t
tagccttctccgtagcagcgttggtagcagcgacggcagcngnagcatcctggtggcgagcctgacgctcagcgcgctctgcacgctcgcttgcacgagcttcagccttagcttcgtcttcgaaggtgcggctgtgagagacgatgatgcggcgagaatccttgttgaattcgatgaccttgaaggggagcgtttcgcccttgacagcctgcgtaccatcggccttgaccaggtgcttaggcgtagcgaatgcttcgataccttcggggagngagatgacagcgcccttctctacgaattcgcggatcgtaccttcgtggatcgtacctacgcggtagtcagcttcgaaggcgttccaggggttctcttcaagctgcttgtggccgagagagagacgacggttttccttgtcgatttcgaggacgacgatctccagaggagcaccgacttccgtgaactcgttggggtgcttgatcttcttcgtccaagagaggtcggagatgtgtacaagaccatcgataccttcttcgatctctacgaagacaccgaagttggtgaagttgcggaccttagccgtgtggcgagagccgatggggaagcgcttgtcgatgttttcccatggatcttccttgagctgcttgagaccgaggctcatcttacgctcttcgcggtcgagagagaggatgacagcttcgacttcgtcgccgaccttcaggagttcctgagccgagcggacgtgctgcgtccaagacatttcagagatgtggacgagaccttctacgccaggagcaacttcgatgaatgcaccgtagtcagcgaggacaacgaccttacccttgatcttgtcgcccaccttgaggttagngtcgaggctatcccagggatgtggctggagctgcttgataccaagagcgatncgcttcttagcttcgtcgaactcgaggataacgacgttgagcttctggtcgaggctaacaacttcgctggggtgagatacacggccccaagagaggtcggtgatgtggacgagaccatcgataccaccgaggtcgatgaaggcaccgtaagaggtgatgttcttgacgaccccttcgaggacctgacccttctcaagcttgctgatgatctcagccttctgagcttcgagttcagcttcgatgaggatcttatgcgatacgacgacgttcttgaagtcctggttgatcttgacgatcttgaactccatngtcttgtcgacataagcatcgtagtcgcggataggacggacgtcgatctgtgagccngggaggaaggcctcgataccgaagatatcgacgatcataccacccttcgtgcggcacttgacgtagccgcgtaccacttcgtccttctcgagggcttcgttgatacgatcccatgagcgagcgacgcgtgcctgacggtgtgagaggacgagctgtcccttcttgtcttcctgtgattcgatgaagacctcgaccttgtcgcctacctggagctcagggttgtagcggaactcagctgagttgatcgcaccttcgctcttgaagccgatgttgacgagtacttcgcgcttaccaatcttggtaaccgtaccgatgacgatctcctgatccttaacgttgttcagggtgccatcataagcggcttcctgctcctgacgagaagcagagcacgctacctctcccttctcaaactcatcccagttgaagtccgcgatgggcttgatctctttcaaattttccatttgttaaacttactatgaattacacacgagtgcttctgctggtgcatagcacatgacttgtgacccagcaaagtggacatcaagcgatgcactacccccgcaaaagtcagcgcaaatgtacgaaaaagtcacgtacttatcccccactgtcactgtcttttttcatacactctgcgactgccccaccgagagccggctgtatagacgcacgcagccccgctcccgaaggctcggaagcggggctgcgnatgccctatttngtagggaataaggaggttagttagcttcctcgaggcgtacaggngcgaggaagtcacgcgatacgatgatcgcggtgaaggggcgtatctcagcggtcttcatgtcttcgccacgctgcaccttgtaggtgaggacgaggttgccctcagcgtccttcttcaggcgtacggggaggatctccgtggagatcgtcgtagcggggaggacgacggggatgacgaactcacgctgccagtcgatctcggtgggcttgtccgccatngtcgtagccatgccgaggtggcgattcagctcctcttcgcttgtgagcgtcgcngggagcgagtcttcggcagcgaagtagttctccgcgatgnggtaggggaggctgtcgggnttngcgacgacgctggnngagggctgagcggtgctatcctgngcggactgctcgctctgtccacnacngcaagcngtcagggcggagaggcttagtgctaagccaaggaggatcttatttgctttcataatgatcgtgctactctatataagcgaaacgatcaaagntagagctttcatatcaagtccttccccagccgtctacagcttgatgccgatcccgatgtcgccgtagggngcgaagtactcgctgccttggctcccgaggaaggggctgctatagcgtccgccgatctcgatcttggcgtagatgacatcnccgaggacggacacaaggccgaggcctgcctttgctccgtagcgatagcgccacggnccgcggtagaggcggttgaagacgacgcctgcggtgcgcgtctgcacgtcaccacctgccacgacatagagcccgctattgatttcctcttggctcttctcacgccctgtgtaccagcgaagctcaatgcccgccgtggggagaagcatcgggaaggtgtactcgaggggagcactattctccttgtcgaggaagccgacggggttggtgtggagctcgtagccgncgtgtgcgctcgccaccagtcccagtggtagggcttggtggtaggctaagcggctatgtaggccgagctcgacgacggtggcggagtgtacgcggtcttcnttctgcgcagnngcgcgctggctgaccccgaggcaagcgaggaggataagagagagtaatgtctttttcatggctgcaaatataggcgaaatagccttagtacngcgggncgggtangnctnccgcanggnnnnnnnntnnnnnnannnnngnncnnngnnnnnncnannnnnnntngnnnnnngnnnnnnnnannnntnngnnnngnnnnnnnnnnnnntngnngcnnnnnnnngnnnnnnnnnnttnnnccnnnnngnnnnnncnntntnnnnannnnnnnnncnnnnanntncncnnnnnnngnnnnnnngnnnnnnnnnnnnngnnnnnnanannnnnnnnnnnnnnnnnnnnnnnnnnnnnnnnnnannnnnnntnnnnnnnnnnnnnnnnnnnnnnnnncnnnnnnnnnnnnnnngnnnnnnnnnnnnnnnnnnnnnnnnnnnnngnnnnnnntnnnnnnnnnnnnnnnggnnnnnnnnnnnnnnnnnnnnnnnnnnnnnnnnnnnnnnnnnnnnnnnnnnnnnnnnnnnnnnnnnnnnnngnnnnnnnnnnnnnnnnnnnnnnnnnnngngnnnnnnnnnnnnnnnnnnnnnnnnnnnnnnnnnnnnnnnnnnnnnnnnnnnnnnnnnnnnnnnnnnnnnnnnnnnnnnnnnnnnnnnnnnnnnnnnncnnnnnnnnnnnnnnnnnnnnnnnnnnnnnnnnnnnnnnnnnnnncnnnnnnnnnnnnnnnnnnnnnnnnnnnnnngnnnnnnnnnnnnnnnnnnnnnnnnnnnnnnnnnnnnnnnnnnnnnnnnnnnnnnnnntnnnnnnnnnnnnnnnnnnnnnnnnnnnnnnnnnnnnnnnnnnnnnnnnnnnnnnnnnnnnnnnnnnnnnnnnnnnnnnnnnnnnnnnnnnnnnnnnnnnnnnnnnnn

SEQ ID NO: 691 - DNA, 4000 bp, Escherichia coli
  misc_feature (12)..(12): n is a, c, g, or t
  misc_feature (335)..(335): n is a, c, g, or t
  misc_feature (537)..(537): n is a, c, g, or t
  misc_feature (942)..(942): n is a, c, g, or t
  misc_feature (1118)..(1118): n is a, c, g, or t
  misc_feature (1217)..(1217): n is a, c, g, or t
  misc_feature (1259)..(1259): n is a, c, g, or t
  misc_feature (1984)..(1984): n is a, c, g, or t
  misc_feature (1992)..(1992): n is a, c, g, or t
  misc_feature (2628)..(2628): n is a, c, g, or t
  misc_feature (2899)..(2899): n is a, c, g, or t
  misc_feature (3153)..(3153): n is a, c, g, or t
  misc_feature (3280)..(3280): n is a, c, g, or t
  misc_feature (3376)..(3376): n is a, c, g, or t
  misc_feature (3382)..(3382): n is a, c, g, or t
  misc_feature (3430)..(3430): n is a, c, g, or t
  misc_feature (3445)..(3445): n is a, c, g, or t
  misc_feature (3529)..(3529): n is a, c, g, or t
  misc_feature (3790)..(3790): n is a, c, g, or t
  misc_feature (3799)..(3799): n is a, c, g, or t
  misc_feature (3830)..(3842): n is a, c, g, or t
  misc_feature (3844)..(3849): n is a, c, g, or t
  misc_feature (3852)..(3855): n is a, c, g, or t
acaatcttgctngtcgcgtgtactttgtaagctatattttttacataaaaattagtttatttctccatgaaattctctatacttgataaattaaatgataattaagtagcgaaaatactaattattgtgaatttaaagcgatgaaaaagcgataggttaggattaattatatagtgcgatttaaatacttcatcagcttaatttgcatcatatttttttatccaaattttagttttgcttcaagtttagaaagtgatcttgctgcttttaatctcattaccaactacgagcttttattctttggtggaatatttgtcattctgatgcaagctggntttgctgtagttgaaggcggatatgaaaatacctataagtcaatttccgcattattggtcaattatgtttcagcagttttaggaacgcttatttttggtttcttctgcgcaaaaattctccttgcaggcgatgccagctccgaaaaatatatgaatggcatgctgcatggttggcattggaatttattatttttttataccntaatggccaccacaataaccactgtggttgggcgagtgattccgagtaaagttcccttatttgtcaactggataaccggtttaatgatcgcaggtgtgatctttcctttctttagtagctggacttggggaaatatcttattcggtaagggctggttaaaagagttaggatttattgattttgcgggttcaacagtggtgcattccaccgcagcatggattgtgttggcgggctacttaactttaaaacctcaagaccgacaagaaatcttaaaaaaagacttaatctttgaagattataaaatcttatctttggcattggctggctttattctttggctggcatggtcaggtctaaatgtagtttatatctcagcactctatgcggatattggagtcattgtcntcaatgcctttgctgcactctttggggcaatgattgcccccttgattttttccttggtactcaacaataaaattatttcatgggttgaaatgattaaaggtgctttgggtggcttggtggcgatcacggcaagttgtggtttagtgaatttgtcatcggcattgattattggcttngtttctggattattcacaatctatttaccccgtttattgacctattggattgattctaagcatattcgtgaagttgttgtggtacatggtatttgtggngcatggggcacactggctgtttctttgacagataaccccgtnattaatttagccaacaaggccagtgttatcgatcaaagtattgggattgcggtaaattttgtgtggagttttggcgttgcattcttagtatttaaactgatttgtaaactgcgtaatgcatactcaattaagtcgttaaaaaattgagtacttaaaagctttgaaaaaagccaagcactaaaaaaagcgacataaagtcgcttttttcatatttaagttctgtattaaaagttaggcaacactttcaggtgtcgcacgccataaactttccagatcataaaatttacgtgctgttggtagcatcacatgtacgactacaaatcctaaatcgataaggatccattcagcgtctcgttcaccttcaacaccaattgggcgaaagcctgctttacgtgcttcttcagcaacattgtcagcaagtgctttaacatggcgtgttgatgtcccgctcgcgatgacaattgcatctgaaacgttgctaatagcgctgacatcaagttgaataatatctttggcttttacatcaagtagagcttcttgtacgacttttaaacaagtctgtacgtcttgattttgagtgttcattgcaagttcgtgagaattagaagcgctgggcgatggttctaaattcatataaggtatattttccagaaaatatctcatcttctaatatagcgcttttgtctaaaaaatacaaattatacaatgcaaccgtttgcctaagnacacaccnatttaatagctatggttgttggaaaaatatttttctttccatgcaaatgactgatttgaatgcgattgtggcttgtattctgctgcaataaagcccgtataggcgctttgttttaaccatgaaaaaattgcagaataatcaatttgtgcggtatctggttcgtgacgtcctgggcagtcagcaaattggatatgcccaatccaatcaatattttcttgtaaggctgccagtacatcttcgcccatcatcgccatgtggtaacagtcaaattgcatttttaatgcaggatgctgtactgcttctaacatttcttggccttgtgcaatattttgaaccaagaaacgtggcatgtctgtaccattgatcatttcaaatacaggctgaatatcacgattagagagcagatgacaagccagttttaaattgtttgccaaggtgtttaaacaggggagtaagtcggcatcttgtggttgtttacctgccaaaatattgacgtttggaacattgagcgcttctgcatattcaattgcaagttccaaggcttgatgaaatgccagttcttgaccaggcacaccagcaagtccgtttccaccttgcatcaagtcaccagcgggaacgttgatcaggcaaaggctnaggtcatattgttcaagttgcgcttgaatctcttcaatgcttaattcatacggaaattgaatttctacattgtggaagccatgaagatgtgccaaagcaaagcgttcaatgagcggcacttcagtaaaaatcaaggataggtttactgcgagtttagtcataagaacgctccttgctatatttggactctcatcttcaatgtagtaggcaatagattatttttcaacttatttatgtgtagttccgtgtattttaacccgatttattttcnacttgatgaatgactgtggctaaatccgactcagcaaatccgttgttttgatggctttgtaattgcccaagtgcacgttgagccacaggaatttctaaatcaaatttttgtgcaagttgaatggcattatttaagtctttagaaagcgtttgtaccttccattgtactggttcaaaagtatgtgttgccatgcgtggggctaaaatttggaaaggttttgagtcggcaaaaccaccagccaaagccggcgccantagggttgtatctacacctgctttactggcaagcgcaacagcttccgcgatcaaggtgctattggcagcaacgataagttggttacagattttagtggcttgtccagtacctgtttcacccatacgngtgacacgctgtgacaggatattgtaaacgaggctcagtgcttggatcacctcagcattgcccccagcaaaaataaccagcgtgccattttcagcncctgcngttccacctgaaacaggtgagtcaatccaaatcacctgttttgttgtngcgctttcagccagntgcttggttttatccacagataaactggagaaatccacaatcacttgcttggcttgtaaatagggctcaatgtgctcatagacnagctgtacagctttatcatcagcaaggcagctgagaataatcggatattctgcaatattctcaagctgtaatgggtgagcgcctagatcaataagggcgtcacaagcagatgctgttctgttccagacagcgacatgcaagcctgcttggattaatcgggttgccatacggctacccattaatcccatccctaaaaatgcaattttactgttacgatcaaaattcattttataactcaaaaagctttcaataatagttttngattatttntattggcgcggtaaaaattttaattcaggannnnnnnnnnnnntnnnnnnaannnnactatttttacccaagagtaattttaactgccaaatcttctctaaacgtaaagatttctgaggttgatgttccatcgcatctaaaacacgtttagcagccatcagcgcatctggcgagcgttgcagcatctcttcggcaatggct

SEQ ID NO: 692 - DNA, 4000 bp, Escherichia coli
  misc_feature (1033)..(1033): n is a, c, g, or t
  misc_feature (1052)..(1052): n is a, c, g, or t
  misc_feature (1054)..(1054): n is a, c, g, or t
  misc_feature (1057)..(1057): n is a, c, g, or t
  misc_feature (1990)..(1990): n is a, c, g, or t
  misc_feature (2449)..(2449): n is a, c, g, or t
ttgatcctgtccatctgccgcgcctgaccgaaaggttctaccgcgttgatgggcaccgcagccgtgaactcggtggcacaggtcttggtcttgcgatcgtcaaacatatcatcaatcgccaccgtgggaaattgaacatagaaagcgctttgggggaaggcaccacggtcactgtgatgctgccgaccgagccgctatcgtgaatttcgaagaaaataaaatgtcatgaaaacgtaatatccctgtcacaaaactgttacgtccagccgttacaaaggtccggagaatcccatgggggattgcttgcaaatggacaaaacaggagacatccatgtctttacttaaacttgcaacttccgcgctggctctttcggggctttgcgtaacaaccgctgccgcgcgtgatcaagtgcagatcgccggatcgtcaaccgttctgccatatgcgtcgatcgttgctgaggcttttggcgaaaactttgactttccaacacccgttgttgagtccggtggctctagctcgggtctgaagcgcttttgcgaaggcgttggtgaaaacacaatcgacgtggcaaatgcgtcacgcgcaattcgcgaaaaagaaatcaaagcctgcgccgaagctggggtcactgacatcatcgaagtgcgcatcgggtatgacggtattgtctttgccagccagattgacggaccagcttacactgctttccaaccggctgatattttcaatgcacttggcgccaaggttcttgtaggcggtgcgattgtcgaaaatccgcatcaacagtgggctgacttcaatggtcaacttccagcggctgatatcatggcctttattcccggcacaaagcacggaacacgcgaagtttttgaggacaaagtgttgctcaagggttgcgaggttaccggtgctatggaagccatgatggcctctggtatgtctgaagatgatgccgaagatgcgtgcctcgatgtgcgtcaagatggccgttctgttgatatcgatggcgattataccgaaactctcgcncgcattgatgccaaccccnanggnatcggcatctttggcttggccttttatgaaaacaatcaagacaagctgaaagtggcgacaatgggcggcgttgcgccgtcgactgaaacgatttcgacgggccaatatcctgtgtctcgtccgttgttcttttatgtgaagaaagcccacattggtgtgatcccaggtctgaaagaatatgcctcattcttcatcgccgatgagattgctggaccagacggcccgctatctgcctatggtttggttgcagatcccgatctggcgacaacccaggcggccgtatctaatgagacagccatgggcagcaattaagagctgctgtaaaacaatagtgagggtggcggcttccgccatccttaaaaaacgcttaccccctttgctgggggcgcatttgacggtaggaagaacaaaatggatggaggcggtatgccgatactctgggttgtcgcagtgatttttgttgtttccgttgttgggttcatcgctgggcgcgcacgtgctttgcaatcggccggtggcgatgcgcgccggcttcattccttgccgatatattacgggtcgaacgttgctttatgggccgtcgtgcccgcggctgcgaccctcatcgtctggcttattgtgcagccattgttcgtgaattcccgcgtggcggaaaccttgcctggtagcttgctcgatgaaggcagctcaattggcctgatcatgagcgatgtgcgccgcgtggcagaggggcttgatgtggctgtggcccaaggcgctttgagccgcgatgaggctgcgtcaatcggatcctcatcggtcaatattcgcgaatttttaggatccataggcgtggctcttggctcagatgtcagccctgaagtggtggccgcggcgcagctttaccgcgggttcaatgcaaccgggtctgcgcttatgtccttgattgtgctngcaatttctgccggaggggctgcctatgcctataggcggtcaaacgcggatttccgcgcgcgcaatgtggttgagcgtggggttttggggctactcatcggggcagcctcaattgctattttgacgaccatcggcatcctattcgcgctgctgtttaacaccatcgagtttttcaaactctatcctgctaccgaattcttctttggaaccaattgggcgcccagtttttccggtcggggcgggctgtctgatcttggtgttttgcctctgttgtggggcactttttatatttctttcattgcgatgttggtcgcggttcctattgggctgttttcagcaatttacctctctgaatatgcaagccctcgggtgcgcagtgtcgccaagcctttgattgaaattctagccgggattccgacgattgtttacgggctatttgcgcttttgaccgttgggccnttgctggtgagcctttttggcaaagatactttgaactggatgcaggggggcactgcggtcatgaccgcgggtttggtgatgggcatcatgcttatcccattcgtgtcatcgctttccgatgacattatcaatgccgtaccgcaggccttgcgcgatggatcttatggcttgggtgcaacccagtctgaaaccatacgtctggttatcttgccagcggccctgccgggcatcgttggcgcgatcctcttggcggcgtcgcgggccattggggaaacgatgattgtcgtgctgggggccggtgcggcggcgcgcctgtcgatgaacccttttgacgcgatgacaacaatcacggccaaaatcgtaagccaattgaccggagatgccgatttctcatctccggaggctttggttgccttcgcacttggcatgaccctcttcgtactgaccttggggcttaatgtttttgccctcttcatcgtacgcaaataccgggagcagtatgactaatggccattaagaaccagacttctcgcggcgtgtcacatacgtcactgctctcaataagggatgggcatacccaaaaacgcaactcagccgaaaagcggttccgcatttacgggatggtcgccctctccatcggcgtgttgtttcttatattcttatttgcctcgatcctacgctcaggtttgccggccttcacccagaccgtaatgaatgttgaatttgttgtgtctcaagaagagtttgacaaagccgaaagcaaaatgctgaaaaccaaggcctatcaagacatattcgttgcggcattgagcgcggagcttgcaagaaggaacttggatgtggccttcgataataaagcgattgaacgcattgtgggcaagccgggcggcacaattcgaagttattttaccgaagatccaagccgggtcggacagcctgcgactttcgagcttgcggcctccagccgggtggatggctattttaacggccgcgtcacccgtgagactttggttgacagccgctttttgaaggcaacggatctggatctggtcgatgctttacaggccggcggcataattcgtcaggcattcaattggaattttatcaccggcacggattccggcgtggataaccctggaggcgccggacttggggcttccgttattggatcgttcttcatgatgttggtggtgctgtttttgtcactcccgattggggttgccgcttcgatttaccttgaagaatttgccccgcgaaatcgttggacggattttattgaggtgaatatctccaacctcgccgcggtgccgtccatcgtgtttggtattcttggcctcgccgttttcatacaatttgcggggttgccacaatctgccccgcttgtcggtggccttgttttgaccttgatgacattgccgacgatcatcatctcaacccgcgcatcgcttgcggctgttccaccctctatccgcgatgccgcccttggtgtgggtgcatccaagatgcagtcagtgttccaccacgtcctgccgctggcgatgcccggtattt

SEQ ID NO: 693 - DNA, 4000 bp, Escherichia coli
  misc_feature (2032)..(2032): n is a, c, g, or t
  misc_feature (3191)..(3191): n is a, c, g, or t
  misc_feature (3328)..(3328): n is a, c, g, or t
  misc_feature (3335)..(3335): n is a, c, g, or t
  misc_feature (3337)..(3337): n is a, c, g, or t
  misc_feature (3344)..(3344): n is a, c, g, or t
  misc_feature (3348)..(3348): n is a, c, g, or t
  misc_feature (3668)..(3668): n is a, c, g, or t
  misc_feature (3749)..(3749): n is a, c, g, or t
  misc_feature (3944)..(3944): n is a, c, g, or t
  misc_feature (3981)..(3981): n is a, c, g, or t
agccaatttcaaacaacaaccggccctctgccgccaaaaacccatgcgcttgatgcgcgatggtcgcgtaatggctcaacccatctttaccgtctgtcagcgccaattttggctcatggtgcacttcgggcgacaagcccttccatacggctgggtggatataggggggattggagacaataaggtcaaagcgctcggatggaatctctgcacaccagtcagatcggcaaaatcgcacgcgatccgttaattgcaattttgcggcattgcgccgtgccacctccagcgccttggccgaacagtccaccgcaactccgcacgccgatgaatttacagccaaaagcgatagaataatacagcccgacccgaccccaagatccaagacattttgaaacggggccgatagggcgcgcgccaccagctcttcggtttcaggccgcggatccaatacatcgggggtgacgataaagcggtgttcataaaactcgcggtagcccaaaatatgcgacatcggcacatacgccatccgcgactttagagcggcttcaaacgccgcagagtgttccgcagttagcgtctcctcgagccgcaaagacacttgcagcgcgtctatgcccaaaacaaaggccaataaaatccgcgcctcacgccgagaatcttctataccggcgcccgaaagcctttgcccagcatgggtcaaggccgtctggagagtttggctcatccgttcatttccgccagcaaggccgcttgcgcctctgaggtcaaagcatcaatgatttcgtccaaatcaccctgtaagatttgctcaagccggtaaagcgtgagaccgatgcgatgatcggtcattcggccttgcgggtagttataggtgcggattcgttctgagcggtcgccagagcccacctgtgatttgcggtcggcagatcgctccccatccacccgcgcccgttccagatcatacagccgggttttgagcacctgcatggcaatctcacggttgcggtgctgcgatttttccgcgctgaccacgatcagcccggtgggtaaatgggtgatgcgcaccgctgaatcggtggtgttcacatgctgaccaccggccccgctggcccgcattgtatcaatgcgaatgtcgcttggatcaatgtgaatatccacatcctccgcctcgggcaagaccgccacagtggccgctgaggtgtgaatgcgcccgccgctttccgtactgggcacgcgctgcaccctatgcacaccgctttcatacttcagcttggcaaaaactccctcgcctttgatatgggcgacaaattccttaacgccgccaagttcggtggtttgattttcgatgacatcaaagccccagccctgcgcctccacatagcgctgatacatgcggatcaaatcggcggcaaaaagcgcagcctcatcgccgcccgttccggggcgaatttccaaaatggcagggcgcgcatccgcctcatctttcggcaaaagcgtgagctgcagatcatgttcggccttgggcaatgcggcgcggagcacaggcagctcttcggccgcaagctcacgcatatccggatcatccatcatcgcttcagcatcagaaatatcgcgaagcagggtctgataggcccgcacttcttcgaccaccggccgcaggtcagaatattccttagccaatttggcaatatcgcccgcgccctcagacatttgagcctcgatgaactcaaacctttggatgatctgctgtaatgtatcttctgctatcatgccttcagctcgcctatgtcgcctgcggggtcaagaggggccagggctttggacgcgattttaatcagcaatccaagcctcaatccgttttttattgctgccccaatcggagccaccaacacttgaatggccgcgcagatgggtgccgctctcatctcgccacagctcgatgatatctttaaaaccccaaaagcgcgatctcaggagcactttaagccgcgcgtcttgcatcacgatttcgtggcgtggatcggccaagatngccgccctgatctgcgtaaagggcagatcatcccggcggatataatagccactgagatgcgtttgcgtggcgtgtccgggcgccataggcccgcccggccagtccgcatatacaagcggccagaagcgcgccaccagttgcaggcccgcaaaaagcgccagcgccacgacaagaattttaatcacaggttagaccctcaacgataagcaacaccgggcaggatgctcaagatttcgaacatcaaattcgccgctgttagggcggtattgcccgaggtgtcatacatagggctcacttcaaccatatcaaaccccacgatattcaatccgcgtaaagcgcggatcagctccatggcctgcggcgtggtcaacccgccgatctctggcgttccggtgccgggggcgtaggcgggatccaggctgtcgatatcataggtcagatagcaggggtgatcaccgatggcttggcgaatctcctggcccagtggggtcagcgatttatgccaaatctctggcgccgtgatcatgttaaagccccaaccggccgcctcagaaaagtcttctgcggtgtatcccgtgccgcgcaggccgatttgatacaccaaatcgggcacaagcagcccttcctcataggcgcggcggaacaccgtcccatgggtttcacgctctccaaacatctcatcgttcacatccgcatgcgcatcgacatgcaccaaggccacaggcccgtgctttttcgcaatggagcgcaagattggcagggttaaagaatgatccccaccgagcgtcgccggcaccacagggtagtcgtgcaaaccgtcgtaggccgattcaataatgcgcaaactctccgcaaggctgaaggtgttgatggcaacatcgcccatgtcagccacctgcaggctgtcaaaaggcgcagccccagtttgcaaattatacggccggatcatcgcgctttcttggcgaatctgctttggaccaaaccgcgtgccggaccgccaagaggtgccgatatccatggggatgcccatgatcaccacatccaagcccgcggggccttgagcctcaggcaggcgcatgaaggtttgcggcccagcaaaacgggccagatcattgccggaaattggttggttgggcattcgcatatcctttgtctttgngccgagtttgcgggcgatgccgctctgtggcaatggaaaacttaagccacgcgcatggggttttgccaagcgcatcacatgctctttttgccctctgtgcaggtcaggccggcgattttatcttgatttcagccgtnctttttncnaaaatcnatanattacaggagcttgaagcatttgaaaaaactattgatcacactcgccgtcgtgaccgcaggatttggctgtctgtattgggccttccctatgttctttttcgcaatctacaaaaataacgtttatacaacggagtttcgcgtggatggaaacaagttgcatatgagcgggttgattaactcttacacgccagagcagctcaaagatatcttcggcgcacatccccaaattgatacaatcgttctgggtcagatgcccggatccattgatgatgaagccaatttggccggggcggcttgggtggcggcgcgcggggttaanacatacctgccacaagagggcagcattgcctctggcgcgacggatttctttcttgtcggcaagaggcgtgtggtggaaganggcgcagaggtgggcgtgcattcttgggccgatgtgacaggggtcacagcccgcgatcttccccgcgatgaccctgcccatgaacgctatattggtttttatgagggcattggctggacgcgcgcgcaggcggaggccttttactttttcaccatcgaaaaagcacctgccgaggatatttacctaatgaccccncaagagatgctggccaccggtctggccacagaggtcntgcctgccaaccattgatc

SEQ ID NO: 694 - DNA, 4000 bp, Escherichia coli
  misc_feature (377)..(377): n is a, c, g, or t
  misc_feature (380)..(380): n is a, c, g, or t
  misc_feature (710)..(710): n is a, c, g, or t
  misc_feature (1985)..(1985): n is a, c, g, or t
  misc_feature (1994)..(1994): n is a, c, g, or t
  misc_feature (2055)..(2055): n is a, c, g, or t
  misc_feature (3071)..(3071): n is a, c, g, or t
  misc_feature (3310)..(3310): n is a, c, g, or t
  misc_feature (3574)..(3574): n is a, c, g, or t
  misc_feature (3578)..(3578): n is a, c, g, or t
  misc_feature (3580)..(3584): n is a, c, g, or t
  misc_feature (3586)..(3587): n is a, c, g, or t
  misc_feature (3592)..(3592): n is a, c, g, or t
  misc_feature (3595)..(3598): n is a, c, g, or t
  misc_feature (3600)..(3600): n is a, c, g, or t
  misc_feature (3603)..(3603): n is a, c, g, or t
  misc_feature (3605)..(3605): n is a, c, g, or t
  misc_feature (3607)..(3607): n is a, c, g, or t
  misc_feature (3609)..(3615): n is a, c, g, or t
  misc_feature (3618)..(3619): n is a, c, g, or t
  misc_feature (3626)..(3626): n is a, c, g, or t
  misc_feature (3628)..(3628): n is a, c, g, or t
  misc_feature (3633)..(3634): n is a, c, g, or t
  misc_feature (3636)..(3636): n is a, c, g, or t
  misc_feature (3644)..(3646): n is a, c, g, or t
  misc_feature (3648)..(3648): n is a, c, g, or t
  misc_feature (3651)..(3654): n is a, c, g, or t
  misc_feature (3657)..(3657): n is a, c, g, or t
  misc_feature (3663)..(3663): n is a, c, g, or t
  misc_feature (3665)..(3672): n is a, c, g, or t
  misc_feature (3675)..(3676): n is a, c, g, or t
  misc_feature (3679)..(3679): n is a, c, g, or t
  misc_feature (3681)..(3682): n is a, c, g, or t
  misc_feature (3684)..(3684): n is a, c, g, or t
  misc_feature (3686)..(3686): n is a, c, g, or t
  misc_feature (3688)..(3689): n is a, c, g, or t
  misc_feature (3691)..(3693): n is a, c, g, or t
  misc_feature (3698)..(3700): n is a, c, g, or t
  misc_feature (3702)..(3702): n is a, c, g, or t
  misc_feature (3704)..(3704): n is a, c, g, or t
  misc_feature (3707)..(3710): n is a, c, g, or t
  misc_feature (3712)..(3712): n is a, c, g, or t
  misc_feature (3714)..(3720): n is a, c, g, or t
  misc_feature (3722)..(3722): n is a, c, g, or t
  misc_feature (3724)..(3724): n is a, c, g, or t
  misc_feature (3728)..(3728): n is a, c, g, or t
  misc_feature (3730)..(3731): n is a, c, g, or t
  misc_feature (3736)..(3739): n is a, c, g, or t
  misc_feature (3741)..(3741): n is a, c, g, or t
  misc_feature (3744)..(3745): n is a, c, g, or t
  misc_feature (3747)..(3747): n is a, c, g, or t
  misc_feature (3749)..(3749): n is a, c, g, or t
  misc_feature (3752)..(3755): n is a, c, g, or t
  misc_feature (3757)..(3758): n is a, c, g, or t
  misc_feature (3760)..(3766): n is a, c, g, or t
  misc_feature (3768)..(3771): n is a, c, g, or t
  misc_feature (3773)..(3775): n is a, c, g, or t
  misc_feature (3777)..(3780): n is a, c, g, or t
  misc_feature (3783)..(3785): n is a, c, g, or t
  misc_feature (3787)..(3787): n is a, c, g, or t
  misc_feature (3789)..(3796): n is a, c, g, or t
  misc_feature (3799)..(3800): n is a, c, g, or t
  misc_feature (3802)..(3802): n is a, c, g, or t
  misc_feature (3805)..(3806): n is a, c, g, or t
  misc_feature (3811)..(3811): n is a, c, g, or t
  misc_feature (3813)..(3813): n is a, c, g, or t
  misc_feature (3815)..(3816): n is a, c, g, or t
  misc_feature (3819)..(3819): n is a, c, g, or t
  misc_feature (3821)..(3821): n is a, c, g, or t
  misc_feature (3823)..(3829): n is a, c, g, or t
  misc_feature (3831)..(3835): n is a, c, g, or t
  misc_feature (3838)..(3843): n is a, c, g, or t
  misc_feature (3845)..(3846): n is a, c, g, or t
  misc_feature (3851)..(3856): n is a, c, g, or t
  misc_feature (3858)..(3858): n is a, c, g, or t
  misc_feature (3863)..(3865): n is a, c, g, or t
  misc_feature (3867)..(3868): n is a, c, g, or t
  misc_feature (3871)..(3876): n is a, c, g, or t
  misc_feature (3878)..(3878): n is a, c, g, or t
  misc_feature (3880)..(3881): n is a, c, g, or t
  misc_feature (3883)..(3883): n is a, c, g, or t
  misc_feature (3886)..(3886): n is a, c, g, or t
  misc_feature (3888)..(3888): n is a, c, g, or t
  misc_feature (3891)..(3892): n is a, c, g, or t
  misc_feature (3900)..(3900): n is a, c, g, or t
  misc_feature (3902)..(3902): n is a, c, g, or t
  misc_feature (3908)..(3909): n is a, c, g, or t
  misc_feature (3912)..(3912): n is a, c, g, or t
  misc_feature (3915)..(3917): n is a, c, g, or t
  misc_feature (3927)..(3927): n is a, c, g, or t
  misc_feature (3933)..(3933): n is a, c, g, or t
  misc_feature (3940)..(3940): n is a, c, g, or t
  misc_feature (3952)..(3952): n is a, c, g, or t
  misc_feature (3958)..(3958): n is a, c, g, or t
  misc_feature (3966)..(3966): n is a, c, g, or t
  misc_feature (3970)..(3970): n is a, c, g, or t
  misc_feature (3973)..(3973): n is a, c, g, or t
  misc_feature (3976)..(3976): n is a, c, g, or t
  misc_feature (3979)..(3979): n is a, c, g, or t
  misc_feature (3995)..(3995): n is a, c, g, or t
  misc_feature (3999)..(3999): n is a, c, g, or t
cagttttgtctactaaaataatacttaaacccttgtttaaaaaagcaagttctctcattcttttttgtaaaattgatgaactaaatttagttaaagaaaatactttttttgatggtaaaaaatttataaaagttccagttttatttgttttacccttaacttttagaggagataaagcccttccatctttaaattcaacaaaatattcctttttatctctgaatattcctaaaattaatttttcagataaagcattaaccactgaaacaccaacgccatgaagtccaccggaaattttgtacgaatcatgatcaaatttacctccagcgtggagttgggtcataataacttctgcagctgacttcctttcccctttntgnatatcaactggaatacctcttccattatcctcgacagaaatggattgatccgaattaatcgtaactttaatatttgtacaataaccatctagagcttcatcaatagaattatcaactacctcataaaccatatgatgaagccctgtgccatcatcagtatcgccaatgtacatgcctggtctttttctaactgcttctaatcccttaagaacttttatcgaatctgctctatattttgattttgagttatcctgttgatctttttgaatcatatatgtgaaattctattagtatattttaacatttttattgacttaattaaatcgaagncaaacgtacaccttaaatgaccgttggtatcaaatgattacttaatgaaaaaaaaaaaattaatctaaaatctcctttaaacaaaataaatcaaattttcattggcataacgacatgaaaactatttttatctgacatatctttaattagcactggtgaggcggcatcctttaaattaataataattaaatcattttcgatttgggatgcaatatcaatcaaatatctactattaaaacttatatccatatcatcagaattaaatattgcattaatactttcaataccttctccactgttagggctgttaactgataattgtaaaaaatctttcgatatgttcatttttaaaccctctttacgatccgaggaaactgtagtcactctctctatagaatttttaaattcatttaattttatttgtaatattttaacattatctatgggaacaactttactataatcaggaaatcgtccatcaataactttagaaatcaatacaccactatcaatttcgaacttaatttttgatttattattagatattttgatagcacttgtactttgctccaataaggaaataagttgaaaaatagtttttttgggtaaaataatagattcaaaatctgtattagaatcaatttctagtctgctagaagaaagtctatgactgtctgttgctacgcttgatagaaatgatttgttttctatatttattttatgtagataaattccgttaagataatgtctggtttcatcatttgaaattgaaattttagtcttgtttagaagttttagcatttttttagaagaaacttcaaaagttttttgcttaatatcttcatctgacaagggaaaattatctggggataaacataataaattaaatttagaattaccagaaactaacttcagcttatttgcgctttgtaaaaaaagttcaacttttgtattgggttctaattttcgtaatatgtcgtaaattatgctggctgaagtagttgttgaaccttccttttttaattcttgtaagggaatttcttcggtataaattatatctaggtccgttgcagtaattctaatttttgaatcttttgcttctatcaagatgtttgataaaattggaagtgttgtttttttttcaataataccataggcatggctcaatgattttaaaaaggtattcctagatattgtaaattccattttgcaattttaaagaagtatttttataatttcagttatgctgtgcttaatttcattatcatttttaantaattcatnaattttttttacagcatgtattacagttgtatgatcacgattagaaaattttctaccaatntccggtagagagtttgttgtatacttctttgctaaatacatggctatttgtctgggtctagctagtgatcttgatcttctaggcgataacatttcttgaatattgagattaaaatagacagccactatattttgaatagactcaacatttatcgacttcttattgtcattaataaaatcttttaaaattcttttgcactcataaatgtttggagattttgtattaattttactaaaagctaaaactctatttaaagctccaaccatttctctgatactcgatgtaatttcggttgccaaaaacttgaaaacttcatcatttaaattataattttcgttaaaattttttttaatatcttcaaacttacttctcaaaatttttattcttaaatttaaatcaggtggttgaatatcaattaccaaacctcctgacaaacgggatttaatccgtccttgaactctatcaagatttgaaggagatctatctgatgctactactatttgcgaacctctttctattaaagcattaaaagtatgaaaaaattcttcttgcatagcttctttgcctgctacaaattgaatatcatcaataataaaaacgttagctttcctgaaaaaatctttaaatttaaccatgtcattactttttatggatctaataaaatgatacataaatctttctgctgaaataaacattacttgtttcgagttctcaatatctaacccgatagcatttaataaatgtgtcttgcccatccctaccacactataaataaatagtggattataatgtgaagactgagtgcatactttcctggccgccgtatacgcaagttcgttgctttctccaaccatgaaatgatcaaaactattgtttaaattaaatcgattgtaatttaataaggaattttcgattgatgaaatctgactatctcttcgaaagtctattttatcagacttttctttcgattcttcaatgaaaaactcaattctttggatgctttttttaaatgtttnaattatatccaacattttatctgcgtatcttgaaacaatccagtctcttacaaatcgagtaggagcagtcaaaacaacatagtgattaaattctttttttaaatttatgttttttaaccaactttcataaacatcatttccaaaagttgttttaaaatttttaaggacctcattccaatcaagcaaattctcttctaatgctacaactgcactcgaagcttgttttgataaagtttcantcataaagatatttatttttgatcaagtagttctattttttttttagcgggtatgcaatattttttaggttgtattaagaaaaaaattatctttaggttgtattgtaaattttttacatattatattttttttaatttaaatataaactaaatcacaagtagcaaaaaaattactctagaacttgttgatgcaacttaaaatatcatttaactagattttgattttttctctaaaattattttttatttagttgtgacaaaaanaaangnnnnntnnaaaanttnnnnanccntnantnnnnnnnttnnttttttnanttttnnantttttttnnnanccnnnnaantttttntnnnnnnnnttnnttncnnantnanncnnnttttnnntntnttnnnnantnnnnnnngnantttngnnaaaannnntnggnntncnttnnnntnncnnnnnnnannnnannngnnnnttnnntnannnnnnnnttnntnttnnctttncntnnttntntnnnnnnntnnnnnaannnnnntnnttttnnnnnntnttttnnnannttnnnnnntngnnanaangnggnnaatatatntntttttnnttnatnnnggtcaataanaattanttttganaactgttacaanaaaaanatgatctnttgnatnttnatnttttttttatttttcntttnc

SEQ ID NO: 695 - DNA, 4000 bp, Escherichia coli
  misc_feature (678)..(678): n is a, c, g, or t
  misc_feature (904)..(904): n is a, c, g, or t
  misc_feature (910)..(910): n is a, c, g, or t
  misc_feature (1180)..(1180): n is a, c, g, or t
  misc_feature (1708)..(1708): n is a, c, g, or t
  misc_feature (1989)..(1989): n is a, c, g, or t
tgaggctgaaaaagacgtcaagccatacatgtctgacaggtttggcgcacggaaaccttcgccccaagatgctttaacagtcaatccatcaacacttgggatttgtgcgattgcaccgaatctcggcgaagtagcattcccaaagtctgaatagtcgtcaaaacgaatcgccgcatcaatctccaaccaatcggttactgggaaaattgcctcagcactaaaagccgttacatctcgatagccttgcgccgagtttccggcagaaccaccaatgaggcctgcttcagactgcgcatcaaccagtgctgcgtaatcgacttcgaagtattccatcgcccaataggtctgtgctgtaccaccgcccatttcgaaaagatcccactgcatcccaccgaaatatttcgtcatcttctgcttgttatcatcaagcgttgttgctttcaaattagcaacgaaggtatcgaaatcctgaatatcataagcgatattgtattccagaccagcatagctcaagtaggatcgaccgaccgagaccgaacgatattcggaaaaggttgcatacacttcccagctaatttcgtctgatatatcacccgttaatccaaaatcaatgttgatcaaatcatcgttcaccacgttgtcgcgggttccgatatccgtccaacggaaatatccacnggttgcaccaacggaatttcttgggtcaccaggaatcgtcgggccaggtgctgccggtggtgcataacggccaaaagactcgttgttagcaaacaagatgtcaacggaggcatcaatgctatccgtcaactcatactctgcgtttacatacgtatttaggcgctgcacactcgcgcggttcgccgacactagcgcataagcataaccacagtagaatccagtatcnggaccnaagacaagatcagacttcatcggaccttggaaaccgttttcttctgtacagtttgcaccaggatgcacttgccaggtcgtctcatcggtcggatcaaacgccgcaccagtataaacggggttcgggaacaacgtgtagccatagaatgatatgccttctgtttcagcatatcccgtaatgtagccatccccgtctgcgtcgttttttcttgcagcggtaaatgagcgatcactgtcgtagacctcgtctcgtgaatcgtattccaccgcnaccgacacgctgcctcgatcagacgatgcccctatttgcaatgacaagctctcttcaacaccaccatcacggtcccgatcaccgtagcgagcattgagcctaaaaccatcatagccttttcgcataataatattgataacgcccgttaccgcatctgacccgtaaacggccgacgcaccatctgcgattaattctattcgatccactgcgctgaacggaatcatgttcaagttaacagaaccaccaccgccgagagaaggcgaacctgtaatgcgcttgccatttacaagaaccagtgctcgagacgcgcccaacccgcgaagattgaatgttgcatttgactgcgcgctgttaccagatgattcgcgaaaagagccaaaggagttcaagttggacgatctcaatgcatccgcaaccgaaatatcaccggtgatacgcatatcttcagcagtaatcgtgatcacttcttgagaggccgaattcagagttcgcttgatccgtgaaccggttacaaccacctcttccaangcatcagcatcgtctccctcctcagcgaggaccagaccgctatgccccattgcaaaacccgttgaaaggcctagtgccagtcgaacgcatgtcctaagactatcttttctaaacataagacttactctctttaacgttacttcccattttttatccatcaaccctttaaaccgctctctattgctgcctgataaattcagaataaagtcccggttgatagccactttttgtgctcagcctgcaaggactacttcccccgtccagcaattggagcagcaccngaagattttatcgccactaatctgccaaattcaatctttatttgatgcttttgaatcttttcaaaaggatctttccccaataatcaagcggctttttcagtgaacggcgggttcaagcgcttggcaggagatcaaatgcaatcaccattcgctctccatccccaacaaaagctaaggtttcatgccacaagtaactcgggaatacgactaatcttccaggctttggctgaacaaacacgctgggcgaaaaatcaatcggcagcgcaacgccgggccggcccaacgctaagaacccagcgctttcgacatcgcgctgctctatgacttccggaacactgacataatagacgcaactcaaccagcctttactatgaacatggggcacatgaagtcccccttcagcaaccttaatcgaccatgacgattcaagttttacgcccccagctttcctggcatcaaaataaacgccgccgaaccccggtgttgattgtataaaacttaagatttcttgctcaagcacacgccacaaccgattcaaaggggagaaactttgatcaaaaagattcccggcagtctgtgtgcccgcgaaaacactttgtcccaatggcgctctttggaagcaatgctgatcttgcagccaagcttcgattagcgtattcagccgaaaaagctcagcatcaccaacactactagcaagatctatcacgtgaaagggcacgctatcaaaaaacagcctctgatgcttttccgcatcaacaactcttaacgctgtttccaacagcgccaaccagtattgctgattcgcatcttggtcaagcaactgatcaataacccctactgccgcagtaaaatcaccttgtcccatcagcgcaaccgccaaccattctccataatcgcctgattgcggttcaatcagcgcaaccatctcagaaaagcaaccagtgctatgccacaaattgagttgcgcgagcattaaatctcgtgaattggcgaaccattcttttgaaattagattaatcaactgctccgcacgcgcataatcccccgtcgaaactaaaaaattgagataatctgcttgtaacccttgagacaacttcaagaagtcgacgcgctcatagggcgcaagaaaggtatcggaacctaactcaaaagcgagactcgcgtagagcttaaccagcgccctatcgaacatgcctcgacccagggactccgttagccaagcttccgcttcctctactcgccctagcgctaagaacaatcgggcagattcgacgacaatgccggcgtcttccggcgtcaaatttctcgtttttcgcaaggactcaatggctttttcaggttgattgatcttgaactggatgcgagccaacctaaaccaaacaactggatcactcagccggtctaccagcatcgagtctaggacaagcgccgcgccaacataatcaaactgggcttctagcgcgttggtcaggccgaatgctgcttttgcataattgctttttaaaactagggcttgacggtaaatcccctcagccctgctaaactggcccaagtccatcatgtacaagcccaaattgtagaaaaatgccggccgatcgggcgcctgctcaacactcttaatcaagaaagggtacgcagcttcaaacgctccggcgcgccgatacagatcccctaaagccccatttacttctggatcttgcggcgtcaacactgccagatactcaagcgcctcaatggccaccttagaatcaccgcctcgtgaagcagaagccgctagtaatttcaagaactgctgatccgttttaaactgcgcgaccaatggcttcagtgtttcgatcacaattttatcattgccagctacatacgcatcctgagcttgctttaggctcaagccaacatcacttttcttcatatcacacccaactcatcatcgcgtttgtagtcaatggctattcagccaaatacccatcaccggggacacacccttttacctgatcgcgactttatagac

SEQ ID NO: 696 - DNA, 4000 bp, Escherichia coli
  misc_feature (1)..(3): n is a, c, g, or t
  misc_feature (6)..(7): n is a, c, g, or t
  misc_feature (9)..(9): n is a, c, g, or t
  misc_feature (11)..(14): n is a, c, g, or t
  misc_feature (16)..(17): n is a, c, g, or t
  misc_feature (21)..(23): n is a, c, g, or t
  misc_feature (29)..(29): n is a, c, g, or t
  misc_feature (31)..(35): n is a, c, g, or t
  misc_feature (37)..(44): n is a, c, g, or t
  misc_feature (46)..(49): n is a, c, g, or t
  misc_feature (51)..(54): n is a, c, g, or t
  misc_feature (56)..(56): n is a, c, g, or t
  misc_feature (58)..(60): n is a, c, g, or t
  misc_feature (64)..(66): n is a, c, g, or t
  misc_feature (69)..(70): n is a, c, g, or t
  misc_feature (74)..(76): n is a, c, g, or t
  misc_feature (79)..(79): n is a, c, g, or t
  misc_feature (81)..(82): n is a, c, g, or t
  misc_feature (85)..(87): n is a, c, g, or t
  misc_feature (89)..(90): n is a, c, g, or t
  misc_feature (93)..(97): n is a, c, g, or t
  misc_feature (99)..(102): n is a, c, g, or t
  misc_feature (104)..(116): n is a, c, g, or t
  misc_feature (118)..(121): n is a, c, g, or t
  misc_feature (123)..(128): n is a, c, g, or t
  misc_feature (131)..(133): n is a, c, g, or t
  misc_feature (136)..(137): n is a, c, g, or t
  misc_feature (139)..(139): n is a, c, g, or t
  misc_feature (141)..(144): n is a, c, g, or t
  misc_feature (146)..(157): n is a, c, g, or t
  misc_feature (159)..(162): n is a, c, g, or t
  misc_feature (164)..(166): n is a, c, g, or t
  misc_feature (169)..(170): n is a, c, g, or t
  misc_feature (172)..(172): n is a, c, g, or t
  misc_feature (174)..(175): n is a, c, g, or t
  misc_feature (180)..(184): n is a, c, g, or t
  misc_feature (186)..(187): n is a, c, g, or t
  misc_feature (189)..(189): n is a, c, g, or t
  misc_feature (191)..(193): n is a, c, g, or t
  misc_feature (195)..(197): n is a, c, g, or t
  misc_feature (201)..(207): n is a, c, g, or t
  misc_feature (211)..(221): n is a, c, g, or t
  misc_feature (223)..(227): n is a, c, g, or t
  misc_feature (233)..(253): n is a, c, g, or t
  misc_feature (255)..(259): n is a, c, g, or t
  misc_feature (261)..(263): n is a, c, g, or t
  misc_feature (265)..(267): n is a, c, g, or t
  misc_feature (269)..(272): n is a, c, g, or t
  misc_feature (275)..(280): n is a, c, g, or t
  misc_feature (283)..(288): n is a, c, g, or t
  misc_feature (290)..(293): n is a, c, g, or t
  misc_feature (296)..(300): n is a, c, g, or t
  misc_feature (302)..(303): n is a, c, g, or t
  misc_feature (305)..(306): n is a, c, g, or t
  misc_feature (308)..(309): n is a, c, g, or t
  misc_feature (312)..(313): n is a, c, g, or t
  misc_feature (315)..(315): n is a, c, g, or t
  misc_feature (319)..(321): n is a, c, g, or t
  misc_feature (324)..(324): n is a, c, g, or t
  misc_feature (326)..(327): n is a, c, g, or t
  misc_feature (329)..(329): n is a, c, g, or t
  misc_feature (331)..(333): n is a, c, g, or t
  misc_feature (335)..(335): n is a, c, g, or t
  misc_feature (337)..(338): n is a, c, g, or t
  misc_feature (340)..(341): n is a, c, g, or t
  misc_feature (343)..(346): n is a, c, g, or t
  misc_feature (348)..(351): n is a, c, g, or t
  misc_feature (353)..(355): n is a, c, g, or t
  misc_feature (357)..(367): n is a, c, g, or t
  misc_feature (369)..(374): n is a, c, g, or t
  misc_feature (376)..(379): n is a, c, g, or t
  misc_feature (381)..(382): n is a, c, g, or t
  misc_feature (385)..(391): n is a, c, g, or t
  misc_feature (393)..(396): n is a, c, g, or t
  misc_feature (398)..(401): n is a, c, g, or t
  misc_feature (404)..(405): n is a, c, g, or t
  misc_feature (408)..(410): n is a, c, g, or t
  misc_feature (412)..(412): n is a, c, g, or t
  misc_feature (414)..(415): n is a, c, g, or t
  misc_feature (417)..(422): n is a, c, g, or t
  misc_feature (424)..(427): n is a, c, g, or t
  misc_feature (429)..(430): n is a, c, g, or t
  misc_feature (434)..(437): n is a, c, g, or t
  misc_feature (439)..(439): n is a, c, g, or t
  misc_feature (441)..(455): n is a, c, g, or t
  misc_feature (457)..(458): n is a, c, g, or t
  misc_feature (462)..(465): n is a, c, g, or t
  misc_feature (467)..(468): n is a, c, g, or t
  misc_feature (470)..(476): n is a, c, g, or t
  misc_feature (479)..(481): n is a, c, g, or t
  misc_feature (484)..(489): n is a, c, g, or t
  misc_feature (492)..(493): n is a, c, g, or t
  misc_feature (495)..(496): n is a, c, g, or t
  misc_feature (498)..(501): n is a, c, g, or t
  misc_feature (503)..(503): n is a, c, g, or t
  misc_feature (506)..(508): n is a, c, g, or t
  misc_feature (510)..(512): n is a, c, g, or t
  misc_feature (514)..(520): n is a, c, g, or t
  misc_feature (522)..(523): n is a, c, g, or t
  misc_feature (525)..(530): n is a, c, g, or t
  misc_feature (534)..(536): n is a, c, g, or t
  misc_feature (538)..(546): n is a, c, g, or t
  misc_feature (549)..(550): n is a, c, g, or t
  misc_feature (553)..(559): n is a, c, g, or t
  misc_feature (561)..(565): n is a, c, g, or t
  misc_feature (568)..(569): n is a, c, g, or t
  misc_feature (572)..(574): n is a, c, g, or t
  misc_feature (576)..(580): n is a, c, g, or t
  misc_feature (582)..(582): n is a, c, g, or t
  misc_feature (584)..(584): n is a, c, g, or t
  misc_feature (589)..(592): n is a, c, g, or t
  misc_feature (594)..(595): n is a, c, g, or t
  misc_feature (597)..(599): n is a, c, g, or t
  misc_feature (601)..(601): n is a, c, g, or t
  misc_feature (603)..(603): n is a, c, g, or t
  misc_feature (605)..(606): n is a, c, g, or t
  misc_feature (610)..(611): n is a, c, g, or t
  misc_feature (613)..(618): n is a, c, g, or t
  misc_feature (620)..(625): n is a, c, g, or t
  misc_feature (627)..(639): n is a, c, g, or t
  misc_feature (641)..(642): n is a, c, g, or t
  misc_feature (644)..(652): n is a, c, g, or t
  misc_feature (654)..(655): n is a, c, g, or t
  misc_feature (658)..(658): n is a, c, g, or t
  misc_feature (661)..(662): n is a, c, g, or t
  misc_feature (664)..(666): n is a, c, g, or t
  misc_feature (670)..(672): n is a, c, g, or t
  misc_feature (674)..(677): n is a, c, g, or t
  misc_feature (679)..(679): n is a, c, g, or t
  misc_feature (682)..(682): n is a, c, g, or t
  misc_feature (684)..(685): n is a, c, g, or t
  misc_feature (687)..(689): n is a, c, g, or t
  misc_feature (693)..(694): n is a, c, g, or t
  misc_feature (696)..(704): n is a, c, g, or t
  misc_feature (706)..(706): n is a, c, g, or t
  misc_feature (708)..(709): n is a, c, g, or t
  misc_feature (712)..(717): n is a, c, g, or t
  misc_feature (719)..(722): n is a, c, g, or t
  misc_feature (724)..(724): n is a, c, g, or t
  misc_feature (726)..(726): n is a, c, g, or t
  misc_feature (729)..(730): n is a, c, g, or t
  misc_feature (732)..(738): n is a, c, g, or t
  misc_feature (740)..(743): n is a, c, g, or t
  misc_feature (746)..(746): n is a, c, g, or t
  misc_feature (748)..(753): n is a, c, g, or t
  misc_feature (755)..(758): n is a, c, g, or t
  misc_feature (763)..(769): n is a, c, g, or t
  misc_feature (771)..(771): n is a, c, g, or t
  misc_feature (774)..(778): n is a, c, g, or t
  misc_feature (780)..(782): n is a, c, g, or t
  misc_feature (784)..(793): n is a, c, g, or t
  misc_feature (795)..(799): n is a, c, g, or t
  misc_feature (801)..(804): n is a, c, g, or t
  misc_feature (806)..(810): n is a, c, g, or t
  misc_feature (813)..(815): n is a, c, g, or t
  misc_feature (817)..(820): n is a, c, g, or t
  misc_feature (822)..(823): n is a, c, g, or t
  misc_feature (825)..(825): n is a, c, g, or t
  misc_feature (827)..(828): n is a, c, g, or t
  misc_feature (830)..(835): n is a, c, g, or t
  misc_feature (837)..(839): n is a, c, g, or t
  misc_feature (841)..(847): n is a, c, g, or t
  misc_feature (849)..(849): n is a, c, g, or t
  misc_feature (851)..(853): n is a, c, g, or t
  misc_feature (855)..(856): n is a, c, g, or t
  misc_feature (858)..(864): n is a, c, g, or t
  misc_feature (866)..(870): n is a, c, g, or t
  misc_feature (873)..(885): n is a, c, g, or t
  misc_feature (887)..(889): n is a, c, g, or t
  misc_feature (891)..(896): n is a, c, g, or t
  misc_feature (899)..(903): n is a, c, g, or t
  misc_feature (905)..(907): n is a, c, g, or t
  misc_feature (909)..(914): n is a, c, g, or t
  misc_feature (918)..(922): n is a, c, g, or t
  misc_feature (924)..(925): n is a, c, g, or t
  misc_feature (927)..(928): n is a, c, g, or t
  misc_feature (930)..(930): n is a, c, g, or t
  misc_feature (932)..(936): n is a, c, g, or t
  misc_feature (938)..(938): n is a, c, g, or t
  misc_feature (940)..(941): n is a, c, g, or t
  misc_feature (943)..(949): n is a, c, g, or t
  misc_feature (951)..(952): n is a, c, g, or t
  misc_feature (956)..(958): n is a, c, g, or t
  misc_feature (960)..(962): n is a, c, g, or t
  misc_feature (964)..(965): n is a, c, g, or t
  misc_feature (967)..(968): n is a, c, g, or t
  misc_feature (971)..(971): n is a, c, g, or t
  misc_feature (973)..(983): n is a, c, g, or t
  misc_feature (997)..(997): n is a, c, g, or t
  misc_feature (999)..(1000): n is a, c, g, or t
  misc_feature (1018)..(1018): n is a, c, g, or t
  misc_feature (1021)..(1021): n is a, c, g, or t
  misc_feature (1045)..(1045): n is a, c, g, or t
  misc_feature (1048)..(1048): n is a, c, g, or t
  misc_feature (1054)..(1054): n is a, c, g, or t
  misc_feature (1057)..(1057): n is a, c, g, or t
  misc_feature (1060)..(1060): n is a, c, g, or t
  misc_feature (1078)..(1078): n is a, c, g, or t
  misc_feature (1159)..(1159): n is a, c, g, or t
  misc_feature (1183)..(1183): n is a, c, g, or t
  misc_feature (1185)..(1185): n is a, c, g, or t
  misc_feature (1190)..(1190): n is a, c, g, or t
  misc_feature (1195)..(1195): n is a, c, g, or t
  misc_feature (1225)..(1225): n is a, c, g, or t
  misc_feature (1228)..(1228): n is a, c, g, or t
  misc_feature (1231)..(1231): n is a, c, g, or t
  misc_feature (1249)..(1249): n is a, c, g, or t
  misc_feature (1252)..(1252): n is a, c, g, or t
  misc_feature (1261)..(1261): n is a, c, g, or t
  misc_feature (1946)..(1946): n is a, c, g, or t
  misc_feature (1985)..(1985): n is a, c, g, or t
  misc_feature (2223)..(2223): n is a, c, g, or t
  misc_feature (2282)..(2282): n is a, c, g, or t
nnnaannantnnnncnntttnnntttttnannnnnannnnnnnnannnncnnnnancnnntttnnnttnntttnnnttnannccnnnannaannnnnannnntnnnnnnnnnnnnncnnnnannnnnnttnnnggnntnannnnannnnnnnnnnnntnnnncnnnttnntnannttttnnnnnannantnnntnnncttnnnnnnntttnnnnnnnnnnntnnnnncccctnnnnnnnnnnnnnnnnnnnnntnnnnntnnntnnnannnnttnnnnnnggnnnnnnannnnttnnnnnannanntnnggnnantttnnnttnanncnannncnanncnntnnnntnnnntnnnannnnnnnnnnncnnnnnncnnnngnnttnnnnnnnannnngnnnntannggnnntncnngnnnnnntnnnntnncctnnnnantnnnnnnnnnnnnnnnanncccnnnnannannnnnnnccnnnccnnnnnnttnntnnannnnanttnnngnnntnnnnnnngnngnnnnnncccnnntnnnnnnnnnaannaannnnnnncnnnnnaannctnnngnnnnnantnttttnnnntnntnnnangnannaaanncnnnnnntnnnnnntnnnnnnnnnnnnnannannnnnnnnnannggnttnntnnntttnnnannnncnttnanntnnnaaannannnnnnnnncntnnttnnnnnntnnnngntnccnngnnnnnnnannnntcntnnnnnnannnnctttnnnnnnntnaannnnnannntnnnnnnnnnnannnnngnnnncnnnnnaannngnnnncnncnannannnnnnannncnnnnnnntntnnnanntnnnnnnntnnnnnaannnnnnnnnnnnncnnntnnnnnnccnnnnncnnngnnnnnntttnnnnncnnanntnannnnncnanncnnnnnnnannaaannntnnntnntnnttncnnnnnnnnnnnaaaaagccccatangnnggggcttccttatttctngtnacttacagtagttcagtaacttcntcngcaacntcngcnggtacattatcagaaccnccattctcaaggattctagtttcaatgaactccttctgctggtctgctgatggacgactaataacatcgtcaatgttaggnaactctttagtagcttctaactcngnttcanctaangggcgtactttacactttagtacttgtaangtntantctacattaaaaggtagnggnccagtcttntgcttcttaaatgctaagtcccaaccagttactgggtccgtagggtctcctaagtcttctgctgctaccattactgcttcaaataacttctttttaaggttaagcactttaactttaccgtcatcggggtcaatacactgtactgcatacgcccatgaacatttcatatctgtatggtagtgtcttacccagtccttttcaatatttgtaaattgttctttatctctgtcaaaccctaagcactccatagggacacgcttaccgtctgctgttgttacccaataaacatatctaggaagaacgtctcctactatgcgaacaacattgttgccttctttatatgtgtatgcgtctactgaagacttctttgctttacctgttacattgccaaatttaattgccatattctttttcctcgtaataaaatgttatattatcttgctcatcaagttctaatagtggattgtcctctatatctttccgagttatctctgtgtatctatatggtaaggttgctacgccctgccacttgtaatctaagtaatttctatagcttgctagttccatataggcaaccatctgttctagagttacttgaagtttattcttaaatatcgctttaggatttagtaaaaaactatctccagttatatcttgtccgtaaaacctgtttaaacttttattntttttaggcattttaatactataagtatagataaccatnaaccttattgtatttttagttacacctttgctaagtttaagcaccttttcccagtcgtaaaatatcaacttaaatctccattttcgaatttatattataccaatatttaacctatttgtcaagtattattttttataggtatagcattaaaccttcttttctatatactccatgcccttgtaaagttactcgtatatcatctgaaaaggtaggtacctcattagctacttgatgtagngtttgtccatcatgcacatacaaggtgcctatagtgtacttctcatactttttattganatctacccagtttttaaatatgggaggtagattctcgtataatgaggagatgtcttgtggaggcttattccctttaattaaccttaaagcttcatcttctagccagtagttcatacctcctccatttctaggcatagataaagccaaagtaaatgttatgggtctgtccatatcaaacttaaaagggaactctgaagttatatgaggggcgtctaggtgtatagagcctccgaacctagttccgtacagcatagattctctacctctgaatacatggaagcccgggaaggcgtagtcggggtctaaaaatgcttctgtgcctaactcttcagagataacctctgataccatattaataatatctgagaaatgctttagtagtaactcattatcattatttgtgtgggcagcaggtccgtctaaatatgccgccgctcctaatgtataaaaatcggggtatgcaggggaaacaaatccatcttcaccataatactgattacgcactatccagtgttcttctaaggataggaccttatctactagaaccttgcactcttctgcggttattaaatctatttttgctatcatcctgctaccaccttaatatcatatccttgtttaatatatactgctgaacgcgctttagcctgtcttgcagcagtattaccctttaaatgaatatctagtaatacaggctgtaccttgccctccatttttctaatgactctacctatcaactgcgttaataagggctcattattgattggagtacccaaaatgagacaactaagctcattaactgagataccctcactgaagatgctttgagacccgtataggatatctgcttctccatttctaatcttgtccaactcttcgtctctttgttcatgtggtagctctcctgtaatacatattgcattatttccggttaggtcggcgcacctgttaagaaactggaccctatcacttactaccaatactttatggccttttgctgcatacactgaagcaagttgtgcaatcatcttctgatagttctcgtcatatgccacctgattaactctcttagcccagggaagttttgcactatcggggaaccgcgtctccgacttaactaatacaactctaggggttatgtagttctctttaggaggttggtgaacatcatatccaaagtaatcattaaatataatatgtttaccatctttacgttgaagtgtaccacttagtcctatcttatatctagcgctacacttatcaattatattagaaaatgtaggtgcgcttacgtgatgcatttcatccaaaattattgttccaaacattttttgaatttctgtcattttcttgctaagagtttgtacattagatacaacaattatcgggtcagtatcaaactttccacttccaatgactcctggaacaatgcccaaacacttttctatttcatcttcccactgctttcttaacgctaatgtatgtactacaactaaggtcttctgccccaacttggcagcaatagctatcgctgtaaaagtcttaccccaacttacaaaagcgtttataattgcgttgtcctcaacttcgttgtaaactttggcttggctatcccgaaggtcaaatttgaaatcgggaaaagttaccggcactaaagttcttttatcaattatttcaaagtcctcaggtattaaatccattctacccattggaactgt

SEQ ID NO: 697 - DNA, 4000 bp, Escherichia coli
  misc_feature (1)..(3): n is a, c, g, or t
  misc_feature (15)..(15): n is a, c, g, or t
  misc_feature (37)..(37): n is a, c, g, or t
  misc_feature (172)..(172): n is a, c, g, or t
  misc_feature (237)..(237): n is a, c, g, or t
  misc_feature (295)..(295): n is a, c, g, or t
  misc_feature (298)..(298): n is a, c, g, or t
  misc_feature (355)..(355): n is a, c, g, or t
  misc_feature (426)..(426): n is a, c, g, or t
  misc_feature (464)..(465): n is a, c, g, or t
  misc_feature (486)..(486): n is a, c, g, or t
  misc_feature (551)..(551): n is a, c, g, or t
  misc_feature (677)..(677): n is a, c, g, or t
  misc_feature (1242)..(1242): n is a, c, g, or t
  misc_feature (1394)..(1394): n is a, c, g, or t
  misc_feature (1404)..(1404): n is a, c, g, or t
  misc_feature (1494)..(1494): n is a, c, g, or t
  misc_feature (1533)..(1534): n is a, c, g, or t
  misc_feature (1539)..(1539): n is a, c, g, or t
  misc_feature (1674)..(1674): n is a, c, g, or t
  misc_feature (1935)..(1935): n is a, c, g, or t
  misc_feature (1989)..(1989): n is a, c, g, or t
  misc_feature (1992)..(1992): n is a, c, g, or t
  misc_feature (2442)..(2442): n is a, c, g, or t
  misc_feature (2981)..(2981): n is a, c, g, or t
  misc_feature (3263)..(3263): n is a, c, g, or t
  misc_feature (3485)..(3485): n is a, c, g, or t
  misc_feature (3539)..(3539): n is a, c, g, or t
nnngttgggatctgnatcgtggtggacgcggagccanacatcggcgtgatgctcgtcagcggcagagatgagtcgctcatggtactcgttgatgcgtatgcggttttcgggttgttccactaacagggcgagcgcctcggtgatgtctttccgggcttccgccagggtatcnccgaagccgtaggctgaatgtgagagcgcatatgcttcccatctggcatcccgggtataacggantgcaacgtcatagatgccgtcaatcatttttgtgttctcctctcggttgtttcccggnccngtttgggttctggtccaggttctgggtatttccgcgaaagcatgcgaccgtaatctngcagaatctggtccaaacatcatgataaatatcattgttcgggtgttatggggcttctacaatgaggaatngaccgctttccattgtggagaaccacgggtcacctgtnngccgatgcaggtggcccgtgnttcaattttgaccggttttgtagtgctgcgctggggtttgaggtttggtggtactagttcgcccncgctggatcgagaacatcaagctcagcacattcgctgagctctagtttgtagctaaccccagctttttctgctgtccacccaccagaatcccagctcagcaaacatgcagccggttcttctcgtgnccccatgagcaatgcgcatattcatgataaatatcattggtctcggcatgatgtggccgctagagtggaggcaacgcggtcatcaattcacacgccatttatttggatgctctgtgaagagatgaaggccacccgtatgtgaaaacacgggtggcctatcaattttcttcagtggagctggagatgggacttgaacccacaacctacggtttacaagaccgttgcgctaccgattgcgccactccagcacatgccgagaatgaaaactggcacgaggtgaatagtactaaaactttgccggtaatccaatgtggcggacaataaggctatgaggcgctatcatcgttcaatccgtattcatgcattacgcttgaggtaatgacgataatggaatggtggtaatcctgctgtgagctcggtttttactgtactgcgccgtctggctacgggtgggggccgcattgccacgattgacgcggccaaggccgcgccacccccatcaccattagccccggtggatttgaccgatcccgcccaggttgccggtgtcatggatttggctgcncgggttggtgatattttattggcttccggcacctcaaaccgggatactgtggtgcaggttcatgcggtggcctctgcttatggtttgcactatatgcatgtggatatcacgctgaataccattaccgtgttcaccaccattggtgtggagcngaagcttccngtcagcgtgtttcgggtggtgtcgaatatgcggacggatttttcgaagttgagcgaggtggaccggcttattcggtctattcaggcgggngccacgtccccggatattgccacgaagattttggatggnntgtancggtcgccggcatcctatgggtttaagacttccctggtggggtggggtgggttggccgcattggtgtcggtcatgattggtgggggttggttgccggcggtggtgtcgtttctcattggggtggtcatcattggnatggatgcggtgttgcgccggcagaagttgccgccgttttttcataatgtgtttggtgggtttattgccaccttgttggctgctgtcgcatattcctggtcgccggataatgtgaccccgtcgcatattattgcggccggcattgtggtgatgttggcgaacctgtcgttggtgcagtcgttgcaggatggtattaccggggcaccggtgacggcgagcgcccggttctttgaaacgttcctgctgaccagcgcgattgtngccggggtgggtgcggggattcaggcgtcggggtggttggggatttccctgccnccnttggagccgctgcaccagccgaccacgaccatggccctggtggggattatggccggggccgcggcgtcgataagcttcgctattgcctgctatgcggagctgtcgtcggtgtttgttgcgggggccacggcagcggttggcaccagcatgttttacgtatccatgctggtgttgggcatgtcgcatatcacgtcggccgcgattgccgccaccactattgggttcggtggcggcctgctggcccggcggtttctcattccgccgctgctcaccgcggtcgccggtatcacccccatgctgccggggctggcgttgtatcggggcatgtatgcggcgctgaataatcagctgttggtggggttcgccaatatggcggtggcgctgtcggtggcggccgcgttggcgtccggtgtggtgttgggtgagtgggcggcccggaagctgcgtcgnccgccgaagatcacgttctaccgcgcatttcgtcgaccgcagtttggttcacattcggggccgaaatagcgtaagatattggttttgcatagcttggagtttctgataatgaaggaggcggccccttgccaccaaaggtcactgatacccgcagcccagcggagcccttgcacgccgttgaggaggaaaccgctgccgctgcccgcaaggttgtcgcgtcttatgcggaaaactttttcgacggtgtgacattgatgtgcatgttgggtgtcgagcccgcaggcttgtcgtataagaaggtttatgcggagtatgcggatactatagcgccgaagaagaccacgaagcgcagtaagaaaaccacgaaaaaggctactaagaaggcaacgaagaaagccaccgccaagaaaaccacaaagaaagccacgaaggccgcaaagaagactactaaaaagaccacgaagaaggcataaatgaatgactttgtggtggttgccaaccggctgcccgtcgatttgcactatgacgataatggcgcnccggtgtggacgcccagccccggcggcctggttgctgcgctaaccccggtgttggcgcagcatcatggttgttggattggttggcccggcaccaccacggaggcccccgaaccgttccgcaccgagtcggggattctgctcaacccggtgagtctttcccagtcggactatgaggagttttacgaggggttcgctaatgccaccttgtggccgctgtatcatgatctgattgtgacccccaggtatcaccgcaattggtgggacgcctaccagcgggtgaancggaagtttgcggaaaccgcggcccaggttgccgcccccaatgccaccgtgtgggtgcaggattatcagctgcaactcgtgcccggcatgcttcgggagttgcgacccgatttgaccattgggtttttcctgcatattccgtttcccgcccccgatttgttccggcagttgccgtggcgggaagaaatcctcacaggggtgttgggggcggatatggttggnttccatttggcgtcgaacgcccggaatttcctccacgtggtggcacactattcngagcatgatgtgtccggcacggtgtcggtgcgggacattaccgcccacgtgcacacgtcggacgaccggcaggtggggattggggcgtttccgattgccattgaccccacgccgtttttggtggatatagataagaccgaggtgcgggctgagctggggaatcccgaccaaatcattttgggtgtggatcggctggattacaccaaggggattttgcagcggctgcaggcgttggaggagctgcacaaggcgggtatgatgccgccccgaacggtgtttttgcagattgcgacgccctcccgggagcggattgaccattaccggcgaacccggaacatggttgagcaggcggtggggcggatcaatggccggtttgggtcgttggggtcgcaggtggtgttgtaccagcaccagtcgtttgatcgggaacggttggtgaagctctacgccacggcggatat

SEQ ID NO: 698 - DNA, 4000 bp, Escherichia coli
  misc_feature (443)..(443): n is a, c, g, or t
  misc_feature (490)..(490): n is a, c, g, or t
  misc_feature (656)..(656): n is a, c, g, or t
  misc_feature (848)..(848): n is a, c, g, or t
  misc_feature (863)..(863): n is a, c, g, or t
  misc_feature (888)..(888): n is a, c, g, or t
  misc_feature (905)..(905): n is a, c, g, or t
  misc_feature (938)..(938): n is a, c, g, or t
  misc_feature (947)..(947): n is a, c, g, or t
  misc_feature (965)..(965): n is a, c, g, or t
  misc_feature (1007)..(1007): n is a, c, g, or t
  misc_feature (1163)..(1163): n is a, c, g, or t
  misc_feature (1445)..(1445): n is a, c, g, or t
  misc_feature (1870)..(1870): n is a, c, g, or t
  misc_feature (1997)..(1997): n is a, c, g, or t
  misc_feature (2143)..(2143): n is a, c, g, or t
  misc_feature (2179)..(2179): n is a, c, g, or t
  misc_feature (2234)..(2234): n is a, c, g, or t
  misc_feature (2238)..(2238): n is a, c, g, or t
  misc_feature (2250)..(2250): n is a, c, g, or t
  misc_feature (2262)..(2262): n is a, c, g, or t
  misc_feature (2314)..(2315): n is a, c, g, or t
  misc_feature (2317)..(2317): n is a, c, g, or t
  misc_feature (2444)..(2444): n is a, c, g, or t
  misc_feature (2453)..(2453): n is a, c, g, or t
  misc_feature (2465)..(2465): n is a, c, g, or t
  misc_feature (2472)..(2472): n is a, c, g, or t
  misc_feature (2479)..(2479): n is a, c, g, or t
  misc_feature (2485)..(2485): n is a, c, g, or t
  misc_feature (2500)..(2500): n is a, c, g, or t
  misc_feature (2528)..(2528): n is a, c, g, or t
  misc_feature (2531)..(2531): n is a, c, g, or t
  misc_feature (2534)..(2534): n is a, c, g, or t
  misc_feature (2537)..(2537): n is a, c, g, or t
  misc_feature (2614)..(2614): n is a, c, g, or t
  misc_feature (2619)..(2619): n is a, c, g, or t
  misc_feature (2621)..(2621): n is a, c, g, or t
  misc_feature (2628)..(2628): n is a, c, g, or t
  misc_feature (2630)..(2630): n is a, c, g, or t
  misc_feature (2632)..(2632): n is a, c, g, or t
  misc_feature (2634)..(2637): n is a, c, g, or t
  misc_feature (2639)..(2639): n is a, c, g, or t
  misc_feature (2641)..(2647): n is a, c, g, or t
  misc_feature (2649)..(2649): n is a, c, g, or t
  misc_feature (2652)..(2652): n is a, c, g, or t
  misc_feature (2654)..(2654): n is a, c, g, or t
  misc_feature (2661)..(2663): n is a, c, g, or t
  misc_feature (2667)..(2667): n is a, c, g, or t
  misc_feature (2669)..(2670): n is a, c, g, or t
  misc_feature (2672)..(2673): n is a, c, g, or t
  misc_feature (2675)..(2677): n is a, c, g, or t
  misc_feature (2680)..(2680): n is a, c, g, or t
  misc_feature (2682)..(2683): n is a, c, g, or t
  misc_feature (2685)..(2700): n is a, c, g, or t
  misc_feature (2702)..(2702): n is a, c, g, or t
  misc_feature (2706)..(2709): n is a, c, g, or t
  misc_feature (2713)..(2714): n is a, c, g, or t
  misc_feature (2717)..(2723): n is a, c, g, or t
  misc_feature (2725)..(2727): n is a, c, g, or t
  misc_feature (2729)..(2738): n is a, c, g, or t
  misc_feature (2740)..(2743): n is a, c, g, or t
  misc_feature (2745)..(2745): n is a, c, g, or t
  misc_feature (2748)..(2761): n is a, c, g, or t
  misc_feature (2763)..(2770): n is a, c, g, or t
  misc_feature (2773)..(2780): n is a, c, g, or t
  misc_feature (2782)..(2790): n is a, c, g, or t
  misc_feature (2792)..(2797): n is a, c, g, or t
  misc_feature (2799)..(2807): n is a, c, g, or t
  misc_feature (2809)..(2811): n is a, c, g, or t
  misc_feature (2813)..(2822): n is a, c, g, or t
  misc_feature (2824)..(2835): n is a, c, g, or t
  misc_feature (2837)..(2843): n is a, c, g, or t
  misc_feature (2845)..(2852): n is a, c, g, or t
  misc_feature (2854)..(2855): n is a, c, g, or t
  misc_feature (2857)..(2867): n is a, c, g, or t
  misc_feature (2869)..(2876): n is a, c, g, or t
  misc_feature (2878)..(2879): n is a, c, g, or t
  misc_feature (2881)..(2885): n is a, c, g, or t
  misc_feature (2887)..(2892): n is a, c, g, or t
  misc_feature (2894)..(2910): n is a, c, g, or t
  misc_feature (2912)..(2932): n is a, c, g, or t
  misc_feature (2934)..(2937): n is a, c, g, or t
  misc_feature (2940)..(2959): n is a, c, g, or t
  misc_feature (2961)..(2961): n is a, c, g, or t
  misc_feature (2963)..(2971): n is a, c, g, or t
  misc_feature (2973)..(2982): n is a, c, g, or t
  misc_feature (2984)..(2986): n is a, c, g, or t
  misc_feature (2988)..(2996): n is a, c, g, or t
  misc_feature (2998)..(3003): n is a, c, g, or t
  misc_feature (3005)..(3040): n is a, c, g, or t
  misc_feature (3042)..(3042): n is a, c, g, or t
  misc_feature (3044)..(3044): n is a, c, g, or t
  misc_feature (3046)..(3057): n is a, c, g, or t
  misc_feature (3059)..(3102): n is a, c, g, or t
  misc_feature (3104)..(3104): n is a, c, g, or t
  misc_feature (3106)..(3142): n is a, c, g, or t
  misc_feature (3144)..(3165): n is a, c, g, or t
  misc_feature (3167)..(3172): n is a, c, g, or t
  misc_feature (3174)..(3212): n is a, c, g, or t
  misc_feature (3214)..(3238): n is a, c, g, or t
  misc_feature (3240)..(3317): n is a, c, g, or t
  misc_feature (3319)..(3346): n is a, c, g, or t
  misc_feature (3348)..(3427): n is a, c, g, or t
  misc_feature (3429)..(3582): n is a, c, g, or t
  misc_feature (3584)..(4000): n is a, c, g, or t
gatgggaacagcggagtgcgaggcttctccggctcatcggccaccttgggaggggtgggcatgtcggtgcgggaggggaataagggttccttccgcagctgcccactgcctttaatagccgatttaggtgtggttggtcggcttgccggcttgggatgattgagttttgacgcatcccgcgatacgtccgtcggcaagctcgatgtgtctttatcgttttcattattgggcatcatgccaccgccttttgccagaagagttcatatggtgcatcaaccacgctgcgctccactcggaccgccgctaacatagccacaaccgacgaaaccaacaacgccataaccaaacccaccaatggtgacaggaatgcgaacgccaccgtcaccaataccaaatagccgccagcaccaaccgccgcgttcacgtgccgccgcacctgactnaactgcgccatactgacatatgccgccaccaatgtggccggcaacangaacagcaacaaactggtgtacccatgttgaatgccaaaaacaccacccatgagcaacgagcctaaacttgcagacgtgctgaccgcaatagtgctagccaccaaataggccaggttcccccgagaatttgaaatatcgctccccaattgcgacaacggccggtgngccacatcatccactagctggtcaaaactgtgctgcaagtccgggaacttcgtggcgttacacaccgcgagcgtcaccgtgacgggaataatggcggtgtatgccagccaaaggttttcctcgttcggcgtgagcaccagaaccaagaatttatccatccacagcaccccaccaatgagcaccccatacacngccttggccagcatnctttgcagatccatggcgggagccnggaataaaccaagcagncccttcccaaggaaggggatttgcagcaccgcnccggcgagnggggccaggtaccagaanccggggaggaagaagaacaccgccccgtaggcaacccagccngccacgaccgcttccttgcggatctccatggtgggtatgaggcaatgcaggaaaaacacattactcatgacgccggcaatatagaggccaatgttgccggcggaccaaccacagataagaaggagaagcgaaaaaatccccaccgggatgagcgtnaagaccagcatgagcagccagccgcggcagaattcccgaacaaaatcctgcttggcctgtttatccgtgccggacagcctagccaccggccggaacgccggcagcattgcggtaccaaccaaccatggcgtggtgatggccacaagcaccacaatggtggtttgcgcaccaagttgcttggtcacaaagggcaatattgcgagcagtaaggccgtgggggctagattcatgatgatctgccaggcacgccgattcgccaaaagcgccgccgccaccactacnacggcaacgataccgacaatgagtgccaccattcgctcaggtgggtaggtgacataccaagcccacccggcgccggtaccgatcaatgcggccactgcaatgaccaaatacacgattagcggcaagctgcgggttgtggggcgcttactggacacgaatttctccttgttcgacaaagcaactgcttgtggtcaagcacgcaacgcgaaccggatgtttctatatcaactccgattctgtgagttcttaagctatgcagttactgcctaagtttaatagtggctgttcgaaacacccactgcgacccacctaggggtaggcataatactggtatttattactttttcttgcccccacgatgacatgccatccataagtcatggtttatacgagcacggtgcgagggcattccccaattcgcgccncacccccgcaacacccccataacccattctgaacaggaagtttattggggtacccgccctccccctccttccctccttgcttgacgacgccctcccgcacgcaaaccccctcccctgcgcccaccgngaccgcacatttgccacatgccgaacgccccagatgtaccaaatgtgccagatatgccttgtatatgtggaggctgacacggccatatcacaatgctacatgcttcctgagcagggaatctgatacaggagccgcccaacggcacngcccgcgacagaaaccccgcttagcacccgtgaagnagtagggctgcatattatctaagcggggtttctggtttaggcgccttgtttcggntggngcgcgccagccnattgggagaaancccgcttagaactcttgcagctccaggctgtggcggggcgacgcggatagcnngngttctaagctgcgtttctgtcaaaacgtggtgcttttgaagcgtctctgggagggttttgcagcttagatattgtgctacggcattggctgcactagtgctgagctgtagttccgggtagcaggtgngcataccancaggagtagcancaggcanaaacccnaagtcnagctcagcacttctnctaaacggggtttctggtttcggggccnccnacnagnaccagtttcagccagaaaccccgcttagaacaattgcagccacgagaaaacacgagtagtaagcgttctaagctgcntttcngncaaaacncnangnnnncnannnnnnncnggngngttttannncttngnngnngnnntananngnnnnnnnnnnnnnnnntnagcnnnngttnnggnnnnnnnannnannnnnnnnnnannnnancannnnnnnnnnnnnngnnnnnnnnctnnnnnnnncnnnnnnnnngnnnnnncnnnnnnnnnannncnnnnnnnnnncnnnnnnnnnnnnannnnnnncnnnnnnnncnngnnnnnnnnnnnannnnnnnnannannnnngnnnnnnannnnnnnnnnnnnnnnntnnnnnnnnnnnnnnnnnnnnnannnngcnnnnnnnnnnnnnnnnnnnntngnnnnnnnnntnnnnnnnnnncnnnannnnnnnnnannnnnngnnnnnnnnnnnnnnnnnnnnnnnnnnnnnnnnnnnnancngnnnnnnnnnnnnannnnnnnnnnnnnnnnnnnnnnnnnnnnnnnnnnnnnnnnnnnncntnnnnnnnnnnnnnnnnnnnnnnnnnnnnnnnnnnnnnannnnnnnnnnnnnnnnnnnnnncnnnnnnannnnnnnnnnnnnnnnnnnnnnnnnnnnnnnnnnnnnnntnnnnnnnnnnnnnnnnnnnnnnnnngnnnnnnnnnnnnnnnnnnnnnnnnnnnnnnnnnnnnnnnnnnnnnnnnnnnnnnnnnnnnnnnnnnnnnnnnnnnnnngnnnnnnnnnnnnnnnnnnnnnnnnnnnngnnnnnnnnnnnnnnnnnnnnnnnnnnnnnnnnnnnnnnnnnnnnnnnnnnnnnnnnnnnnnnnnnnnnnnnnnnnnnnnngnnnnnnnnnnnnnnnnnnnnnnnnnnnnnnnnnnnnnnnnnnnnnnnnnnnnnnnnnnnnnnnnnnnnnnnnnnnnnnnnnnnnnnnnnnnnnnnnnnnnnnnnnnnnnnnnnnnnnnnnnnnnnnnnnnnnnnnnnnnnnnnnnnnnnnnnnngnnnnnnnnnnnnnnnnnnnnnnnnnnnnnnnnnnnnnnnnnnnnnnnnnnnnnnnnnnnnnnnnnnnnnnnnnnnnnnnnnnnnnnnnnnnnnnnnnnnnnnnnnnnnnnnnnnnnnnnnnnnnnnnnnnnnnnnnnnnnnnnnnnnnnnnnnnnnnnnnnnnnnnnnnnnnnnnnnnnnnnnnnnnnnnnnnnnnnnnnnnnnnnnnnnnnnnnnnnnnnnnnnnnnnnnnnnnnnnnnnnnnnnnnnnnnnnnnnnnnnnnnnnnnnnnnnnnnnnnnnnnnnnnnnnnnnnnnnnnnnnnnnnnnnnnnnnnnnnnnnnnnnnnnnnnnnnnnnnnnnnnnnnnnnnnnnnnnnnnnnnnnnnnnnnnnnnnnnnnnnnnnnnnnnnnnnnnnnnnnnnnnnnnnnnnnnnnnn

SEQ ID NO: 699 - DNA, 4000 bp, Escherichia coli
agttaatgaatttccatcattaccagtaattgaaaaatctgaaatagattgaagaactggtaaagttatatcttgttgtgagttttgcaagttaacataactctgaaaacccttagttctaatagttgaatctgatatctctagatcatctaattcgccccgtaaaattcttaatttccttactttgtaattacccgaaagtacatatgaaggtaattcttctgaaatagtccaattaataccattatttgaatcgaccccactactcatccatacttgcttaccatcgcctaattcagttgaatctggatcacttaatattggatattcaactaataattgtgcttcagatgctccagttaatgaatctatttgcatggcaacattaagaactggattagaagtttgagttccatcagttgctgtaagattaaaaaatatcaaatcttcatcaatattttgcacagcaacattagcattatcatcagatgaccttgatatatcatatccagagttagaagcagaggcatcatcggtaacatttactttaaactcataattattatcgccatttctgtctgatggaacttcaaaatctggagatgctctaaaactaatttctccagttgcagaaatttctaatagcgatgaatctgttccagacaacgaaaaatatatttgatcgccatcatcgtcaacagcactaatgattccaacattaaattcattttcatcaatttttaaatctgtaagattgctagttattcttggacttgtatttgtaattgcggttacatcgatattttgatcatctgcaatatagttatagatatcgcttatatatgaattaatcaatgtttcatcggctgttccactgacaattgaaggtatttcatcttgcagtgttgaaattgaaaaattaaaaactgctttcgttatctgactatctgaataaacttttaatattggtagtacatttgagatagcagatactgtatttgcttttgaactatcaccaacagataaacttttttctgatattacattctcaagaactttttgaataaaaacagatgattctatatctacaagttcgtttgtttggctatgttcttgctctaattcttcagatataaatttaaaaaaatcttgagtagtttctgcagaagaattaatactatttgtcaaattttgcagcgtaaaagctagtactgttagttggttacctttttcataaacataatcatttataactgattgaaatttattggagacaggatcaaaggtatatatatcaatagaattatctataccaagtgccgcattaataattgatgaatcagataaaaaagatgcaaccgaagttattggtgagataactttgaattcactgtgaccagttaacttatgattaattaataaattatcgagaagtacttgggtatctaaatcagtgccaccgattgataacaaattaccatttgcatacttaatgttaaactctccttcattatctgatgtcgttgaattctcaccagagtcacagagccaattttcattttcatcaatacatatttcagcaccagaaatatagccatcaactgaaataccatcaacactcctataaccctctacttcaacactcgctgaatttgatcccccagctccagtacaggtaatgctaaaagtattattgccaacagttgagatcgttacatcctcagaaccagaagtttgatttgaggaagtccatgcagcagaacatgttgtggcattggtcgaaaaccaacttaaagtagatgtattatctaattcaactgatgcgggatttgcagaaagattaaccgttggagctgatggaggtgttggaggagcgggtgtatctccaccaccgccaccaccaccgccgcaggatgatattaatattatagatgaagttattataaaaaatttatttaaacttttattcatttggttaaatgatttgctactttctattatgtttaataatttaacttatttgatatatttgtaaagattaaaatctaaaatttacactagctcccaactctccatatgcttttttgaaataatgttctgatctttggttaaaagttattggttcaaaaccaataagattgtttttatataaatctccaaataatgtgacggaaacatttttaaaatcaatttctattccagctcttatcttgaagttatattttggagtatctgcatactcaaagtagtttttaaaatctaaaaacacaaagtcatactcaccaattagattaaaattataaactgacacaaacttttgcttaaatccaaaattaatttgataactctcccatttttctctttgaggcaatctgcttaatgtattcgtaattgcctcccctaaaataattccattaaatgttaggtttagtaaaaatggtgattgaatgtcttcaattggagaaagccaattatagttatatttagtttgaccaatatcaaacgaaaatgagcctaaccagaaattatttatataccttgtgtagcctattgagaaggtatttgtatctccgtttatgctaattatatttgatcctaaattatcgtattttggatttgatgagctaattataaatgatgcattatcacagccacctaaaatgaatccgctaaattcataacaactaaagacttgaggatcagcgacttgattttcataagagatataaactaaattcttatgatcaatgttataaccaattgaaccaccatctttttttgcatttaaagtaacatttttaggttcagttgatctctctaaattaagctcaatttcatttgtataaatttttccttgtatttttttatataaaaagcctacttcaatggattctgaattattttgttcaaaggaagaagggacctcaggcaagaaatcccaatcagcatccataaacttttgctcaaaatttacatacaattcatttgcaaacaatggaatggaagttattaaaataagaatgtatttcattattgtttaattaatatgaattctaatttaacactatataaataaaagaaaaacatcaacaaatagagagttggtggagctacgcgggatcgaaccgcggacctcttgaatgccattcaagcgctctcccagctgagctatagccccaaagattcaacatattacctaacaaaaatttttaagtaaattgttaattaatctaaattgataatttctccaggaaccaatgatacaaagtccacatcaccaattttgtcaactgcactattaagtctaaccctgggctcaattgtatcttcatctgttaatgtaaaagtagcccaatgcattccaaatgctttttcagcctcaagatctaacataatccgaaccgcatcttctggattaacatgactttccgccataaaccattcaggatcataggcaccaataggaataaaggcatactttggtgaaccaagtcttaatttagtctcaataaagtctttggaataaccagtatcgccagcatggtaaaaagagtagtctttatgttctatgaaccagcctccccataaacttttatttctatcaaatagcgatcttttagaccaatgttgtacaggggtaaatgtaaatttaaaacctgagaaatcaaatgattgccaccaaccaaaactataaacattattgattttttttcttactaataatttctcatcacctgctggtactaaaaaaattgcattaggatgcttttttgcaattttttttaaagaatttatatctaaatgatcatagtgattatgacttacagtaactatatcaatacgtggaataatatccaatgggatagctggtggtattaacctttttggtccaatgtttttaaaaggagatgctctttcagaaaaaatagggtcggtaagaatagtaacaccattttttttaattaaaaaagtagaatgaccaatccaaacagcataatta

SEQ ID NO: 700 - DNA, 4000 bp, Escherichia coli
  misc_feature (333)..(333): n is a, c, g, or t
  misc_feature (500)..(500): n is a, c, g, or t
  misc_feature (1990)..(1990): n is a, c, g, or t
  misc_feature (2466)..(2466): n is a, c, g, or t
  misc_feature (2471)..(2471): n is a, c, g, or t
  misc_feature (3094)..(3094): n is a, c, g, or t
tgaaaacgtcttatttatcatatgcaatgagtgtaatagtaagtagagccttaccagatgttagagatggattaaaaccagttcatagaagaataatttatgccatgtacaaagggggctttgattggtcaaaacagtacagaaaatcagcaagagtagtaggagatgttatcggtaaatatcatcctcatggagaccaagcagtatatgatgctttagtaagacttacccaaaatttttcaatgagtttaccactaatagatggccaaggtaattttggttctattgatggcgacccacctgccgccatgagatatacggaaactaaattgncaaaggtttcgcaatttttaattgatgatatagaaaaaaatgtaattgattttagaagtaattatgacgaaagtgaaaaagagccaactgtcttaccatctcaatttccaaatctcctagttaatggagcgggcggaattgctgtaggaatggctactagtatcccnccacacaatttgggtgaaattgtggatggaacaatagcttttataaagaacagagatattactatttcacagttaatgaaaaagattccggctccagattttccaactggaggaattattattggtaaagataatttaaaacaaggatacaataaaggtaggggatcaattaaaataagaggtgaaatagaagaagaaagtttaaaaaacggaagagaacgtttagtaataaaatctataccttatcaagttaataaatcagtcttaaatgaaagaatagcggagttagccagagataaaaaaatagagggcatcaccgatattagagacgagtctaactataaaggagttagagttgtagtagatcttaaaagagatgttgaacccgaaacaattaaaaggcagttatataaattaacatctgtagagacttcatttggttttaatacattagctattgttgatggaaaacccaaaatattaaatttaaaagaatttatatctgaatttgtaaatttcagagaaaaaactttaactaaaaaaataaaatttgatctaaataaagctttagaaaaagtacatattttgctaggcatttccgtatcagttgaaaatatcgatttagttataaaaattataaagaattctgacactgtagagttagcaaaaaagtctttattagcaaaaaaatggaaaattaacaaaactagtaaattaataaaacttataaaatctaaaaaagctggaagtagttatacattatcagaaaatcaagtcatggcaattcttgaattaagattgcaaaaattaacagcctttggaattggtgagatagaaacggaaataaaaaaactttcttccttaattcaagaatatgagaaaattttaaagtctaaaaaagaactatttaatgtaattattaatgaattaaataaaattaaagagaaattttcagtaaaaagaagaactaaaatagcagatatagttttaaattataatattgaagaaaccatacaaaaagaagccgttgtaattacaattactcataaaggttatattaaaagaggtcctctttcttccttaaaaattcaaaaaagaggtggaaaaggaaaagcaggaataaaaactagagatgaagattatgttgtacaaatttttacagcaaattctcatacacctatattatttttttcgacacaaggacttgtttataaactaaaagcttggaaaatacctcaaggcacagcctcttcgaaaggtaaaactttatttaatcttcttccacttaaaagtcaccaatccataagttcaattatgcctttaccagaaaatgaaagtgaatggaaaaaactttatgtaatatttgctactttaaagggaaagattagaaaaaatagtttagatgattttgcaaatattcagtctactgggaaaattgctatgaaattagatgaagatgataaaataataggtgtaaaaatttgcagagnagatcaagacataattttaagcactcgactaggtaaatgtataagatttatgtctaaaaaattaagaatatttaaaggtagatcatctaagggtattaaaggtatagagttaggaactaatgataaggtaattacattatcagttttggatgccgttgatataagtcctaaaattgcgaaagatttacttaaaaacggatcaactgacaaagctaaaagatcagaaataattgcaaaacaaaaatatatattatctttaacagaaaatggttttggtaaaagaacatcattttacgattatagagttacaaatagaggaggaaaagggattatcgggattgttacttcttctaggaacggaaatgtggccgcatcttttccagtaaacgagggtgatgaagttattttatctaccgataaaggaaaagtaataagatgtgcggtcaaggaaattagaattgctggtagaaacactntaggngttagaattattaagctttctggcgaagaaaaagttgtatcagcaattaaaatagatgataattttgattaatttttatctatgagtaaaattggtatttatccaggaacttttgaccctattacaatagggcatattgatataattaaaagatctttaaaaatagttgatcgtctaattgttgctgtatcaaacggtaattcaaaagattatttattttctgaagatgaaagagtttcgatagtaaaaaattcactctacaaagatttaaaacttaagactcaaagaataaaagtactatctttttatagcttaacaacatctctatgttcgaaacacaaagctacaattatatttagaggtttaagagccgtttcagattttgaagatgaatttcaattggcaggaatgaatagacaattaaataataaaattgagactgtgttcttaatgtctgacccagataatcaagtcatttcatcaaagcttgtaaaagaaatagcaaaattaaatggaaagattgacaaatttgtaacaaaaagtaccaaaagagctttaaaagaaaaatatgattaaaaaaatattattttttttcatatttactttatttatcaaccaatccnttgcgcaggaaaatattatgatcttaaaattaaaagatggagatgttgtaattgaattatttaaagatatcgctcctaatcatgttcagagattcaagcagcttgctaaagaaaaaaaatatgatggtgtagtttttcacagagttatagatggttttatggcacaaactggagacgtgcagttcggtaattctacatcagaaggttttgatattagacgagcaggtactggagaatcaaaatatccagatttaaaagcagaatttagtgatataccccacgacagaggaacattatcgatggctcgttctagcgatccaaatagtgcaaatagccagttcttcatttgttttaaatcagcttttcatttggatagacaatatacagtttttggaaaagtaattaagggcatggaatttgttgatttaattaaaaaaggagagggttctaatggacaagtgaagaatccagataaaattataagtttgactgctaattaattcatataaattcatgtttaaagataaattttctttcaatcttttgaaagaagatggtgcagctcgcgttgctaaaattaatactcatagaggtgaaatagatactcccacatttatgcctgtaggtactcaaggtacagttaaatcaattttcattgaggatgtaatcttggccggtactcaaataattttatcaaacgcctatcatttaatgattagaccgggttccaaaagaattaaaagagcgggaggtcttcatgggtttatgaattgcaaacttccaatattaacagactcaggcggctttcaaattatgtcattgtctaagttggttaaaattgacaaaaaagaaggtgcaacatttaaatctcatgttgatggaaaaaaatttgtcttaagtcccgag

SEQ ID NO: 701 - DNA, 4000 bp, Escherichia coli
  misc_feature (1479)..(1480): n is a, c, g, or t
  misc_feature (1482)..(1482): n is a, c, g, or t
  misc_feature (1491)..(1491): n is a, c, g, or t
  misc_feature (1923)..(1923): n is a, c, g, or t
  misc_feature (1948)..(1949): n is a, c, g, or t
  misc_feature (1951)..(1952): n is a, c, g, or t
  misc_feature (1954)..(1954): n is a, c, g, or t
  misc_feature (1960)..(1960): n is a, c, g, or t
  misc_feature (1963)..(1963): n is a, c, g, or t
  misc_feature (1978)..(1978): n is a, c, g, or t
  misc_feature (1984)..(1985): n is a, c, g, or t
  misc_feature (1990)..(1991): n is a, c, g, or t
  misc_feature (1993)..(1993): n is a, c, g, or t
  misc_feature (2002)..(2003): n is a, c, g, or t
  misc_feature (2009)..(2009): n is a, c, g, or t
  misc_feature (2011)..(2011): n is a, c, g, or t
  misc_feature (2014)..(2015): n is a, c, g, or t
  misc_feature (2017)..(2018): n is a, c, g, or t
caaaaaatattatttttgaaatagtttaggatttccttgttcattccccctgtaataggggagattaaaagaggagtatcaaagtaatagaatcctttgcaataccctgtgcgtaaagaaaaaatagaaaccattttttgtaatcccttagcgtcttccccatagtggggaagattgagttggggtttagaaaatatagcgaaaaatgaagtcaataatggttttatggataagttttccaacgaaaagtagggaaatggtagcctttttaacttgcggatcaggtttttcaaaggattctaaacaataaaaagaggaaaaaacatgattaaaatctatacaacatcttggtgtccatattgcaataatgccaagcgattattgaaagaaaaaagcatagaatatgaagaaatcaatatcgaagaaaaaggcatcagccgagaagaattgactgaaattaccggcggtcgttctgttccacaaattgtgatcaatgataaagcaattggtggctatgataacttggtggctttaaatcaagagggaaaactataagtttctaaaagtgtttaagttttaaagtgttcatgtttttgagtgctacagtgttctttctccggcgcccaaaaagggaattgtcgccctgagcctgacgaaggatgatatccacaacactattctaaaatgttactgtcattccgcacgaggaacgagatgcggaatctatgtttgaatgtatcaatgggttaaatagataccggataattcattctgaatttccggcatgacaactttttttctattgagacaatttcaaaagtttttgacaaatatggtttactaaagcgaaacaaaaatcactcgtttgaattgatttctatttctatctaaatttagggacggtgaaaatctttcaaaaagtttgcaacagactgaaccttcaaaaggtttggaacctttagaaggttgcattaaaagaaaataatccacgccacgaaaaaactggggtttaaaacacccaatgaagtattttttggtatggaattaactgttgcacttactacttgaatccaggaaataacaaaaaggagaagtaagatgaaaaatataatactatttacaataatgctaatgttgttagggtgtggtaaagacaaaaatgcaattttacatatcaagtctgatattacagatgcagttgtatatgtagatggagataaacaaaaaggattggcccctatagatgtgtttcttgcagagggtgttcatgaattaaaagttatctcaaataaatatactaattgtatatttgaaaaatcatttgtgataatggagtttgaggaaaaaaacatttatgctgaattatcagttcttgtttatattgaagagataaataagagtatggtttacgtagaagggggtagtttccaaatgggcagcaaaaaaagtaaggatgaaaagcccattcatactgttacnntnagcagtttntttatggataaaacagaagtaacccaagcccaatacaaaaaagtaatgggtaagaatccttcgcattttagcggctgtgatgattgccctgtagaaagagtatcttggcacgatgccacagccttcgcccaaaaggttggcaaacgcctacccacagaagcagaatgggaatatgcagcaagaggtggggtaaagacgaacagcggttcgtctcaaacgagctacgccggtagtaatgatttaaacagtgttgcttggtatggtgataattcaggcagtaaaacccaccctgtggcacagaaacaagccaacgccttggggctctacgatatgagtggtaatgtatgggaatggtgctctgattggtatagtgatagctattacagtgaatctccacaaaatgatccgcaaggcccaaattcaggctccagncgcgttcttcgtggcggcagttggnncnncnacgacnccnattgtcgggttgctnatcgcnncaggnncnatccggacnncagggncnacnncnncgggttccggttggtgcgttctgctcagtaatatcatgagttttctgttttctgtgttctgttaaattaaaatttcactttttaatgaaattttaaagaattaaaaaaagaaagaattatggagtatgctaaccgtgttagcatagcaaagaaagaatagcatcaacatttgtcattccgcacgaggaacgagatgcggaatctatctaacaattatcagtcaagcttcaaatagattcctggatattttctttcagaaaattcaagaatgacaactttttttctattgagacaatttcaaaagtttttgacaaacatgatttactaaagcgaaacaaaaatcactcgtttgaattgatttctatttctatctaaatttagggatggcgaaaatctttcaaaaagtccttctcttagctttactcattcagcccattttggcgtgtcgattatgggcagtattgggaaaatcccaattcacttttgctactatgtccactacagaacgcctcacaatctatagtgaattaaattccttgtttcaactatctgcctattatcctgatgggtggaccctcatgcgagtagatgaaaatacgaataaccttttggaaccactggttcgatctggaaatgctgcaattgaagaatcaaatctatattggtccacagcagactctcttatggacggaggaaatggatttatgggattggggcatatccgtgccgccagctccggttctgtgaatatttctaatcctcatccttggatatttcatgatgatgaaatatcttatactttgagtcacaatggaaccgttgataagtctctattatataatttgatgacaaataatggcatggatgaatcttggattaatgctcatccgcctcaaacttttggtgcaggttactggaaatcgaccggttgggctagtgtggttgattcagaacttatcttattgtatctgatgcaaaaaattgatgaatatggcgaaattatgcttggacttcagtccggtcttaaagccataattcacgctggcgttttagaaagccagattaatatcattttttctgacggacatgatatttatatttttggtggtgacaatcggattaccatcgccgaatcatcggagcattttgttgccatgagtcaagtgccatcggaaggattagcttccacgctcgattggatcggcatccaaaaaggagaaatggttttactccaacgcaatggaaaaagtcattaccccgattttatcgatattatttcagatggaacgaacgttccattgccatctactccacagctattttcgccctatccaaatccgtttaacggaaaagtaagcataccatttcatttggcaactttacaagaaacaacagttcgtattttctcgattagaggagcattgattgatgaatttaatttaagtcaagcagaaatagaaacaggattagtctcttggattccaaaagatagacatggacaggcgtgccccagtggcgtttatgtggtttctgtccagacagatacttggtctgggagtaagaaaatagtctatttaaagtgaaataaaatcattcacctaacgtaaaaccgttactttttgaaggatgatcttttctttgccagtaatccttacaaagtaaatcccagaagaaactttattcccctttgcattttttcctgtccagatatattgttccgtttgtggttcagaaaagcgcttttcccagctttgaatttttcgtcctaataaatcataaatttcaatttgaattcgttgtgcttctgttatcaataaatctatggtcgcataagcatttttagctgaaggtgtaaatggatttggataaataagtgtggcagagaaatcttctgaataaccttgggataatttcaaatcaaaaacgtaagaagaagaggcgctactggtggctgtgaccacggcagaaatccaatcaattcc

SEQ ID NO: 702 - DNA, 4000 bp, Escherichia coli
  misc_feature (1)..(3): n is a, c, g, or t
  misc_feature (5)..(6): n is a, c, g, or t
  misc_feature (8)..(17): n is a, c, g, or t
  misc_feature (19)..(25): n is a, c, g, or t
  misc_feature (28)..(28): n is a, c, g, or t
  misc_feature (30)..(32): n is a, c, g, or t
  misc_feature (34)..(35): n is a, c, g, or t
  misc_feature (37)..(42): n is a, c, g, or t
  misc_feature (44)..(51): n is a, c, g, or t
  misc_feature (53)..(54): n is a, c, g, or t
  misc_feature (56)..(56): n is a, c, g, or t
  misc_feature (58)..(61): n is a, c, g, or t
  misc_feature (63)..(77): n is a, c, g, or t
  misc_feature (79)..(82): n is a, c, g, or t
  misc_feature (86)..(86): n is a, c, g, or t
  misc_feature (89)..(89): n is a, c, g, or t
  misc_feature (91)..(94): n is a, c, g, or t
  misc_feature (96)..(100): n is a, c, g, or t
  misc_feature (102)..(103): n is a, c, g, or t
  misc_feature (105)..(106): n is a, c, g, or t
  misc_feature (108)..(114): n is a, c, g, or t
  misc_feature (116)..(126): n is a, c, g, or t
  misc_feature (128)..(133): n is a, c, g, or t
  misc_feature (135)..(160): n is a, c, g, or t
  misc_feature (162)..(164): n is a, c, g, or t
  misc_feature (166)..(168): n is a, c, g, or t
  misc_feature (170)..(181): n is a, c, g, or t
  misc_feature (184)..(185): n is a, c, g, or t
  misc_feature (187)..(188): n is a, c, g, or t
  misc_feature (190)..(194): n is a, c, g, or t
  misc_feature (196)..(214): n is a, c, g, or t
  misc_feature (216)..(219): n is a, c, g, or t
  misc_feature (221)..(223): n is a, c, g, or t
  misc_feature (225)..(244): n is a, c, g, or t
  misc_feature (246)..(254): n is a, c, g, or t
  misc_feature (256)..(261): n is a, c, g, or t
  misc_feature (263)..(263): n is a, c, g, or t
  misc_feature (265)..(265): n is a, c, g, or t
  misc_feature (267)..(267): n is a, c, g, or t
  misc_feature (269)..(270): n is a, c, g, or t
  misc_feature (272)..(279): n is a, c, g, or t
  misc_feature (281)..(282): n is a, c, g, or t
  misc_feature (284)..(286): n is a, c, g, or t
  misc_feature (289)..(290): n is a, c, g, or t
  misc_feature (292)..(296): n is a, c, g, or t
  misc_feature (299)..(302): n is a, c, g, or t
  misc_feature (304)..(311): n is a, c, g, or t
  misc_feature (313)..(332): n is a, c, g, or t
  misc_feature (334)..(349): n is a, c, g, or t
  misc_feature (352)..(360): n is a, c, g, or t
  misc_feature (362)..(364): n is a, c, g, or t
  misc_feature (366)..(366): n is a, c, g, or t
  misc_feature (368)..(368): n is a, c, g, or t
  misc_feature (370)..(376): n is a, c, g, or t
  misc_feature (379)..(380): n is a, c, g, or t
  misc_feature (382)..(389): n is a, c, g, or t
  misc_feature (391)..(396): n is a, c, g, or t
  misc_feature (398)..(399): n is a, c, g, or t
  misc_feature (401)..(402): n is a, c, g, or t
  misc_feature (404)..(406): n is a, c, g, or t
  misc_feature (408)..(409): n is a, c, g, or t
  misc_feature (411)..(414): n is a, c, g, or t
  misc_feature (417)..(433): n is a, c, g, or t
  misc_feature (437)..(445): n is a, c, g, or t
  misc_feature (447)..(447): n is a, c, g, or t
  misc_feature (449)..(449): n is a, c, g, or t
  misc_feature (451)..(461): n is a, c, g, or t
  misc_feature (463)..(465): n is a, c, g, or t
  misc_feature (467)..(470): n is a, c, g, or t
  misc_feature (472)..(475): n is a, c, g, or t
  misc_feature (477)..(492): n is a, c, g, or t
  misc_feature (494)..(498): n is a, c, g, or t
  misc_feature (500)..(506): n is a, c, g, or t
  misc_feature (509)..(509): n is a, c, g, or t
  misc_feature (511)..(514): n is a, c, g, or t
  misc_feature (517)..(519): n is a, c, g, or t
  misc_feature (521)..(522): n is a, c, g, or t
  misc_feature (524)..(525): n is a, c, g, or t
  misc_feature (527)..(527): n is a, c, g, or t
  misc_feature (529)..(534): n is a, c, g, or t
  misc_feature (537)..(537): n is a, c, g, or t
  misc_feature (539)..(547): n is a, c, g, or t
  misc_feature (549)..(553): n is a, c, g, or t
  misc_feature (556)..(559): n is a, c, g, or t
  misc_feature (561)..(562): n is a, c, g, or t
  misc_feature (564)..(570): n is a, c, g, or t
  misc_feature (572)..(572): n is a, c, g, or t
  misc_feature (574)..(575): n is a, c, g, or t
  misc_feature (577)..(580): n is a, c, g, or t
  misc_feature (582)..(589): n is a, c, g, or t
  misc_feature (591)..(596): n is a, c, g, or t
  misc_feature (598)..(607): n is a, c, g, or t
  misc_feature (609)..(631): n is a, c, g, or t
  misc_feature (633)..(636): n is a, c, g, or t
  misc_feature (638)..(646): n is a, c, g, or t
  misc_feature (648)..(665): n is a, c, g, or t
  misc_feature (668)..(672): n is a, c, g, or t
  misc_feature (674)..(674): n is a, c, g, or t
  misc_feature (676)..(678): n is a, c, g, or t
  misc_feature (681)..(681): n is a, c, g, or t
  misc_feature (683)..(685): n is a, c, g, or t
  misc_feature (688)..(695): n is a, c, g, or t
  misc_feature (697)..(698): n is a, c, g, or t
  misc_feature (700)..(706): n is a, c, g, or t
  misc_feature (709)..(709): n is a, c, g, or t
  misc_feature (711)..(711): n is a, c, g, or t
  misc_feature (713)..(713): n is a, c, g, or t
  misc_feature (715)..(717): n is a, c, g, or t
  misc_feature (719)..(720): n is a, c, g, or t
  misc_feature (723)..(724): n is a, c, g, or t
  misc_feature (726)..(732): n is a, c, g, or t
  misc_feature (735)..(739): n is a, c, g, or t
  misc_feature (742)..(746): n is a, c, g, or t
  misc_feature (749)..(752): n is a, c, g, or t
  misc_feature (754)..(755): n is a, c, g, or t
  misc_feature (760)..(761): n is a, c, g, or t
  misc_feature (763)..(764): n is a, c, g, or t
  misc_feature (766)..(768): n is a, c, g, or t
  misc_feature (770)..(770): n is a, c, g, or t
  misc_feature (772)..(775): n is a, c, g, or t
  misc_feature (777)..(777): n is a, c, g, or t
  misc_feature (779)..(779): n is a, c, g, or t
  misc_feature (782)..(787): n is a, c, g, or t
  misc_feature (791)..(792): n is a, c, g, or t
  misc_feature (794)..(796): n is a, c, g, or t
  misc_feature (802)..(803): n is a, c, g, or t
  misc_feature (805)..(806): n is a, c, g, or t
  misc_feature (808)..(810): n is a, c, g, or t
  misc_feature (812)..(814): n is a, c, g, or t
  misc_feature (817)..(817): n is a, c, g, or t
  misc_feature (820)..(822): n is a, c, g, or t
  misc_feature (825)..(825): n is a, c, g, or t
  misc_feature (827)..(829): n is a, c, g, or t
  misc_feature (832)..(838): n is a, c, g, or t
  misc_feature (840)..(848): n is a, c, g, or t
  misc_feature (852)..(854): n is a, c, g, or t
  misc_feature (857)..(870): n is a, c, g, or t
  misc_feature (873)..(873): n is a, c, g, or t
  misc_feature (875)..(879): n is a, c, g, or t
  misc_feature (881)..(885): n is a, c, g, or t
  misc_feature (887)..(897): n is a, c, g, or t
  misc_feature (899)..(921): n is a, c, g, or t
  misc_feature (923)..(931): n is a, c, g, or t
  misc_feature (933)..(935): n is a, c, g, or t
  misc_feature (937)..(941): n is a, c, g, or t
  misc_feature (943)..(950): n is a, c, g, or t
  misc_feature (952)..(955): n is a, c, g, or t
  misc_feature (958)..(961): n is a, c, g, or t
  misc_feature (963)..(965): n is a, c, g, or t
  misc_feature (968)..(972): n is a, c, g, or t
  misc_feature (974)..(974): n is a, c, g, or t
  misc_feature (976)..(990): n is a, c, g, or t
  misc_feature (992)..(994): n is a, c, g, or t
  misc_feature (996)..(997): n is a, c, g, or t
  misc_feature (999)..(999): n is a, c, g, or t
  misc_feature (1002)..(1008): n is a, c, g, or t
  misc_feature (1010)..(1010): n is a, c, g, or t
  misc_feature (1012)..(1012): n is a, c, g, or t
  misc_feature (1014)..(1025): n is a, c, g, or t
  misc_feature (1027)..(1028): n is a, c, g, or t
  misc_feature (1030)..(1033): n is a, c, g, or t
  misc_feature (1035)..(1036): n is a, c, g, or t
  misc_feature (1038)..(1038): n is a, c, g, or t
  misc_feature (1040)..(1067): n is a, c, g, or t
  misc_feature (1069)..(1077): n is a, c, g, or t
  misc_feature (1079)..(1081): n is a, c, g, or t
  misc_feature (1083)..(1095): n is a, c, g, or t
  misc_feature (1097)..(1118): n is a, c, g, or t
  misc_feature (1120)..(1144): n is a, c, g, or t
  misc_feature (1146)..(1155): n is a, c, g, or t
  misc_feature (1157)..(1180): n is a, c, g, or t
  misc_feature (1182)..(1189): n is a, c, g, or t
  misc_feature (1191)..(1225): n is a, c, g, or t
  misc_feature (1227)..(1233): n is a, c, g, or t
  misc_feature (1235)..(1247): n is a, c, g, or t
  misc_feature (1249)..(1273): n is a, c, g, or t
  misc_feature (1275)..(1278): n is a, c, g, or t
  misc_feature (1280)..(1296): n is a, c, g, or t
  misc_feature (1298)..(1302): n is a, c, g, or t
  misc_feature (1304)..(1309): n is a, c, g, or t
  misc_feature (1311)..(1352): n is a, c, g, or t
  misc_feature (1354)..(1362): n is a, c, g, or t
  misc_feature (1365)..(1368): n is a, c, g, or t
  misc_feature (1370)..(1373): n is a, c, g, or t
  misc_feature (1375)..(1376): n is a, c, g, or t
  misc_feature (1378)..(1389): n is a, c, g, or t
  misc_feature (1391)..(1405): n is a, c, g, or t
  misc_feature (1407)..(1431): n is a, c, g, or t
  misc_feature (1433)..(1436): n is a, c, g, or t
  misc_feature (1438)..(1440): n is a, c, g, or t
  misc_feature (1443)..(1478): n is a, c, g, or t
  misc_feature (1481)..(1492): n is a, c, g, or t
  misc_feature (1495)..(1499): n is a, c, g, or t
  misc_feature (1502)..(1503): n is a, c, g, or t
  misc_feature (1506)..(1508): n is a, c, g, or t
  misc_feature (1510)..(1510): n is a, c, g, or t
  misc_feature (1512)..(1512): n is a, c, g, or t
  misc_feature (1516)..(1524): n is a, c, g, or t
  misc_feature (1526)..(1526): n is a, c, g, or t
  misc_feature (1528)..(1535): n is a, c, g, or t
  misc_feature (1538)..(1541): n is a, c, g, or t
  misc_feature (1543)..(1543): n is a, c, g, or t
  misc_feature (1545)..(1546): n is a, c, g, or t
  misc_feature (1549)..(1552): n is a, c, g, or t
  misc_feature (1554)..(1557): n is a, c, g, or t
  misc_feature (1559)..(1563): n is a, c, g, or t
  misc_feature (1568)..(1587): n is a, c, g, or t
  misc_feature (1589)..(1599): n is a, c, g, or t
  misc_feature (1601)..(1602): n is a, c, g, or t
  misc_feature (1604)..(1605): n is a, c, g, or t
  misc_feature (1608)..(1618): n is a, c, g, or t
  misc_feature (1621)..(1675): n is a, c, g, or t
  misc_feature (1678)..(1678): n is a, c, g, or t
  misc_feature (1680)..(1681): n is a, c, g, or t
  misc_feature (1683)..(1684): n is a, c, g, or t
  misc_feature (1686)..(1686): n is a, c, g, or t
  misc_feature (1689)..(1696): n is a, c, g, or t
  misc_feature (1700)..(1702): n is a, c, g, or t
  misc_feature (1705)..(1709): n is a, c, g, or t
  misc_feature (1712)..(1721): n is a, c, g, or t
  misc_feature (1723)..(1723): n is a, c, g, or t
  misc_feature (1725)..(1725): n is a, c, g, or t
  misc_feature (1729)..(1732): n is a, c, g, or t
  misc_feature (1737)..(1737): n is a, c, g, or t
  misc_feature (1739)..(1739): n is a, c, g, or t
  misc_feature (1741)..(1742): n is a, c, g, or t
  misc_feature (1744)..(1746): n is a, c, g, or t
  misc_feature (1748)..(1748): n is a, c, g, or t
  misc_feature (1750)..(1762): n is a, c, g, or t
  misc_feature (1765)..(1767): n is a, c, g, or t
  misc_feature (1769)..(1770): n is a, c, g, or t
  misc_feature (1772)..(1774): n is a, c, g, or t
  misc_feature (1776)..(1779): n is a, c, g, or t
  misc_feature (1781)..(1789): n is a, c, g, or t
  misc_feature (1791)..(1791): n is a, c, g, or t
  misc_feature (1869)..(1872): n is a, c, g, or t
  misc_feature (1886)..(1886): n is a, c, g, or t
  misc_feature (1937)..(1937): n is a, c, g, or t
  misc_feature (1969)..(1969): n is a, c, g, or t
  misc_feature (1986)..(1986): n is a, c, g, or t
  misc_feature (2938)..(2938): n is a, c, g, or t
  misc_feature (3324)..(3324): n is a, c, g, or t
  misc_feature (3327)..(3327): n is a, c, g, or t
  misc_feature (3334)..(3334): n is a, c, g, or t
  misc_feature (3337)..(3337): n is a, c, g, or t
  misc_feature (3353)..(3354): n is a, c, g, or t
  misc_feature (3357)..(3357): n is a, c, g, or t
  misc_feature (3360)..(3360): n is a, c, g, or t
  misc_feature (3363)..(3363): n is a, c, g, or t
  misc_feature (3367)..(3367): n is a, c, g, or t
  misc_feature (3369)..(3369): n is a, c, g, or t
  misc_feature (3372)..(3384): n is a, c, g, or t
  misc_feature (3387)..(3389): n is a, c, g, or t
  misc_feature (3391)..(3391): n is a, c, g, or t
  misc_feature (3394)..(3397): n is a, c, g, or t
  misc_feature (3399)..(3399): n is a, c, g, or t
  misc_feature (3401)..(3405): n is a, c, g, or t
  misc_feature (3408)..(3408): n is a, c, g, or t
  misc_feature (3412)..(3413): n is a, c, g, or t
  misc_feature (3415)..(3416): n is a, c, g, or t
  misc_feature (3419)..(3419): n is a, c, g, or t
  misc_feature (3421)..(3422): n is a, c, g, or t
  misc_feature (3424)..(3427): n is a, c, g, or t
  misc_feature (3429)..(3429): n is a, c, g, or t
  misc_feature (3431)..(3431): n is a, c, g, or t
  misc_feature (3433)..(3436): n is a, c, g, or t
  misc_feature (3441)..(3441): n is a, c, g, or t
  misc_feature (3447)..(3449): n is a, c, g, or t
  misc_feature (3451)..(3451): n is a, c, g, or t
  misc_feature (3453)..(3453): n is a, c, g, or t
  misc_feature (3457)..(3462): n is a, c, g, or t
  misc_feature (3464)..(3467): n is a, c, g, or t
  misc_feature (3472)..(3473): n is a, c, g, or t
  misc_feature (3475)..(3476): n is a, c, g, or t
  misc_feature (3482)..(3483): n is a, c, g, or t
  misc_feature (3486)..(3486): n is a, c, g, or t
  misc_feature (3488)..(3488): n is a, c, g, or t
  misc_feature (3491)..(3491): n is a, c, g, or t
  misc_feature (3493)..(3494): n is a, c, g, or t
  misc_feature (3496)..(3496): n is a, c, g, or t
  misc_feature (3498)..(3498): n is a, c, g, or t
  misc_feature (3501)..(3501): n is a, c, g, or t
  misc_feature (3503)..(3505): n is a, c, g, or t
  misc_feature (3509)..(3510): n is a, c, g, or t
  misc_feature (3512)..(3512): n is a, c, g, or t
  misc_feature (3517)..(3518): n is a, c, g, or t
  misc_feature (3521)..(3521): n is a, c, g, or t
  misc_feature (3523)..(3523): n is a, c, g, or t
  misc_feature (3526)..(3527): n is a, c, g, or t
  misc_feature (3531)..(3531): n is a, c, g, or t
  misc_feature (3533)..(3533): n is a, c, g, or t
  misc_feature (3537)..(3537): n is a, c, g, or t
  misc_feature (3548)..(3548): n is a, c, g, or t
  misc_feature (3551)..(3551): n is a, c, g, or t
  misc_feature (3553)..(3553): n is a, c, g, or t
  misc_feature (3560)..(3561): n is a, c, g, or t
  misc_feature (3563)..(3563): n is a, c, g, or t
  misc_feature (3565)..(3565): n is a, c, g, or t
  misc_feature (3567)..(3567): n is a, c, g, or t
  misc_feature (3570)..(3570): n is a, c, g, or t
  misc_feature (3574)..(3574): n is a, c, g, or t
  misc_feature (3577)..(3577): n is a, c, g, or t
  misc_feature (3579)..(3579): n is a, c, g, or t
  misc_feature (3583)..(3584): n is a, c, g, or t
  misc_feature (3593)..(3593): n is a, c, g, or t
  misc_feature (3595)..(3595): n is a, c, g, or t
  misc_feature (3597)..(3606): n is a, c, g, or t
  misc_feature (3609)..(3613): n is a, c, g, or t
  misc_feature (3615)..(3617): n is a, c, g, or t
  misc_feature (3619)..(3624): n is a, c, g, or t
  misc_feature (3626)..(3633): n is a, c, g, or t
  misc_feature (3636)..(3641): n is a, c, g, or t
  misc_feature (3643)..(3667): n is a, c, g, or t
  misc_feature (3669)..(3674): n is a, c, g, or t
  misc_feature (3676)..(3676): n is a, c, g, or t
  misc_feature (3678)..(3681): n is a, c, g, or t
  misc_feature (3685)..(3703): n is a, c, g, or t
  misc_feature (3705)..(3706): n is a, c, g, or t
  misc_feature (3708)..(3708): n is a, c, g, or t
  misc_feature (3710)..(3713): n is a, c, g, or t
  misc_feature (3715)..(3715): n is a, c, g, or t
  misc_feature (3717)..(3723): n is a, c, g, or t
  misc_feature (3725)..(3725): n is a, c, g, or t
  misc_feature (3727)..(3729): n is a, c, g, or t
  misc_feature (3731)..(3735): n is a, c, g, or t
  misc_feature (3737)..(3739): n is a, c, g, or t
  misc_feature (3742)..(3749): n is a, c, g, or t
  misc_feature (3751)..(3754): n is a, c, g, or t
  misc_feature (3757)..(3760): n is a, c, g, or t
  misc_feature (3763)..(3765): n is a, c, g, or t
  misc_feature (3767)..(3781): n is a, c, g, or t
  misc_feature (3783)..(3787): n is a, c, g, or t
  misc_feature (3791)..(3792): n is a, c, g, or t
  misc_feature (3794)..(3805): n is a, c, g, or t
  misc_feature (3807)..(3815): n is a, c, g, or t
  misc_feature (3817)..(3829): n is a, c, g, or t
  misc_feature (3831)..(3835): n is a, c, g, or t
  misc_feature (3837)..(3868): n is a, c, g, or t
  misc_feature (3870)..(3893): n is a, c, g, or t
  misc_feature (3895)..(3899): n is a, c, g, or t
  misc_feature (3901)..(3910): n is a, c, g, or t
  misc_feature (3912)..(3917): n is a, c, g, or t
  misc_feature (3919)..(3975): n is a, c, g, or t
  misc_feature (3977)..(3987): n is a, c, g, or t
  misc_feature (3990)..(4000): n is a, c, g, or t
nnnanncnnnnnnnnnncnnnnnnngtnannncnnannnnnnannnnnnnnanntnannnnannnnnnnnnnnnnnnannnngagntgntnnnntnnnnngnngnnannnnnnntnnnnnnnnnnncnnnnnngnnnnnnnnnnnnnnnnnnnnnnnnnncnnnannncnnnnnnnnnnnncanntnncnnnnnannnnnnnnnnnnnnnnnnntnnnntnnngnnnnnnnnnnnnnnnnnnnntnnnnnnnnntnnnnnntncnantnnannnnnnnngnngnnnatnntnnnnnacnnnncnnnnnnnntnnnnnnnnnnnnnnnnnnnngnnnnnnnnnnnnnnnngannnnnnnnntnnncntntnnnnnnngcnntnnnnnnnnannnnnnanngnngnnntnnannnngcnnnnnnnnnnnnnnnnnaatnnnnnnnnnanantnnnnnnnnnnncnnnannnncnnnnannnnnnnnnnnnnnnntnnnnngnnnnnnnttntnnnngannngnngnntncnnnnnnatngnnnnnnnnncnnnnnatnnnntnnannnnnnngntnncnnnntnnnnnnnntnnnnnntnnnnnnnnnnannnnnnnnnnnnnnnnnnnnnnngnnnnannnnnnnnngnnnnnnnnnnnnnnnnnnagnnnnngnannntancnnntannnnnnnnanntnnnnnnngancncnannncnncgnncnnnnnnntcnnnnncgnnnnncgnnnnannttttnngnntnnntnannnncntnttnnnnnnaacnngnnngaaaanngnntnnntnnnaangtnnntcntnnnacnnnnnnngnnnnnnnnnttgnnnaannnnnnnnnnnnnntanannnnnannnnntnnnnnnnnnnntnnnnnnnnnnnnnnnnnnnnnnntnnnnnnnnngnnnannnnnannnnnnnnannnncannnncnnnatnnnnnanannnnnnnnnnnnnnntnnntnntncgnnnnnnntnangnnnnnnnnnnnnannannnnanngntnnnnnnnnnnnnnnnnnnnnnnnnnnnnannnnnnnnntnnnannnnnnnnnnnnntnnnnnnnnnnnnnnnnnnnnnnannnnnnnnnnnnnnnnnnnnnnnnnannnnnnnnnnannnnnnnnnnnnnnnnnnnnnnnnannnnnnnnannnnnnnnnnnnnnnnnnnnnnnnnnnnnnnnnnnannnnnnnannnnnnnnnnnnntnnnnnnnnnnnnnnnnnnnnnnnnntnnnntnnnnnnnnnnnnnnnnnannnnnannnnnntnnnnnnnnnnnnnnnnnnnnnnnnnnnnnnnnnnnnnnnnnntnnnnnnnnnttnnnnannnngnntnnnnnnnnnnnntnnnnnnnnnnnnnnnannnnnnnnnnnnnnnnnnnnnnnnntnnnntnnnaannnnnnnnnnnnnnnnnnnnnnnnnnnnnnnnnnnnaannnnnnnnnnnnttnnnnnttnnttnnnantntttnnnnnnnnncntnnnnnnnnttnnnntntnnccnnnnannnncnnnnncaaannnnnnnnnnnnnnnnnnnnannnnnnnnnnntnngnnttnnnnnnnnnnnaannnnnnnnnnnnnnnnnnnnnnnnnnnnnnnnnnnnnnnnnnnnnnnnnnnnnnnaanannannanaannnnnnnntttnnnttnnnnnggnnnnnnnnnncncnaaannnnaaaananannannntntnnnnnnnnnnnnnttnnnanntnnngnnnnannnnnnnnnanaccaattatggagagtttgatcctggctcagagtgaacgctggcggcgtgcctaacacatgcaagtcgaacgatgatnnnngagcttgctcttcntgattagtggcgcacgggtgagtataccatagataatgtacctcttagttngggatagccactggaaacggtgattaataccngatactccttcttgttntaaggcaagtcgggaaagttttttcgctaagagatcagtctatgtcctatcagctagttggtgaggtaatggctcaccaaggctatgacgggtatctggtttgagaggatgatcagacacactggaactgagacacggtccagactcctacgggaggcagcagtgaggaatattgcacaatggaggaaactctgatgcagcaacgccgcgtggaggatgacgcatttcggtgtgtaaactccttttaagagggaagataatgacggtacctcttgaataagcaccggctaactccgtgccagcagccgcggtaatacggagggtgcaagcgttactcggaatcactgggcgtaaagggtgcgtaggctggcttctaagtcagatgtgaaatccaatggcttaaccattgaactgcatttgaaactgggagcctagagttcagaaggggcagatggaattagtggtgtaggggtaaaatccgtagatatcactaggaatatcaaaagcgaaggcgatctgctgggatgatactgacgctgaggcacgaaagcgtggggagcaaacaggattagataccctggtagtccacgccctaaacgatgaatgctagtcgtcggggagctcgtctcttcggtgatgcacttaacagattaagcattccgcctggggagtacggtcgcaagattaaaactcaaaggaatagacggggacccgcacaagtggtggagcatgtggtttaattcgaagatacacgaagaaccttacctggccttgacatggtaggaacccttaagagattagggggtgctagcttgctagaacctacacacaggtgctgcacggctgtcgtcagctcgtgtcgtgagatgttgggttaagtcccgcaacgagcgcaaccctcgtcgttagttgctaacagttcggctgagcactctaacgagactgccttcgnaaggaggaggaaggtgaggacgacgtcaagtcatcatggcccttacggccagggctacacacgtgctacaatggggcgtacaaagagctgcaataccgcgaggtggagccaatctcttaaagcgtctctcagttcggattgttctctgcaactcgagaacatgaagctggaatcactagtaatcgtagatcagctatgctacggtgaatacgttcccgggtcttgtactcaccgcccgtcacaccatgggagttgatttcacccgaaatcgggatgccaaactggctaccgcttacggtggaattagcgactggggtgaagtcgtaacaaggtaaccgtaggagaacctgcggttggatcacctcctttctaagagtaacgacgantcnttcattngantgcgtcatcttaaaanntcncanagnattntnttnnnnnnnnnnnnnctnnntnttnnnngntnnnnnttntttnntnnaanannannnntngntnnnnagctnggttgnnnanancccnnnnnngnnnngggtnngnnggttgnntcnantcnanncnanccnannnatcnntnatctnnggnantanntcancngggngagcgcctgcnttncncgcaggnngncngnggntcgntcncnctannctccaccananannnnnnnnnnaannnnnannnannnnnntnnnnnnnnttnnnnnnannnnnnnnnnnnnnnnnnnnnnnnntnnnnnnantnnnnttannnnnnnnnnnnnnnnnnntnnanannnntnannnnnnnanannnannnnnannntannnnnnnnannnntannnnatnnntnnnnnnnnnnnnnnnannnnnattnntnnnnnnnnnnnnannnnnnnnnannnnnnnnnnnnnannnnnannnnnnnnnnnnnnnnnnnnnnnnnnnnnnnnannnnnnnnnnnnnnnnnnnnnnnntnnnnnannnnnnnnnnannnnnnannnnnnnnnnnnnnnnnnnnnnnnnnnnnnnnnnnnnnnnnnnnnnnnnnnnnnnnngnnnnnnnnnnnggnnnnnnnnnnn

SEQ ID NO: 703 - DNA, 4000 bp, Escherichia coli
  misc_feature (1)..(5): n is a, c, g, or t
  misc_feature (7)..(10): n is a, c, g, or t
  misc_feature (12)..(14): n is a, c, g, or t
  misc_feature (16)..(19): n is a, c, g, or t
  misc_feature (21)..(26): n is a, c, g, or t
  misc_feature (30)..(30): n is a, c, g, or t
  misc_feature (32)..(32): n is a, c, g, or t
  misc_feature (34)..(34): n is a, c, g, or t
  misc_feature (37)..(37): n is a, c, g, or t
  misc_feature (40)..(40): n is a, c, g, or t
  misc_feature (42)..(44): n is a, c, g, or t
  misc_feature (46)..(48): n is a, c, g, or t
  misc_feature (54)..(57): n is a, c, g, or t
  misc_feature (61)..(61): n is a, c, g, or t
  misc_feature (64)..(70): n is a, c, g, or t
  misc_feature (72)..(78): n is a, c, g, or t
  misc_feature (81)..(81): n is a, c, g, or t
  misc_feature (84)..(84): n is a, c, g, or t
  misc_feature (86)..(90): n is a, c, g, or t
  misc_feature (93)..(94): n is a, c, g, or t
  misc_feature (96)..(103): n is a, c, g, or t
  misc_feature (105)..(105): n is a, c, g, or t
  misc_feature (107)..(108): n is a, c, g, or t
  misc_feature (111)..(113): n is a, c, g, or t
  misc_feature (115)..(117): n is a, c, g, or t
  misc_feature (123)..(124): n is a, c, g, or t
  misc_feature (126)..(129): n is a, c, g, or t
  misc_feature (132)..(133): n is a, c, g, or t
  misc_feature (136)..(138): n is a, c, g, or t
  misc_feature (143)..(143): n is a, c, g, or t
  misc_feature (146)..(152): n is a, c, g, or t
  misc_feature (154)..(154): n is a, c, g, or t
  misc_feature (157)..(158): n is a, c, g, or t
  misc_feature (160)..(160): n is a, c, g, or t
  misc_feature (162)..(163): n is a, c, g, or t
  misc_feature (168)..(169): n is a, c, g, or t
  misc_feature (174)..(176): n is a, c, g, or t
  misc_feature (179)..(179): n is a, c, g, or t
  misc_feature (182)..(182): n is a, c, g, or t
  misc_feature (184)..(184): n is a, c, g, or t
  misc_feature (187)..(190): n is a, c, g, or t
  misc_feature (192)..(194): n is a, c, g, or t
  misc_feature (196)..(196): n is a, c, g, or t
  misc_feature (198)..(198): n is a, c, g, or t
  misc_feature (200)..(200): n is a, c, g, or t
  misc_feature (202)..(203): n is a, c, g, or t
  misc_feature (205)..(206): n is a, c, g, or t
  misc_feature (209)..(215): n is a, c, g, or t
  misc_feature (219)..(220): n is a, c, g, or t
  misc_feature (222)..(226): n is a, c, g, or t
  misc_feature (228)..(230): n is a, c, g, or t
  misc_feature (232)..(235): n is a, c, g, or t
  misc_feature (238)..(238): n is a, c, g, or t
  misc_feature (240)..(241): n is a, c, g, or t
  misc_feature (243)..(245): n is a, c, g, or t
  misc_feature (250)..(250): n is a, c, g, or t
  misc_feature (253)..(259): n is a, c, g, or t
  misc_feature (261)..(261): n is a, c, g, or t
  misc_feature (264)..(265): n is a, c, g, or t
  misc_feature (267)..(270): n is a, c, g, or t
  misc_feature (272)..(274): n is a, c, g, or t
  misc_feature (276)..(277): n is a, c, g, or t
  misc_feature (281)..(290): n is a, c, g, or t
  misc_feature (292)..(302): n is a, c, g, or t
  misc_feature (305)..(305): n is a, c, g, or t
  misc_feature (307)..(307): n is a, c, g, or t
  misc_feature (310)..(310): n is a, c, g, or t
  misc_feature (312)..(313): n is a, c, g, or t
  misc_feature (315)..(316): n is a, c, g, or t
  misc_feature (318)..(319): n is a, c, g, or t
  misc_feature (321)..(322): n is a, c, g, or t
  misc_feature (325)..(325): n is a, c, g, or t
  misc_feature (330)..(330): n is a, c, g, or t
  misc_feature (333)..(337): n is a, c, g, or t
  misc_feature (340)..(340): n is a, c, g, or t
  misc_feature (342)..(342): n is a, c, g, or t
  misc_feature (344)..(344): n is a, c, g, or t
  misc_feature (346)..(348): n is a, c, g, or t
  misc_feature (350)..(351): n is a, c, g, or t
  misc_feature (353)..(353): n is a, c, g, or t
  misc_feature (355)..(357): n is a, c, g, or t
  misc_feature (359)..(364): n is a, c, g, or t
  misc_feature (366)..(373): n is a, c, g, or t
  misc_feature (377)..(378): n is a, c, g, or t
  misc_feature (380)..(380): n is a, c, g, or t
  misc_feature (382)..(383): n is a, c, g, or t
  misc_feature (385)..(387): n is a, c, g, or t
  misc_feature (389)..(390): n is a, c, g, or t
  misc_feature (392)..(396): n is a, c, g, or t
  misc_feature (398)..(399): n is a, c, g, or t
  misc_feature (401)..(401): n is a, c, g, or t
  misc_feature (405)..(406): n is a, c, g, or t
  misc_feature (410)..(411): n is a, c, g, or t
  misc_feature (415)..(417): n is a, c, g, or t
  misc_feature (419)..(419): n is a, c, g, or t
  misc_feature (421)..(423): n is a, c, g, or t
  misc_feature (425)..(429): n is a, c, g, or t
  misc_feature (431)..(434): n is a, c, g, or t
  misc_feature (436)..(437): n is a, c, g, or t
  misc_feature (439)..(441): n is a, c, g, or t
  misc_feature (444)..(446): n is a, c, g, or t
  misc_feature (448)..(448): n is a, c, g, or t
  misc_feature (451)..(452): n is a, c, g, or t
  misc_feature (454)..(454): n is a, c, g, or t
  misc_feature (456)..(457): n is a, c, g, or t
  misc_feature (459)..(461): n is a, c, g, or t
  misc_feature (464)..(467): n is a, c, g, or t
  misc_feature (470)..(471): n is a, c, g, or t
  misc_feature (474)..(477): n is a, c, g, or t
  misc_feature (479)..(482): n is a, c, g, or t
  misc_feature (485)..(488): n is a, c, g, or t
  misc_feature (490)..(493): n is a, c, g, or t
  misc_feature (496)..(497): n is a, c, g, or t
  misc_feature (499)..(499): n is a, c, g, or t
  misc_feature (502)..(510): n is a, c, g, or t
  misc_feature (512)..(512): n is a, c, g, or t
  misc_feature (514)..(518): n is a, c, g, or t
  misc_feature (520)..(524): n is a, c, g, or t
  misc_feature (526)..(532): n is a, c, g, or t
  misc_feature (536)..(536): n is a, c, g, or t
  misc_feature (539)..(539): n is a, c, g, or t
  misc_feature (541)..(545): n is a, c, g, or t
  misc_feature (547)..(548): n is a, c, g, or t
  misc_feature (550)..(559): n is a, c, g, or t
  misc_feature (561)..(565): n is a, c, g, or t
  misc_feature (569)..(574): n is a, c, g, or t
  misc_feature (576)..(576): n is a, c, g, or t
  misc_feature (578)..(580): n is a, c, g, or t
  misc_feature (582)..(582): n is a, c, g, or t
  misc_feature (584)..(585): n is a, c, g, or t
  misc_feature (587)..(588): n is a, c, g, or t
  misc_feature (590)..(598): n is a, c, g, or t
  misc_feature (600)..(617): n is a, c, g, or t
  misc_feature (619)..(625): n is a, c, g, or t
  misc_feature (627)..(632): n is a, c, g, or t
  misc_feature (634)..(642): n is a, c, g, or t
  misc_feature (644)..(648): n is a, c, g, or t
  misc_feature (651)..(653): n is a, c, g, or t
  misc_feature (656)..(656): n is a, c, g, or t
  misc_feature (658)..(664): n is a, c, g, or t
  misc_feature (666)..(666): n is a, c, g, or t
  misc_feature (670)..(671): n is a, c, g, or t
  misc_feature (673)..(680): n is a, c, g, or t
  misc_feature (682)..(682): n is a, c, g, or t
  misc_feature (686)..(688): n is a, c, g, or t
  misc_feature (693)..(695): n is a, c, g, or t
  misc_feature (699)..(704): n is a, c, g, or t
  misc_feature (710)..(710): n is a, c, g, or t
  misc_feature (712)..(713): n is a, c, g, or t
  misc_feature (716)..(716): n is a, c, g, or t
  misc_feature (718)..(721): n is a, c, g, or t
  misc_feature (723)..(723): n is a, c, g, or t
  misc_feature (725)..(725): n is a, c, g, or t
  misc_feature (727)..(727): n is a, c, g, or t
  misc_feature (729)..(732): n is a, c, g, or t
  misc_feature (737)..(737): n is a, c, g, or t
  misc_feature (739)..(742): n is a, c, g, or t
  misc_feature (746)..(747): n is a, c, g, or t
  misc_feature (750)..(751): n is a, c, g, or t
  misc_feature (755)..(755): n is a, c, g, or t
  misc_feature (758)..(758): n is a, c, g, or t
  misc_feature (760)..(761): n is a, c, g, or t
  misc_feature (764)..(765): n is a, c, g, or t
  misc_feature (767)..(769): n is a, c, g, or t
  misc_feature (771)..(771): n is a, c, g, or t
  misc_feature (773)..(773): n is a, c, g, or t
  misc_feature (776)..(778): n is a, c, g, or t
  misc_feature (780)..(785): n is a, c, g, or t
  misc_feature (788)..(789): n is a, c, g, or t
  misc_feature (793)..(794): n is a, c, g, or t
  misc_feature (802)..(802): n is a, c, g, or t
  misc_feature (805)..(805): n is a, c, g, or t
  misc_feature (809)..(809): n is a, c, g, or t
  misc_feature (816)..(816): n is a, c, g, or t
  misc_feature (824)..(824): n is a, c, g, or t
  misc_feature (826)..(830): n is a, c, g, or t
  misc_feature (832)..(834): n is a, c, g, or t
  misc_feature (841)..(841): n is a, c, g, or t
  misc_feature (848)..(848): n is a, c, g, or t
  misc_feature (851)..(855): n is a, c, g, or t
  misc_feature (858)..(858): n is a, c, g, or t
  misc_feature (861)..(862): n is a, c, g, or t
  misc_feature (865)..(865): n is a, c, g, or t
  misc_feature (869)..(870): n is a, c, g, or t
  misc_feature (872)..(875): n is a, c, g, or t
  misc_feature (878)..(883): n is a, c, g, or t
  misc_feature (886)..(886): n is a, c, g, or t
  misc_feature (890)..(890): n is a, c, g, or t
  misc_feature (893)..(893): n is a, c, g, or t
  misc_feature (895)..(898): n is a, c, g, or t
  misc_feature (901)..(902): n is a, c, g, or t
  misc_feature (905)..(905): n is a, c, g, or t
  misc_feature (907)..(910): n is a, c, g, or t
  misc_feature (912)..(912): n is a, c, g, or t
  misc_feature (914)..(915): n is a, c, g, or t
  misc_feature (917)..(917): n is a, c, g, or t
  misc_feature (919)..(920): n is a, c, g, or t
  misc_feature (923)..(926): n is a, c, g, or t
  misc_feature (928)..(930): n is a, c, g, or t
  misc_feature (932)..(932): n is a, c, g, or t
  misc_feature (935)..(936): n is a, c, g, or t
  misc_feature (939)..(940): n is a, c, g, or t
  misc_feature (943)..(944): n is a, c, g, or t
  misc_feature (946)..(946): n is a, c, g, or t
  misc_feature (949)..(949): n is a, c, g, or t
  misc_feature (952)..(953): n is a, c, g, or t
  misc_feature (958)..(959): n is a, c, g, or t
  misc_feature (961)..(962): n is a, c, g, or t
  misc_feature (964)..(968): n is a, c, g, or t
  misc_feature (970)..(970): n is a, c, g, or t
  misc_feature (972)..(973): n is a, c, g, or t
  misc_feature (975)..(976): n is a, c, g, or t
  misc_feature (978)..(978): n is a, c, g, or t
  misc_feature (980)..(982): n is a, c, g, or t
  misc_feature (984)..(986): n is a, c, g, or t
  misc_feature (989)..(989): n is a, c, g, or t
  misc_feature (991)..(991): n is a, c, g, or t
  misc_feature (995)..(998): n is a, c, g, or t
  misc_feature (1001)..(1001): n is a, c, g, or t
  misc_feature (1003)..(1006): n is a, c, g, or t
  misc_feature (1009)..(1010): n is a, c, g, or t
  misc_feature (1013)..(1013): n is a, c, g, or t
  misc_feature (1015)..(1016): n is a, c, g, or t
  misc_feature (1022)..(1022): n is a, c, g, or t
  misc_feature (1024)..(1025): n is a, c, g, or t
  misc_feature (1027)..(1027): n is a, c, g, or t
  misc_feature (1032)..(1035): n is a, c, g, or t
  misc_feature (1037)..(1042): n is a, c, g, or t
  misc_feature (1044)..(1046): n is a, c, g, or t
  misc_feature (1049)..(1049): n is a, c, g, or t
  misc_feature (1052)..(1052): n is a, c, g, or t
  misc_feature (1055)..(1055): n is a, c, g, or t
  misc_feature (1057)..(1057): n is a, c, g, or t
  misc_feature (1060)..(1061): n is a, c, g, or t
  misc_feature (1063)..(1065): n is a, c, g, or t
  misc_feature (1067)..(1074): n is a, c, g, or t
  misc_feature (1076)..(1077): n is a, c, g, or t
  misc_feature (1079)..(1080): n is a, c, g, or t
  misc_feature (1084)..(1084): n is a, c, g, or t
  misc_feature (1087)..(1095): n is a, c, g, or t
  misc_feature (1097)..(1098): n is a, c, g, or t
  misc_feature (1101)..(1101): n is a, c, g, or t
  misc_feature (1109)..(1112): n is a, c, g, or t
  misc_feature (1114)..(1115): n is a, c, g, or t
  misc_feature (1118)..(1118): n is a, c, g, or t
  misc_feature (1122)..(1123): n is a, c, g, or t
  misc_feature (1128)..(1131): n is a, c, g, or t
  misc_feature (1133)..(1137): n is a, c, g, or t
  misc_feature (1139)..(1139): n is a, c, g, or t
  misc_feature (1142)..(1146): n is a, c, g, or t
  misc_feature (1149)..(1149): n is a, c, g, or t
  misc_feature (1155)..(1155): n is a, c, g, or t
  misc_feature (1157)..(1157): n is a, c, g, or t
  misc_feature (1159)..(1160): n is a, c, g, or t
  misc_feature (1162)..(1162): n is a, c, g, or t
  misc_feature (1165)..(1165): n is a, c, g, or t
  misc_feature (1168)..(1169): n is a, c, g, or t
  misc_feature (1171)..(1179): n is a, c, g, or t
  misc_feature (1181)..(1181): n is a, c, g, or t
  misc_feature (1183)..(1184): n is a, c, g, or t
  misc_feature (1186)..(1187): n is a, c, g, or t
  misc_feature (1193)..(1193): n is a, c, g, or t
  misc_feature (1195)..(1195): n is a, c, g, or t
  misc_feature (1198)..(1198): n is a, c, g, or t
  misc_feature (1202)..(1204): n is a, c, g, or t
  misc_feature (1206)..(1206): n is a, c, g, or t
  misc_feature (1209)..(1210): n is a, c, g, or t
  misc_feature (1213)..(1213): n is a, c, g, or t
  misc_feature (1216)..(1216): n is a, c, g, or t
  misc_feature (1218)..(1218): n is a, c, g, or t
  misc_feature (1220)..(1220): n is a, c, g, or t
  misc_feature (1223)..(1226): n is a, c, g, or t
  misc_feature (1229)..(1229): n is a, c, g, or t
  misc_feature (1234)..(1234): n is a, c, g, or t
  misc_feature (1237)..(1237): n is a, c, g, or t
  misc_feature (1243)..(1245): n is a, c, g, or t
  misc_feature (1248)..(1248): n is a, c, g, or t
  misc_feature (1250)..(1250): n is a, c, g, or t
  misc_feature (1252)..(1253): n is a, c, g, or t
  misc_feature (1255)..(1255): n is a, c, g, or t
  misc_feature (1258)..(1258): n is a, c, g, or t
  misc_feature (1264)..(1270): n is a, c, g, or t
  misc_feature (1273)..(1274): n is a, c, g, or t
  misc_feature (1276)..(1276): n is a, c, g, or t
  misc_feature (1278)..(1281): n is a, c, g, or t
  misc_feature (1285)..(1287): n is a, c, g, or t
  misc_feature (1290)..(1293): n is a, c, g, or t
  misc_feature (1296)..(1296): n is a, c, g, or t
  misc_feature (1298)..(1301): n is a, c, g, or t
  misc_feature (1304)..(1305): n is a, c, g, or t
  misc_feature (1307)..(1307): n is a, c, g, or t
  misc_feature (1309)..(1309): n is a, c, g, or t
  misc_feature (1311)..(1311): n is a, c, g, or t
  misc_feature (1313)..(1314): n is a, c, g, or t
  misc_feature (1318)..(1318): n is a, c, g, or t
  misc_feature (1321)..(1321): n is a, c, g, or t
  misc_feature (1323)..(1325): n is a, c, g, or t
  misc_feature (1329)..(1331): n is a, c, g, or t
  misc_feature (1336)..(1336): n is a, c, g, or t
  misc_feature (1344)..(1345): n is a, c, g, or t
  misc_feature (1352)..(1352): n is a, c, g, or t
  misc_feature (1354)..(1354): n is a, c, g, or t
  misc_feature (1358)..(1359): n is a, c, g, or t
  misc_feature (1361)..(1361): n is a, c, g, or t
  misc_feature (1363)..(1367): n is a, c, g, or t
  misc_feature (1370)..(1370): n is a, c, g, or t
  misc_feature (1372)..(1372): n is a, c, g, or t
  misc_feature (1374)..(1374): n is a, c, g, or t
  misc_feature (1376)..(1376): n is a, c, g, or t
  misc_feature (1380)..(1380): n is a, c, g, or t
  misc_feature (1383)..(1383): n is a, c, g, or t
  misc_feature (1390)..(1391): n is a, c, g, or t
  misc_feature (1393)..(1398): n is a, c, g, or t
  misc_feature (1400)..(1401): n is a, c, g, or t
  misc_feature (1403)..(1403): n is a, c, g, or t
  misc_feature (1405)..(1406): n is a, c, g, or t
  misc_feature (1409)..(1409): n is a, c, g, or t
  misc_feature (1412)..(1412): n is a, c, g, or t
  misc_feature (1417)..(1417): n is a, c, g, or t
  misc_feature (1427)..(1427): n is a, c, g, or t
  misc_feature (1430)..(1430): n is a, c, g, or t
  misc_feature (1434)..(1434): n is a, c, g, or t
  misc_feature (1436)..(1443): n is a, c, g, or t
  misc_feature (1448)..(1448): n is a, c, g, or t
  misc_feature (1451)..(1451): n is a, c, g, or t
  misc_feature (1454)..(1454): n is a, c, g, or t
  misc_feature (1456)..(1458): n is a, c, g, or t
  misc_feature (1462)..(1462): n is a, c, g, or t
  misc_feature (1466)..(1466): n is a, c, g, or t
  misc_feature (1471)..(1474): n is a, c, g, or t
  misc_feature (1478)..(1479): n is a, c, g, or t
  misc_feature (1481)..(1482): n is a, c, g, or t
  misc_feature (1485)..(1488): n is a, c, g, or t
  misc_feature (1490)..(1491): n is a, c, g, or t
  misc_feature (1496)..(1496): n is a, c, g, or t
  misc_feature (1498)..(1499): n is a, c, g, or t
  misc_feature (1501)..(1506): n is a, c, g, or t
  misc_feature (1508)..(1508): n is a, c, g, or t
  misc_feature (1511)..(1511): n is a, c, g, or t
  misc_feature (1513)..(1513): n is a, c, g, or t
  misc_feature (1515)..(1515): n is a, c, g, or t
  misc_feature (1517)..(1518): n is a, c, g, or t
  misc_feature (1520)..(1522): n is a, c, g, or t
  misc_feature (1524)..(1525): n is a, c, g, or t
  misc_feature (1529)..(1532): n is a, c, g, or t
  misc_feature (1535)..(1540): n is a, c, g, or t
  misc_feature (1542)..(1542): n is a, c, g, or t
  misc_feature (1544)..(1545): n is a, c, g, or t
  misc_feature (1548)..(1548): n is a, c, g, or t
  misc_feature (1550)..(1551): n is a, c, g, or t
  misc_feature (1553)..(1553): n is a, c, g, or t
  misc_feature (1555)..(1556): n is a, c, g, or t
  misc_feature (1560)..(1562): n is a, c, g, or t
  misc_feature (1564)..(1565): n is a, c, g, or t
  misc_feature (1570)..(1571): n is a, c, g, or t
  misc_feature (1573)..(1576): n is a, c, g, or t
  misc_feature (1578)..(1578): n is a, c, g, or t
  misc_feature (1580)..(1580): n is a, c, g, or t
  misc_feature (1584)..(1584): n is a, c, g, or t
  misc_feature (1586)..(1589): n is a, c, g, or t
  misc_feature (1592)..(1593): n is a, c, g, or t
  misc_feature (1595)..(1595): n is a, c, g, or t
  misc_feature (1597)..(1597): n is a, c, g, or t
  misc_feature (1599)..(1599): n is a, c, g, or t
  misc_feature (1601)..(1601): n is a, c, g, or t
  misc_feature (1603)..(1606): n is a, c, g, or t
  misc_feature (1608)..(1608): n is a, c, g, or t
  misc_feature (1610)..(1610): n is a, c, g, or t
  misc_feature (1613)..(1613): n is a, c, g, or t
  misc_feature (1615)..(1615): n is a, c, g, or t
  misc_feature (1618)..(1619): n is a, c, g, or t
  misc_feature (1622)..(1622): n is a, c, g, or t
  misc_feature (1624)..(1624): n is a, c, g, or t
  misc_feature (1626)..(1626): n is a, c, g, or t
  misc_feature (1628)..(1628): n is a, c, g, or t
  misc_feature (1630)..(1630): n is a, c, g, or t
  misc_feature (1635)..(1635): n is a, c, g, or t
  misc_feature (1638)..(1639): n is a, c, g, or t
  misc_feature (1643)..(1643): n is a, c, g, or t
  misc_feature (1645)..(1647): n is a, c, g, or t
  misc_feature (1649)..(1650): n is a, c, g, or t
  misc_feature (1654)..(1659): n is a, c, g, or t
  misc_feature (1662)..(1665): n is a, c, g, or t
  misc_feature (1667)..(1667): n is a, c, g, or t
  misc_feature (1670)..(1670): n is a, c, g, or t
  misc_feature (1673)..(1679): n is a, c, g, or t
  misc_feature (1681)..(1696): n is a, c, g, or t
  misc_feature (1700)..(1704): n is a, c, g, or t
  misc_feature (1706)..(1710): n is a, c, g, or t
  misc_feature (1712)..(1715): n is a, c, g, or t
  misc_feature (1719)..(1722): n is a, c, g, or t
  misc_feature (1724)..(1731): n is a, c, g, or t
  misc_feature (1734)..(1735): n is a, c, g, or t
  misc_feature (1738)..(1742): n is a, c, g, or t
  misc_feature (1744)..(1749): n is a, c, g, or t
  misc_feature (1752)..(1754): n is a, c, g, or t
  misc_feature (1756)..(1777): n is a, c, g, or t
  misc_feature (1779)..(1779): n is a, c, g, or t
  misc_feature (1781)..(1783): n is a, c, g, or t
  misc_feature (1785)..(1788): n is a, c, g, or t
  misc_feature (1790)..(1791): n is a, c, g, or t
  misc_feature (1793)..(1795): n is a, c, g, or t
  misc_feature (1797)..(1800): n is a, c, g, or t
  misc_feature (1802)..(1804): n is a, c, g, or t
  misc_feature (1806)..(1806): n is a, c, g, or t
  misc_feature (1809)..(1809): n is a, c, g, or t
  misc_feature (1811)..(1811): n is a, c, g, or t
  misc_feature (1815)..(1819): n is a, c, g, or t
  misc_feature (1821)..(1828): n is a, c, g, or t
  misc_feature (1831)..(1836): n is a, c, g, or t
  misc_feature (1838)..(1839): n is a, c, g, or t
  misc_feature (1841)..(1842): n is a, c, g, or t
  misc_feature (1848)..(1849): n is a, c, g, or t
  misc_feature (1851)..(1852): n is a, c, g, or t
  misc_feature (1854)..(1856): n is a, c, g, or t
  misc_feature (1859)..(1859): n is a, c, g, or t
  misc_feature (1977)..(1977): n is a, c, g, or t
  misc_feature (1986)..(1987): n is a, c, g, or t
  misc_feature (2030)..(2030): n is a, c, g, or t
  misc_feature (2417)..(2417): n is a, c, g, or t
  misc_feature (3014)..(3014): n is a, c, g, or t
  misc_feature (3187)..(3187): n is a, c, g, or t
  misc_feature (3196)..(3196): n is a, c, g, or t
nnnnncnnnntnnntnnnncnnnnnnattntntncancancnnngnnntccctnnnntctnccnnnnnnncnnnnnnnctnctntnnnnnccnncnnnnnnnncncnntcnnncnnntcgtcnncnnnntcnncgnnncggangannnnnnngnggnnancnncgcgnncgagnnnggngangnggnnnncnnngngntnannanngannnnnnncgcnntnnnnngnnngnnnnggncnncnnnctcgncannnnnnncnccnncnnnncnnncnnaacnnnnnnnnnncnnnnnnnnnnnccncnaanannannannanntanacaangannnnnagnangngnnntnntnannnannnnnncnnnnnnnngttnntntnntnnntnntnnnnncnncnttcnntttnntttnnntncnnngnnnnngnnnncnncnnnggnnntnttnncnannannnggnnnngannggnnnnannnnaannnnannnnggnncnaannnnnnnnnanannnnngnnnnnannnnnnnaaantcnannnnngnngnnnnnnnnnnannnnntccnnnnnntncnnntntnnanntnnnnnnnnnannnnnnnnnnnnnnnnnntnnnnnnnannnnnncnnnnnnnnncnnnnnaannngantnnnnnnntnaatnntnnnnnnnngngagnnncgaannnaatnnnnnngattcncnncgngnnnnanananannnncgacntnnnnttanntgnncacnatncnnctnntnnntntnctnnntnnnnnntcnntctnntctttctnctntttnttctctncttttttncnnnnntnnntctcttncttcttnttnnnnntcntcnnttnactnntnnnnccnnnnnnctnctcnttntnnnngtnntcncnnnngncnncntnntcnnnncnnncnctnnttnnacnncntcntcnnttcgnncnncnnnnnancnncnncntnnntnnnttntnctcnnnntcntnnnnttnnttntnntcgtcntnntnttcgnnnntnnnnnntnnngangangangncgnngnnncnnnnnnnncnncnncgcntcnnnnnnnnntnntcntctcctcnnnntnntcntctnntcgtnnnntnnnnntnctnnnnntcntcttcntntnntnttnttnntnnnnnnnnncntnntnngttgtngntgntttnnncnccnnctnttncncntcnnnngtntcttnatnaccgcnnnttncntnncnttngctcgnnnnnnnccnntngnnnngcgnnntcnnnncgngnnnncgnngntngngnncgtngangnnngaannngtttnttgatttnnaatttgntntttnnantnnnnntgntntntnattnttnttgttgnntnnnnnntnntntnntcntcntcganttcatcatcntcntccntnnnnnnnntgaancgncgngnnncgtngtcnagtannnngcgnncnngtnnnngnnttttngnntnnnnnntntgngngntnnannngnngtgnnnnaannnnnnantnnaananntntnnagannngnntattnnannnncnantttntnnnnatnnangngngnannnnanangcncncannaangnanananaaaanaannaatnannnannaaannnnnnatnnnnanggnaannnnnnnannnnnnnnnnnnnnnnggannnnntnnnnnannnnaccnnnnannnnnnnnagnngannnnnannnnnntcnnnannnnnnnnnnnnnnnnnnnnnngnannngnnnnanngnnncnnnncnnncncgngnacgnnnnngnnnnnnnntcnnnnnncnncnncgactnntnntnnngangatgaaaaaacgacggactcgctgtgcccgttgttatctggtttaggcgcgcccgcgttcgtgtgcggcatcgtggaccggttgacgacaaccttgactatttcgtgcacagacgagnacacgttannggtagttgataaaacacctctgacgaaagaaaacgtcacgganactggtctgagaggcatcgggaaagaagagacgagatgcaagacgaaaggcgggaggaaagagtacatgctctccggagacgtgaaaatggacgggacgaaccagttcgcgtgcagattgatatctcgaggagatggatggtggacgatatccgaacgctcgttgacggacgaaagcgggaagtatttgcgcgagaggaacatattgcgagcgccggggaagaaagacgtcgtcgtcgatcgatatttcgaaagaagtaagtagatgtgaggaggagaaggttacgtagaagagagatttagaataattttcatcagctcgcgagattataaaaacatttttcaacgttctaagaccaaaacggcttcgcagtgcgcggtatgcggnaacagatcgacggctgcggcttttcgcgggcggaagggagggcccatgtttttcgtcctcaacgcgcagagttcgacgcagttttgcgccatggactcggggttacaagagacgtagactattttgcggagtctggtctccatgcggagcgcgttgagaacttttttgtgtaaaccgcaccgaggcgggtcgacgatggccacgacgtcgtcgtagaggaactctcgtttttgttgttgttgtcgtcgttcttcttcgtgttcatctttgcttccctcttcctcgttggtgtttccggcaactgttttcacgtcctcgccgtactttttcagcacgacgtctaaagtatcctcggcttttcccgcaatccattcgcaattcgttctgtcgtttaattttgagtttttctccgcgtcgcgaatggcgtcttcgacaatatctaatccgacaaccttcccaaccgaattggcgagggttaacccgatcgtaccagtaccacaacacacgtcgagcaataacgattttccgttcggcgatgcccactcgccggctaaggcgtacagcaattccgcggcggcggtgttcacttggaaaaangcagagtgcgataaggaaaacttcaatccgcacatgtgttcacaaataaccatcggcttgttgttcgcagtatttctgtcaccaacaacaagctcggacgtgtgtgcatccgcagcagccatgtttgatacgagttcgttgtgctgacgtaattgcacggtgatcaaaaacgnttccggttngaacgcgctcgccgcggtttccatggcgtcccgaatacctttcagcgctttctccattttcgccgcttcgaattccttacctggattaatttgtacaacgaccataacttccgagttttcttttggcgtcggagcgtccaacgataacgcgtcttcggcgtcgtcgatgccattcacagtcacttcagcgttatcatcttcttcatcctcgtccctctcgccttcttctaatcgaagccatttgcgccacgctggagccgcgcaattttgattactatcattatcattattactatcactatcacctaacatggacggagcgcatccaccttcacgaacaatcaacaagcgccaaaatccactcccgtttcgcttatcccaactcggcaacgcgtcctctgtaccggcgacgtccctgagatacttttgcgcggcttcttgaacgcaaatcgccacctttgaaatgttcctacatccaacgggttctccaatcgccacgtttccttctctgaataaaccgacgttaaacccaatcgtcggctgaccttggttattatttccaatcgtaaactccgatttgtttctgtatccctcgagaaccggcgaacgcacgatgcctactaaatcgcaacaccgtttattcttcctcgcgctggcgtctttcaaccactgctcggtttcctcttctccctcaacatcacttcctttcccgttgttgttagtattattcctcttaaacttctcgttcgccttcccgacgagttccgtcaccatcgccaacgccttcctcaccttcgccttctt

SEQ ID NO: 704 - DNA, 4000 bp, Escherichia coli
  misc_feature (2)..(2): n is a, c, g, or t
  misc_feature (4)..(6): n is a, c, g, or t
  misc_feature (8)..(11): n is a, c, g, or t
  misc_feature (13)..(13): n is a, c, g, or t
  misc_feature (15)..(24): n is a, c, g, or t
  misc_feature (26)..(31): n is a, c, g, or t
  misc_feature (33)..(35): n is a, c, g, or t
  misc_feature (37)..(37): n is a, c, g, or t
  misc_feature (39)..(39): n is a, c, g, or t
  misc_feature (41)..(43): n is a, c, g, or t
  misc_feature (46)..(48): n is a, c, g, or t
  misc_feature (50)..(58): n is a, c, g, or t
  misc_feature (60)..(63): n is a, c, g, or t
  misc_feature (65)..(68): n is a, c, g, or t
  misc_feature (70)..(70): n is a, c, g, or t
  misc_feature (72)..(78): n is a, c, g, or t
  misc_feature (80)..(81): n is a, c, g, or t
  misc_feature (83)..(89): n is a, c, g, or t
  misc_feature (91)..(97): n is a, c, g, or t
  misc_feature (99)..(100): n is a, c, g, or t
  misc_feature (102)..(102): n is a, c, g, or t
  misc_feature (104)..(106): n is a, c, g, or t
  misc_feature (108)..(118): n is a, c, g, or t
  misc_feature (122)..(124): n is a, c, g, or t
  misc_feature (126)..(128): n is a, c, g, or t
  misc_feature (130)..(135): n is a, c, g, or t
  misc_feature (138)..(145): n is a, c, g, or t
  misc_feature (147)..(147): n is a, c, g, or t
  misc_feature (150)..(152): n is a, c, g, or t
  misc_feature (155)..(155): n is a, c, g, or t
  misc_feature (158)..(158): n is a, c, g, or t
  misc_feature (161)..(163): n is a, c, g, or t
  misc_feature (165)..(165): n is a, c, g, or t
  misc_feature (167)..(168): n is a, c, g, or t
  misc_feature (170)..(171): n is a, c, g, or t
  misc_feature (173)..(174): n is a, c, g, or t
  misc_feature (176)..(192): n is a, c, g, or t
  misc_feature (195)..(195): n is a, c, g, or t
  misc_feature (197)..(201): n is a, c, g, or t
  misc_feature (203)..(203): n is a, c, g, or t
  misc_feature (205)..(205): n is a, c, g, or t
  misc_feature (207)..(207): n is a, c, g, or t
  misc_feature (210)..(210): n is a, c, g, or t
  misc_feature (214)..(228): n is a, c, g, or t
  misc_feature (230)..(233): n is a, c, g, or t
  misc_feature (238)..(243): n is a, c, g, or t
  misc_feature (245)..(247): n is a, c, g, or t
  misc_feature (249)..(250): n is a, c, g, or t
  misc_feature (252)..(253): n is a, c, g, or t
  misc_feature (255)..(262): n is a, c, g, or t
  misc_feature (264)..(275): n is a, c, g, or t
  misc_feature (277)..(277): n is a, c, g, or t
  misc_feature (279)..(279): n is a, c, g, or t
  misc_feature (281)..(284): n is a, c, g, or t
  misc_feature (288)..(290): n is a, c, g, or t
  misc_feature (292)..(296): n is a, c, g, or t
  misc_feature (299)..(303): n is a, c, g, or t
  misc_feature (305)..(306): n is a, c, g, or t
  misc_feature (308)..(312): n is a, c, g, or t
  misc_feature (315)..(320): n is a, c, g, or t
  misc_feature (322)..(324): n is a, c, g, or t
  misc_feature (326)..(341): n is a, c, g, or t
  misc_feature (343)..(362): n is a, c, g, or t
  misc_feature (366)..(368): n is a, c, g, or t
  misc_feature (370)..(376): n is a, c, g, or t
  misc_feature (378)..(380): n is a, c, g, or t
  misc_feature (382)..(382): n is a, c, g, or t
  misc_feature (384)..(384): n is a, c, g, or t
  misc_feature (386)..(391): n is a, c, g, or t
  misc_feature (393)..(396): n is a, c, g, or t
  misc_feature (398)..(398): n is a, c, g, or t
  misc_feature (400)..(403): n is a, c, g, or t
  misc_feature (405)..(414): n is a, c, g, or t
  misc_feature (416)..(424): n is a, c, g, or t
  misc_feature (426)..(440): n is a, c, g, or t
  misc_feature (444)..(451): n is a, c, g, or t
  misc_feature (454)..(457): n is a, c, g, or t
  misc_feature (463)..(467): n is a, c, g, or t
  misc_feature (470)..(470): n is a, c, g, or t
  misc_feature (473)..(477): n is a, c, g, or t
  misc_feature (479)..(481): n is a, c, g, or t
  misc_feature (483)..(483): n is a, c, g, or t
  misc_feature (485)..(492): n is a, c, g, or t
  misc_feature (494)..(496): n is a, c, g, or t
  misc_feature (498)..(503): n is a, c, g, or t
  misc_feature (505)..(511): n is a, c, g, or t
  misc_feature (514)..(523): n is a, c, g, or t
  misc_feature (526)..(528): n is a, c, g, or t
  misc_feature (530)..(530): n is a, c, g, or t
  misc_feature (532)..(534): n is a, c, g, or t
  misc_feature (536)..(536): n is a, c, g, or t
  misc_feature (538)..(538): n is a, c, g, or t
  misc_feature (540)..(541): n is a, c, g, or t
  misc_feature (543)..(543): n is a, c, g, or t
  misc_feature (547)..(548): n is a, c, g, or t
  misc_feature (550)..(551): n is a, c, g, or t
  misc_feature (553)..(553): n is a, c, g, or t
  misc_feature (555)..(558): n is a, c, g, or t
  misc_feature (560)..(560): n is a, c, g, or t
  misc_feature (562)..(564): n is a, c, g, or t
  misc_feature (566)..(567): n is a, c, g, or t
  misc_feature (569)..(570): n is a, c, g, or t
  misc_feature (572)..(575): n is a, c, g, or t
  misc_feature (577)..(582): n is a, c, g, or t
  misc_feature (586)..(590): n is a, c, g, or t
  misc_feature (592)..(594): n is a, c, g, or t
  misc_feature (596)..(596): n is a, c, g, or t
  misc_feature (598)..(599): n is a, c, g, or t
  misc_feature (601)..(602): n is a, c, g, or t
  misc_feature (604)..(608): n is a, c, g, or t
  misc_feature (611)..(613): n is a, c, g, or t
  misc_feature (618)..(624): n is a, c, g, or t
  misc_feature (628)..(629): n is a, c, g, or t
  misc_feature (631)..(631): n is a, c, g, or t
  misc_feature (633)..(633): n is a, c, g, or t
  misc_feature (635)..(643): n is a, c, g, or t
  misc_feature (646)..(648): n is a, c, g, or t
  misc_feature (650)..(659): n is a, c, g, or t
  misc_feature (661)..(661): n is a, c, g, or t
  misc_feature (663)..(679): n is a, c, g, or t
  misc_feature (682)..(686): n is a, c, g, or t
  misc_feature (688)..(693): n is a, c, g, or t
  misc_feature (695)..(695): n is a, c, g, or t
  misc_feature (697)..(697): n is a, c, g, or t
  misc_feature (700)..(702): n is a, c, g, or t
  misc_feature (705)..(705): n is a, c, g, or t
  misc_feature (707)..(720): n is a, c, g, or t
  misc_feature (722)..(723): n is a, c, g, or t
  misc_feature (725)..(729): n is a, c, g, or t
  misc_feature (731)..(734): n is a, c, g, or t
  misc_feature (736)..(741): n is a, c, g, or t
  misc_feature (743)..(743): n is a, c, g, or t
  misc_feature (745)..(752): n is a, c, g, or t
  misc_feature (754)..(754): n is a, c, g, or t
  misc_feature (757)..(757): n is a, c, g, or t
  misc_feature (759)..(762): n is a, c, g, or t
  misc_feature (765)..(765): n is a, c, g, or t
  misc_feature (767)..(768): n is a, c, g, or t
  misc_feature (773)..(775): n is a, c, g, or t
  misc_feature (777)..(777): n is a, c, g, or t
  misc_feature (779)..(780): n is a, c, g, or t
  misc_feature (782)..(782): n is a, c, g, or t
  misc_feature (784)..(784): n is a, c, g, or t
  misc_feature (786)..(787): n is a, c, g, or t
  misc_feature (789)..(790): n is a, c, g, or t
  misc_feature (793)..(793): n is a, c, g, or t
  misc_feature (795)..(800): n is a, c, g, or t
  misc_feature (803)..(807): n is a, c, g, or t
  misc_feature (809)..(813): n is a, c, g, or t
  misc_feature (815)..(815): n is a, c, g, or t
  misc_feature (817)..(828): n is a, c, g, or t
  misc_feature (830)..(830): n is a, c, g, or t
  misc_feature (832)..(834): n is a, c, g, or t
  misc_feature (836)..(836): n is a, c, g, or t
  misc_feature (838)..(840): n is a, c, g, or t
  misc_feature (842)..(842): n is a, c, g, or t
  misc_feature (845)..(848): n is a, c, g, or t
  misc_feature (850)..(859): n is a, c, g, or t
  misc_feature (863)..(867): n is a, c, g, or t
  misc_feature (869)..(872): n is a, c, g, or t
  misc_feature (874)..(878): n is a, c, g, or t
  misc_feature (881)..(891): n is a, c, g, or t
  misc_feature (893)..(896): n is a, c, g, or t
  misc_feature (898)..(900): n is a, c, g, or t
  misc_feature (902)..(908): n is a, c, g, or t
  misc_feature (910)..(918): n is a, c, g, or t
  misc_feature (920)..(921): n is a, c, g, or t
  misc_feature (923)..(926): n is a, c, g, or t
  misc_feature (928)..(933): n is a, c, g, or t
  misc_feature (935)..(935): n is a, c, g, or t
  misc_feature (937)..(940): n is a, c, g, or t
  misc_feature (942)..(942): n is a, c, g, or t
  misc_feature (944)..(945): n is a, c, g, or t
  misc_feature (948)..(954): n is a, c, g, or t
  misc_feature (956)..(963): n is a, c, g, or t
  misc_feature (965)..(969): n is a, c, g, or t
  misc_feature (971)..(987): n is a, c, g, or t
  misc_feature (990)..(990): n is a, c, g, or t
  misc_feature (992)..(996): n is a, c, g, or t
  misc_feature (998)..(998): n is a, c, g, or t
  misc_feature (1000)..(1007): n is a, c, g, or t
  misc_feature (1010)..(1011): n is a, c, g, or t
  misc_feature (1013)..(1014): n is a, c, g, or t
  misc_feature (1016)..(1019): n is a, c, g, or t
  misc_feature (1021)..(1035): n is a, c, g, or t
  misc_feature (1037)..(1039): n is a, c, g, or t
  misc_feature (1041)..(1041): n is a, c, g, or t
  misc_feature (1043)..(1046): n is a, c, g, or t
  misc_feature (1048)..(1052): n is a, c, g, or t
  misc_feature (1054)..(1055): n is a, c, g, or t
  misc_feature (1057)..(1057): n is a, c, g, or t
  misc_feature (1059)..(1059): n is a, c, g, or t
  misc_feature (1061)..(1064): n is a, c, g, or t
  misc_feature (1067)..(1067): n is a, c, g, or t
  misc_feature (1069)..(1069): n is a, c, g, or t
  misc_feature (1071)..(1077): n is a, c, g, or t
  misc_feature (1079)..(1080): n is a, c, g, or t
  misc_feature (1082)..(1090): n is a, c, g, or t
  misc_feature (1094)..(1097): n is a, c, g, or t
  misc_feature (1099)..(1101): n is a, c, g, or t
  misc_feature (1104)..(1106): n is a, c, g, or t
  misc_feature (1108)..(1110): n is a, c, g, or t
  misc_feature (1112)..(1118): n is a, c, g, or t
  misc_feature (1120)..(1122): n is a, c, g, or t
  misc_feature (1124)..(1125): n is a, c, g, or t
  misc_feature (1128)..(1129): n is a, c, g, or t
  misc_feature (1131)..(1137): n is a, c, g, or t
  misc_feature (1139)..(1139): n is a, c, g, or t
  misc_feature (1141)..(1143): n is a, c, g, or t
  misc_feature (1145)..(1151): n is a, c, g, or t
  misc_feature (1158)..(1161): n is a, c, g, or t
  misc_feature (1164)..(1164): n is a, c, g, or t
  misc_feature (1167)..(1170): n is a, c, g, or t
  misc_feature (1172)..(1173): n is a, c, g, or t
  misc_feature (1175)..(1182): n is a, c, g, or t
  misc_feature (1184)..(1186): n is a, c, g, or t
  misc_feature (1188)..(1190): n is a, c, g, or t
  misc_feature (1193)..(1198): n is a, c, g, or t
  misc_feature (1200)..(1202): n is a, c, g, or t
  misc_feature (1205)..(1206): n is a, c, g, or t
  misc_feature (1208)..(1208): n is a, c, g, or t
  misc_feature (1210)..(1212): n is a, c, g, or t
  misc_feature (1214)..(1216): n is a, c, g, or t
  misc_feature (1218)..(1222): n is a, c, g, or t
  misc_feature (1224)..(1227): n is a, c, g, or t
  misc_feature (1231)..(1233): n is a, c, g, or t
  misc_feature (1235)..(1235): n is a, c, g, or t
  misc_feature (1237)..(1241): n is a, c, g, or t
  misc_feature (1243)..(1246): n is a, c, g, or t
  misc_feature (1248)..(1251): n is a, c, g, or t
  misc_feature (1255)..(1255): n is a, c, g, or t
  misc_feature (1257)..(1259): n is a, c, g, or t
  misc_feature (1262)..(1264): n is a, c, g, or t
  misc_feature (1266)..(1268): n is a, c, g, or t
  misc_feature (1272)..(1272): n is a, c, g, or t
  misc_feature (1274)..(1274): n is a, c, g, or t
  misc_feature (1276)..(1277): n is a, c, g, or t
  misc_feature (1279)..(1287): n is a, c, g, or t
  misc_feature (1289)..(1290): n is a, c, g, or t
  misc_feature (1292)..(1297): n is a, c, g, or t
  misc_feature (1299)..(1300): n is a, c, g, or t
  misc_feature (1303)..(1309): n is a, c, g, or t
  misc_feature (1311)..(1314): n is a, c, g, or t
  misc_feature (1316)..(1317): n is a, c, g, or t
  misc_feature (1319)..(1324): n is a, c, g, or t
  misc_feature (1326)..(1328): n is a, c, g, or t
  misc_feature (1330)..(1332): n is a, c, g, or t
  misc_feature (1334)..(1334): n is a, c, g, or t
  misc_feature (1336)..(1337): n is a, c, g, or t
  misc_feature (1339)..(1339): n is a, c, g, or t
  misc_feature (1342)..(1345): n is a, c, g, or t
  misc_feature (1347)..(1351): n is a, c, g, or t
  misc_feature (1354)..(1356): n is a, c, g, or t
  misc_feature (1358)..(1361): n is a, c, g, or t
  misc_feature (1364)..(1368): n is a, c, g, or t
  misc_feature (1370)..(1370): n is a, c, g, or t
  misc_feature (1373)..(1373): n is a, c, g, or t
  misc_feature (1375)..(1380): n is a, c, g, or t
  misc_feature (1382)..(1382): n is a, c, g, or t
  misc_feature (1384)..(1388): n is a, c, g, or t
  misc_feature (1390)..(1396): n is a, c, g, or t
  misc_feature (1399)..(1404): n is a, c, g, or t
  misc_feature (1406)..(1406): n is a, c, g, or t
  misc_feature (1408)..(1410): n is a, c, g, or t
  misc_feature (1412)..(1422): n is a, c, g, or t
  misc_feature (1424)..(1429): n is a, c, g, or t
  misc_feature (1431)..(1431): n is a, c, g, or t
  misc_feature (1433)..(1439): n is a, c, g, or t
  misc_feature (1441)..(1444): n is a, c, g, or t
  misc_feature (1447)..(1447): n is a, c, g, or t
  misc_feature (1451)..(1451): n is a, c, g, or t
  misc_feature (1453)..(1459): n is a, c, g, or t
  misc_feature (1461)..(1461): n is a, c, g, or t
  misc_feature (1465)..(1466): n is a, c, g, or t
  misc_feature (1468)..(1476): n is a, c, g, or t
  misc_feature (1478)..(1479): n is a, c, g, or t
  misc_feature (1481)..(1484): n is a, c, g, or t
  misc_feature (1486)..(1487): n is a, c, g, or t
  misc_feature (1489)..(1492): n is a, c, g, or t
  misc_feature (1494)..(1496): n is a, c, g, or t
  misc_feature (1498)..(1498): n is a, c, g, or t
  misc_feature (1502)..(1503): n is a, c, g, or t
  misc_feature (1505)..(1505): n is a, c, g, or t
  misc_feature (1507)..(1507): n is a, c, g, or t
  misc_feature (1514)..(1514): n is a, c, g, or t
  misc_feature (1520)..(1520): n is a, c, g, or t
  misc_feature (1522)..(1522): n is a, c, g, or t
  misc_feature (1524)..(1525): n is a, c, g, or t
  misc_feature (1527)..(1527): n is a, c, g, or t
  misc_feature (1529)..(1532): n is a, c, g, or t
  misc_feature (1534)..(1534): n is a, c, g, or t
  misc_feature (1536)..(1536): n is a, c, g, or t
  misc_feature (1539)..(1545): n is a, c, g, or t
  misc_feature (1547)..(1548): n is a, c, g, or t
  misc_feature (1550)..(1551): n is a, c, g, or t
  misc_feature (1553)..(1556): n is a, c, g, or t
  misc_feature (1558)..(1560): n is a, c, g, or t
  misc_feature (1563)..(1563): n is a, c, g, or t
  misc_feature (1565)..(1568): n is a, c, g, or t
  misc_feature (1571)..(1578): n is a, c, g, or t
  misc_feature (1580)..(1583): n is a, c, g, or t
  misc_feature (1585)..(1585): n is a, c, g, or t
  misc_feature (1587)..(1589): n is a, c, g, or t
  misc_feature (1591)..(1592): n is a, c, g, or t
  misc_feature (1594)..(1594): n is a, c, g, or t
  misc_feature (1596)..(1596): n is a, c, g, or t
  misc_feature (1598)..(1598): n is a, c, g, or t
  misc_feature (1600)..(1601): n is a, c, g, or t
  misc_feature (1603)..(1609): n is a, c, g, or t
  misc_feature (1612)..(1612): n is a, c, g, or t
  misc_feature (1614)..(1616): n is a, c, g, or t
  misc_feature (1618)..(1618): n is a, c, g, or t
  misc_feature (1620)..(1621): n is a, c, g, or t
  misc_feature (1623)..(1627): n is a, c, g, or t
  misc_feature (1629)..(1629): n is a, c, g, or t
  misc_feature (1636)..(1637): n is a, c, g, or t
  misc_feature (1639)..(1641): n is a, c, g, or t
  misc_feature (1644)..(1644): n is a, c, g, or t
  misc_feature (1651)..(1652): n is a, c, g, or t
  misc_feature (1656)..(1657): n is a, c, g, or t
  misc_feature (1661)..(1663): n is a, c, g, or t
  misc_feature (1665)..(1665): n is a, c, g, or t
  misc_feature (1668)..(1668): n is a, c, g, or t
  misc_feature (1670)..(1672): n is a, c, g, or t
  misc_feature (1680)..(1680): n is a, c, g, or t
  misc_feature (1683)..(1683): n is a, c, g, or t
  misc_feature (1687)..(1687): n is a, c, g, or t
  misc_feature (1689)..(1689): n is a, c, g, or t
  misc_feature (1692)..(1692): n is a, c, g, or t
  misc_feature (1695)..(1695): n is a, c, g, or t
  misc_feature (1697)..(1697): n is a, c, g, or t
  misc_feature (1702)..(1703): n is a, c, g, or t
  misc_feature (1707)..(1707): n is a, c, g, or t
  misc_feature (1712)..(1714): n is a, c, g, or t
  misc_feature (1716)..(1717): n is a, c, g, or t
  misc_feature (1722)..(1722): n is a, c, g, or t
  misc_feature (1724)..(1725): n is a, c, g, or t
  misc_feature (1728)..(1729): n is a, c, g, or t
  misc_feature (1731)..(1731): n is a, c, g, or t
  misc_feature (1734)..(1734): n is a, c, g, or t
  misc_feature (1737)..(1738): n is a, c, g, or t
  misc_feature (1740)..(1740): n is a, c, g, or t
  misc_feature (1750)..(1751): n is a, c, g, or t
  misc_feature (1754)..(1755): n is a, c, g, or t
  misc_feature (1757)..(1757): n is a, c, g, or t
  misc_feature (1762)..(1763): n is a, c, g, or t
  misc_feature (1770)..(1770): n is a, c, g, or t
  misc_feature (1775)..(1775): n is a, c, g, or t
  misc_feature (1778)..(1778): n is a, c, g, or t
  misc_feature (1786)..(1786): n is a, c, g, or t
  misc_feature (1788)..(1788): n is a, c, g, or t
  misc_feature (1797)..(1797): n is a, c, g, or t
  misc_feature (1800)..(1802): n is a, c, g, or t
  misc_feature (1805)..(1805): n is a, c, g, or t
  misc_feature (1810)..(1811): n is a, c, g, or t
  misc_feature (1813)..(1813): n is a, c, g, or t
  misc_feature (1817)..(1817): n is a, c, g, or t
  misc_feature (1825)..(1827): n is a, c, g, or t
  misc_feature (1839)..(1840): n is a, c, g, or t
  misc_feature (1842)..(1843): n is a, c, g, or t
  misc_feature (1855)..(1855): n is a, c, g, or t
  misc_feature (1857)..(1857): n is a, c, g, or t
  misc_feature (1861)..(1861): n is a, c, g, or t
  misc_feature (1885)..(1885): n is a, c, g, or t
  misc_feature (1965)..(1965): n is a, c, g, or t
  misc_feature (1991)..(1992): n is a, c, g, or t
  misc_feature (2012)..(2012): n is a, c, g, or t
  misc_feature (2023)..(2023): n is a, c, g, or t
  misc_feature (2190)..(2190): n is a, c, g, or t
  misc_feature (2289)..(2289): n is a, c, g, or t
cntnnngnnnngntnnnnnnnnnntnnnnnntnnnancngnnnagnnngnnnnnnnnncnnnntnnnnancnnnnnnncnnannnnnnntnnnnnnncnntntnnngnnnnnnnnnnngagnnntnnngnnnnnncannnnnnnncnacnnnagntcntcnnntncnnanncnncnnnnnnnnnnnnnnnnngcngnnnnnancnantgnggtnnnnnnnnnnnnnnntnnnnacatnnnnnncnnntnngnnannnnnnnngnnnnnnnnnnnnananannnngtgnnntnnnnnatnnnnnannannnnncannnnnntnnnannnnnnnnnnnnnnnntnnnnnnnnnnnnnnnnnnnngtgnnntnnnnnnngnnnancntnnnnnnannnngngnnnncnnnnnnnnnntnnnnnnnnncnnnnnnnnnnnnnnngtgnnnnnnnngannnncaaccnnnnnacntcnnnnncnnncncnnnnnnnntnnngnnnnnnannnnnnnagnnnnnnnnnngtnnnanannngnancnngngaanntnncnannnnanannncnncnntnnnntnnnnnngcgnnnnngnnnangnnanntnnnnnatnnnaaacnnnnnnncatnncnancnnnnnnnnnacnnntnnnnnnnnnnancnnnnnnnnnnnnnnnnngtnnnnnannnnnnancnggnnncanannnnnnnnnnnnnncnncnnnnncnnnnannnnnngntnnnnnnnngngangnnnnaantnnacaannngnanncntngnnannagncnnnnnnccnnnnnannnnnanannnnnnnnnnnnangnnnantnnnanatnnnnannnnnnnnnnatcnnnnncnnnnannnnnccnnnnnnnnnnnannnntnnngnnnnnnngnnnnnnnnnanntnnnnannnnnngnannnncngnncannnnnnncnnnnnnnnannnnnannnnnnnnnnnnnnnnnagnannnnnanannnnnnnncanngnncnnnnannnnnnnnnnnnnnncnnnangnnnnannnnngnncnantnnnnctntncnnnnnnntnntnnnnnnnnntaannnnannntgnnntnnngnnnnnnnannnannatnnannnnnnnancnnngnnnnnnntgaaaannnnggnacnnnncnngnnnnnnnnannngnnnaannnnnnannnagnnangnnngnnnannnnncnnnncctnnntncnnnnntnnnncnnnnttcncnnntgnnntnnncacngngnntnnnnnnnnngnngnnnnnngnnttnnnnnnnannnngnngnnnnnntnnntnnngngnntngtnnnnannnnngannngnnnngtnnnnntngtnannnnnngngnnnnngnnnnnnnccnnnnnntntnnngnnnnnnnnnnncnnnnnnantnnnnnnnannnntanaaangnnnnnnnanacannannnnnnnnnanngnnnncnnannnngnnncncccnngncnaccgccncccgcncncnngngnnnngngngannnnnnntnncnnannnncnnnccncnnnntcnnnnnnnncnnnncncnnngnnangngngnntnnnnnnntanannncncnncnnnnncntatatanntnnngcncgcgacnnatannggtnnntntgngnnncaatatangtncacncncanacnantatanntttnacatnnntnncactntnngtnngnatntgnnancaatagtggnntgnncncaaannactattnctctnccnctcccccncnattcctccnccnnnacnccccnnanaaancccccctnnngcagtgcatctnntnnagatgcactgcngnaggnaaaagcaaccagtactggtcagcntcgtgaccagtactggtaagtggtggtgagcagtactgcttgctgaagtgaccagtactgatccgatcggcgaccagtantggtcacttttgcccctcccgagagnnactctacctcagcccgccangaaggagagcnaaatgagcgaaagcaaaagtgcccgctgcgaccgaagtcacagcgggcactcgccgatagaatatcgaaggggggagagctactattctgcgctttcagcagcaggagcttcagccgtagccttcgtagagcggcgtgaacgacgcgtcttaggagcagccttcttntcagccttttccttgagcatgttctcgttgaagtctacgagttcgatgaagcagacagcagcgttgtcaccgaggcggttacccgtcttgaggatacgngtgtagccaccgggacggtcagcgatcttttcagcaacggggccgaagagttccttgacagcaaacttattctgcagctcagcgaagacgatacgacgtgcgtgcgtggagtcttccttagcgcgggtcagcaggggctcgacgtatacgcgaagagccttagccttagcgaccgtggtgaagatgcgcttgtgcaggatgagcgatgcagccatgttggaaagcatagcctcgcggtgcgccttcttacgaccgagatgattgaatttcttattatgtctcatctttctacttagtcattatctaaattgtacttgctaacatccatcccgaaggtgagtccgagtcgctccatcagctcgttgagctcgtccatagacttcttaccgaagttgcggaacttgctgagcgtatcagcgtcgaggacgacgaggtcggccagacggaatacgttgccggagcggaggcagttctgcgcacggacggagagatcgagatccttgagatcagtacggagcagctgagatacgcgatcgatctcctgcatgtccagtacctcctcgtcgccttcctcgatgactgcattctcttctacctcgacagggtcagagatgaagaggctgaagtgctcgatgaggatagctgctgcgtccttgagagcctgctggggatgaatgctcccgtcagtggtgatctcgagggtcagcttctcgtagtcagtcttctgctctacacgatagttctccgtgaagtacttgacattacggataggcgtatagatcgagtcgatagcgatcgtctgcagctcattctcctgagccgtgtcgaccagcttctcatcagcggggatgtaaccacgccccttgttgatggagagctcgatagtaagggtatacgcctcatcgatgtggcagatgaccagctcgggattgaggacttcgaaggaagtaagcttgccgttgagctcgccagcgaggaactgctgctgaccagagatcgtcaggctgacggtctcctcagtagcgtcctggacgagggcacggaagcggacttgcttcaggttgagaatgatgttagttacatcctccaagacacccggaatagtagcaaattcatgattgacaccttcgatcttgatggtcgagatggcgtagccttcgagtgaagaaaggagtatacgacgcagggcattaccgacagtggtaccatatcccggctcaagagggcggaactcgaacttagcgtacgagtccgtcgcatccatcatgaggacgttttcgggcttctgaaatgctaatattgccatgtgagtgagataatagggattattacttagagtatagttcgacgatcagctgctccttgatctcttcggggatgtcttcacgctgaggagcgctgaggaacttaccggagagagaagcctgattccactcgagccagctgtagctgctgtggctacgaccagccagagagtcggtgatgacctctaagctcttcgccttctcacggacgccgacgacctggccgggcttgagggtgtaagaagggatgttgactacctgaccatcgacggtgatgtgacggtgcgagacgagctgacgagcagctgcacgcgtcttagcgatgccgaggcgatagacgacgttgtcgaggcggctttccaggagctggaggagcacttcacccgtgacacccttcgtgcgctgag

SEQ ID NO: 705 - DNA, 4000 bp, Escherichia coli
  misc_feature (461)..(461): n is a, c, g, or t
  misc_feature (645)..(645): n is a, c, g, or t
  misc_feature (653)..(653): n is a, c, g, or t
  misc_feature (914)..(914): n is a, c, g, or t
  misc_feature (920)..(920): n is a, c, g, or t
  misc_feature (1193)..(1193): n is a, c, g, or t
  misc_feature (1238)..(1238): n is a, c, g, or t
  misc_feature (2525)..(2525): n is a, c, g, or t
  misc_feature (2558)..(2558): n is a, c, g, or t
tgaaaacaattactttatctaaaatattagattgtcttgaaaaagaaactaatgaaattcttatacctgaaataatatctagaagagcccgcagagctgttgaacgtatgattgctataggtcgtagtcattaaaacgtgataggaaacacaaaaccaaccttaaatcaaaaatatattagaagcatagtaaaaagtgccatgttggaagacttgagtcctcatggtgatgtcactactcaacttattaaaagcaaaaaaaaatttaaggcaaaaattatttcaaatcaaaaaggtataattggaggtttaaattttgcaaaagaagcttttaaatatttcaataaaaaaattaattttataactaaaacaaaagatggaagaaaaataaataaaggaaaagtcgtagcaactattgtcggaaatcccaaagaaattctaaaaagcgaaagagtagccctnaattttttaagtttaatttcaggtgtagcaacgattaccaataaatttgtaagtaccgttaatggtaagtcatgcagaatttgttgtactcgaaaaactttgcccaacctaaggctagtacaaaaatatgctgtaaaattaggcggtggactaaatcacagatacaatcttagtgatgaaatcntaataaangataaccatattaaaactaacggtaatatcaaaaaattagttgaaagagctataaaaaataatcgtaaaaaaaaaattactgtagaagtagataatttaaatcaattgagaaagattatcggtttaaaatttcatagagtcttatttgataatatgagtctcaaaaatcttagaaaaggaattaaaatatctaataaattttacgaaaccgaagcttctggcggtattacattaaaaaatgtaagaaaaatagcttcaacnggagtnaaaagaatatcagttggacagataactcatagtgctccggctgttgattttaaattagaaatataaaattattttttaccttttaaatatgcttgtgctgcagctaaacgagcgactggaactctgtatggggaacaagatacataatcaagtcctgtctctgcaaaaaattcgatacttttcgggtctcctccatgttcgccgcaaatccctagttttagggattttttttgtttcttgcctctttcagaagctatttgaattagttctccnactcctctttcatcaatactaataaaaggatctttgttaaaaatnttgttttcaacataatcatttaaaaattttcctgaatcatctctacttattccaaaagtagtttgtgttaaatcattcgtgccaaaactaaaaaaatcagcaaactttgcaatatctttagccctaagtgcagctctcggaagctctatcatagtacccacaaaatattttattttaattttatgcgctttttgaattctttctgctatttttactactagattcctaagtatttgaatttcagcagtagtagaaactaaaggtatcattatttcaggtataaccgatttgaatttttgttttttacattcagctagcgcttcaaaaatagcctgacattgcatttgataaatttctggaaaagaaatgcctagtctacatcctctatgccctaacattgggttctgttcatgaagttcaataattctatatttgatatctttgttagtcatatgtagttccttagctacatcatctatatctttatcagttttcggtaaaaactcatgtaatggaggatctaaaagtctaaccgttacaggcaatccattcatgattttaaaaattttaacaaaatcatttttctgataaggaagaattttttttaatgcttctttgcgatcttcaactgtcttggaaagtatcatttgcctcactgaaataattcttttttcatcaaaaaacatatgttctgttctacacaagccaataccttctgccccaaattctcttgcaattttggtatctagtggcgtttctgagttagcccttactttaagttttctaaattggtcagcccaactcattagttttgaaaattctccagatatatcaggcttaacagttggaacttcaccaagcataacttttccacttccaccatctatggtaatcacatctccttccttaacttcataatttcctgatttaaatgatttattatcataatcgatattaatttcatttgatcctgaaacacatggttttcccatccccctagcaataacagctgcatgactggtcattccacctcttgctgtaagaatacctttagctgcatgcattccatgaatatcttctggagacgtttctgccctaaccaaaattgtatcctgcatttgctcttttaatctcactgcttcatctgcagaaaatgtaacttttccactagccgcaccaggagatgctggaagaccagatgcaattactttcttatctgctttttcatctaaagtaggatgtaacaaggtatcaagtgtgtttggatcaattcttaaaacagcttcnttatttgaaattaatttttcctttaccatatcnactgcaattttaattgctgcttttgcagttctctttcctgaacgagtctgcaatatccataatttgttattttcaacagtaaactcaatatcctgcatatctttatatttattttctaattgtttaaaaattttttttaactgatgaaaaatttttggcatagattcttccatagacaatgcttcggaatttgatttgttttttaattttttggaaatatattgaggtgttcgtgttccagcaacgacgtcctctccttgcgcattaattagatattctccaaagaattccttttcccctgtcgaaggatttctggtaaaagcaaccccggtagcacaattttttcccatgttgccgaataccattgattgaacgttgaccgcagtaccccaatgatctggtatatgatttatttttctataagcttttgctcttttgctgttccaagataaaaaaattgcgctaattgctccccataattgttcatttacattttgaggaaaatttttttttcttttttctttaacgatgtccttaaagttttgtattaatccatcccaatcatcttcttctagttctgtgtcttgtataacgccttttgtaagcttgtagttttcaattagttcttcaaagagatatgactcgataccaaacacaacattgctatacatttgaataaatcgcctataactatctttagcgaatcttccgttagacgttttttttttaagtgcaattacagttttgtcatttagccccaagtttaaaattgtgtccatcatgcccggcattgaaactcttgcgccagatctcaccgaaattaataaaggatttgatagatctccaaatttcttttttgaaattttttcaattatcttaagttctttattaacctgctttataagtttttttggtatttttttattatttttataaaagtattcacaaactttggttgatattataaagcctggtggtactgacaagcccatttgagccatttgagctaaatttgctccctttcctcccaggatatccttgttattagaacgactttgagaactttgattattaaatctaaaagttaatttgtccaactaagcaccttctacttttgaaaaatctacaaaattattataagttttacaaaacatttgaagtaattttaaacgatttttttttatatctaaattttcatcatttacaattacattgtcaaaaaagttgtctgtagttggttttgcttcagccaatatttttaatgtctcatcataactttcttgtctttttgtacttgaaaaatatttacgaatttcatttattttattgaataaatgtttttcttcgtcttttttgaatagaaatgactcaggttgattcattatatctcctttttggttttttagctcttgatcaataatattagagacccttttgtatgt

SEQ ID NO: 706 - DNA, 4000 bp, Escherichia coli
  misc_feature (1985)..(1985): n is a, c, g, or t
  misc_feature (1988)..(1988): n is a, c, g, or t
  misc_feature (2337)..(2337): n is a, c, g, or t
  misc_feature (3768)..(3768): n is a, c, g, or t
  misc_feature (3883)..(3883): n is a, c, g, or t
  misc_feature (3961)..(3961): n is a, c, g, or t
tgacactgaaaaaagatactcaaaatccttttgtgccaaaaccgcatgcacctggaagagaactgggagaatctgcagccagtggcgcaaatcaagaatttcaggatgcaaaaaaaatcaaaaatcaaaaatctcaggcacaaaacaaaatctctgttgaaattgatttagacggaatctctgatagaattgttgaatttccggtttctgaaggagtttatgagcaaataataggtctttcaaacaaagttatttacagcgaattcccacttacaggcaccgtcgacgatttggcatcagaagatgatgcaggaaaggatgaaggtattttatggatttacgattttgagaaacaggaaattgaaaccatagctgagaatgtaggctttgtgcaaacttccttagcagatgaatccgaaaattcttcacgcaccatgctttacagttccggtgaaaagttacgggtatttgaggcaggagttcctgttccggaagaaaataaagctgaaaaacatttttcgcgcaaaagtggatggcttgatttgagccgcatccggatttcggtacagtatcagaaagagtgggcacaaatgtttcaggagtcctggcgtttgcaaaaagaatttttttggactgaagatctttcaggtgttgattgggaacgcgtgtaccaacgctatgcccgtttgctgccccgaattggttcccgttctgaactatctgatttaatatgggaaatgcaaggagaactgggtacatctcacgcttatgagtatggaggtgattatcctcatgcaccacgttatcctgtaggttgtttaggtgcagaccttgtttttgactcaaaacggcgttcgtggatttttcaaaaaatttactctggagacatctggaaaaccaacgagcattctccgttggctgaacccggtgtcgcggtaaaagaaggagatcaactcctggcagtcggcggagttccggtagatgaacacaaaactccgggagaattgctcgtgcaccaggcaggtcagtttgttccgttgactgttatcgaaggaaatcagaaaaaaaagggagcaaaaaggaaagcgaaggaagcacgccaaatcgtggtaaaaacgctcttcggagaacagaaagttcgctatcgggagtgggtcaggaataatgtgaaaaccgttgaatcactgactgaaggccgtgtaggctacctgcatcttccggacatgagtacacatggaatagcagagtttcatcgaggatatttagcccaggttgatcgtgaaggtttgattgttgatgcccgttataatgcaggcggaatggtatcaccgctcattcttgaaaaattagcgcatcgacatctgggttatgacgtgccgcgctggggatcccctgagtcttatccatatcatacactgcgtggtcacctgatagtgattgcaaatcaattcaccggttctgacggtgatatgttcacaacaagcttccggcaactgcaacttggacctttagttggtaaacgaacctggggcggtgtgatcggcattgacggtcgttaccaattggtggatggaacaacaacaacacagcctcagtattccatctggttccatcacgcaggttggtcggttgaaaatcatggggttgatcctgatattgaggtggaagacacaccacaatcttttgtcaaaaatgaagacccgctgcttgcgcgcacagttcaagaaatgttgcgcttgcttaaagaaaaacctgttcagtcggtgagttattctccgtcaccaagacgtttgcttccggagtgaattttagaaaaaattctcattatttgaaaacattcctccaagttcattttcaggggtttttcttaaaactaaataactatatgcaactgaatggagcagtacctccgggaagaatattcattgctgcaaaaagttaatccgattttccacttgtaaatttgatcaatttttgagagcatnatntgatcacaaataattattgccaagacttctcttcaaaaattcttccatgctacaaactattcaaccgctgattgatcttgccaatactgatctggatttgcagacgaacatcttttcaaggtcacatttggaacgccagatcgaaacggcaagatctgttgttgaccaacatcaaaaattatttgaacaaaaatataacgaactggacctcttgaccagtgaaggcaaaatagtaaaaaacaatattgaaattcaggagcaactgataacccgtctggatgctcaggttccgaagatccgaaacgaaaaagaatttgccgccagcaaaacccagttagaggaagcccgnaaaatgttgggcttattggaagataaattgcttgaactggatatgaaaaaagaagacctggaacaggaaattgaaacaattaattccgaacttactgaatcaaattccacatttcaacaggaaacctcaggactcctgaaaaaacaggaaaaagcagaaaagaagattgccaaattggagccacgacgaaaccgtctgctgaaaaaacttccccaaaacatcaaacgattttatgagcgctgccaggaaagtggaatttcgatgccggtctgtgccattcaggacaaaagttgcagtggctgtcacatggtgttattaccacaattggtcaatgaattgatggctaacccaaactcccacaaaaattgcccaaattgttcacgcattttgtactaccctgaagttgaggaagaagtggagtcctgagctggatctttttgagtaggcttttgtattagatgttgaacgaactctgcttcaacaacatacaatcatgacaagaaatgttggcgctgcttttattttcactaacattttttttaggatgcagttcttcggtaccttcaggatttttatatcctgctgaaaaatcaatggaggtgcgctacctttgtcgtttaccatatctggacgcaaccgctccccatcaatcatggagcaaatcagcccctgcctgggtcattctcaatgaaaaaaaagtcatcgtttattttaagaatgaccgcaccttttctttccctcgaacctcagaaatcacacttctttccggcaagtatcgatgtaccatatgaaaatgtttacctgaattattcggcgttataaagtgtaagtatccccttttagcactgcggcaaaaacatcacgatcgacattaccaccggaagcaattaccgccactttacggcttttaattttggatgattcctgtaccgcagccgcaaatgccgcagcaccggcgccttcgcaaacattatgagtgcattcatacaacatgcgcatggcttcagcaatctcgctgtcagtaacctccacaatccgctcaacacctttccatatcatttcaagcgccgattgttccggaattctgcaggccattccgtcagcgattttggtactcaccggtgattcaacaggacgtttgcaactgaatgactcggcataggcattggcatgtgctgatacaactccaacaatttcagtcttcaaattcaatgcatcccttgcggcaagcattccgcaaattccggatcccaaaccgatgggaacgtagacaacatcaggatccttgactcctcttagtaattccaaactgtatgtggcaactccggtgactaataatggggcaaacgaaggtaccatttgcagttcttcttcatgagccagatttttcgcaaattcacgagcagtttgaaaatcatcaccatgctcaantagcttcacaccaagcgaacgcatagctgcatttttctcaacactgtttccgtgaggaactacgatagtcgcgggaattccgtaacgccgtgcagcaaaaccaactgactgcccntgatttccgcgggtcgcactgacgacacctttaggtttttttgaggatagtgagagatgagcgaaataaaccaaaccnccacggatcttgaaagaaccattcggagtatggttttcg

SEQ ID NO: 707 - DNA, 4000 bp, Escherichia coli
  misc_feature (49)..(49): n is a, c, g, or t
  misc_feature (129)..(129): n is a, c, g, or t
  misc_feature (318)..(318): n is a, c, g, or t
  misc_feature (340)..(340): n is a, c, g, or t
  misc_feature (383)..(383): n is a, c, g, or t
  misc_feature (430)..(430): n is a, c, g, or t
  misc_feature (435)..(435): n is a, c, g, or t
  misc_feature (476)..(476): n is a, c, g, or t
  misc_feature (559)..(559): n is a, c, g, or t
  misc_feature (688)..(688): n is a, c, g, or t
  misc_feature (832)..(832): n is a, c, g, or t
  misc_feature (1057)..(1057): n is a, c, g, or t
  misc_feature (1081)..(1081): n is a, c, g, or t
  misc_feature (1156)..(1156): n is a, c, g, or t
  misc_feature (1240)..(1240): n is a, c, g, or t
  misc_feature (1246)..(1246): n is a, c, g, or t
  misc_feature (1272)..(1272): n is a, c, g, or t
  misc_feature (1342)..(1342): n is a, c, g, or t
  misc_feature (1360)..(1360): n is a, c, g, or t
  misc_feature (1401)..(1401): n is a, c, g, or t
  misc_feature (1405)..(1405): n is a, c, g, or t
  misc_feature (1420)..(1420): n is a, c, g, or t
  misc_feature (1474)..(1474): n is a, c, g, or t
  misc_feature (1480)..(1480): n is a, c, g, or t
  misc_feature (1555)..(1555): n is a, c, g, or t
  misc_feature (1987)..(1987): n is a, c, g, or t
  misc_feature (2647)..(2649): n is a, c, g, or t
  misc_feature (2653)..(2653): n is a, c, g, or t
  misc_feature (2655)..(2656): n is a, c, g, or t
  misc_feature (2668)..(2668): n is a, c, g, or t
  misc_feature (2670)..(2670): n is a, c, g, or t
  misc_feature (2674)..(2674): n is a, c, g, or t
  misc_feature (2687)..(2687): n is a, c, g, or t
  misc_feature (2689)..(2691): n is a, c, g, or t
  misc_feature (2706)..(2706): n is a, c, g, or t
  misc_feature (2712)..(2712): n is a, c, g, or t
  misc_feature (2714)..(2715): n is a, c, g, or t
  misc_feature (2719)..(2719): n is a, c, g, or t
  misc_feature (2721)..(2721): n is a, c, g, or t
  misc_feature (2726)..(2731): n is a, c, g, or t
  misc_feature (2734)..(2734): n is a, c, g, or t
  misc_feature (2740)..(2740): n is a, c, g, or t
  misc_feature (2742)..(2742): n is a, c, g, or t
  misc_feature (2746)..(2746): n is a, c, g, or t
  misc_feature (2748)..(2748): n is a, c, g, or t
  misc_feature (2751)..(2751): n is a, c, g, or t
  misc_feature (2754)..(2754): n is a, c, g, or t
  misc_feature (2757)..(2757): n is a, c, g, or t
  misc_feature (2761)..(2762): n is a, c, g, or t
  misc_feature (2766)..(2767): n is a, c, g, or t
  misc_feature (2772)..(2773): n is a, c, g, or t
  misc_feature (2779)..(2780): n is a, c, g, or t
  misc_feature (2782)..(2782): n is a, c, g, or t
  misc_feature (2784)..(2785): n is a, c, g, or t
  misc_feature (2791)..(2793): n is a, c, g, or t
  misc_feature (2797)..(2798): n is a, c, g, or t
  misc_feature (2800)..(2801): n is a, c, g, or t
  misc_feature (2805)..(2806): n is a, c, g, or t
  misc_feature (2817)..(2817): n is a, c, g, or t
  misc_feature (2822)..(2822): n is a, c, g, or t
  misc_feature (2835)..(2835): n is a, c, g, or t
  misc_feature (2837)..(2837): n is a, c, g, or t
  misc_feature (2841)..(2841): n is a, c, g, or t
  misc_feature (2845)..(2845): n is a, c, g, or t
  misc_feature (2849)..(2853): n is a, c, g, or t
  misc_feature (2855)..(2855): n is a, c, g, or t
  misc_feature (2860)..(2860): n is a, c, g, or t
  misc_feature (2867)..(2867): n is a, c, g, or t
  misc_feature (2874)..(2874): n is a, c, g, or t
  misc_feature (2878)..(2878): n is a, c, g, or t
  misc_feature (2881)..(2881): n is a, c, g, or t
  misc_feature (2884)..(2884): n is a, c, g, or t
  misc_feature (2886)..(2886): n is a, c, g, or t
  misc_feature (2890)..(2890): n is a, c, g, or t
  misc_feature (2895)..(2895): n is a, c, g, or t
  misc_feature (2897)..(2897): n is a, c, g, or t
  misc_feature (2900)..(2900): n is a, c, g, or t
  misc_feature (2906)..(2906): n is a, c, g, or t
  misc_feature (2911)..(2911): n is a, c, g, or t
  misc_feature (2913)..(2913): n is a, c, g, or t
  misc_feature (2919)..(2919): n is a, c, g, or t
  misc_feature (2927)..(2927): n is a, c, g, or t
  misc_feature (2930)..(2932): n is a, c, g, or t
  misc_feature (2935)..(2935): n is a, c, g, or t
  misc_feature (2939)..(2940): n is a, c, g, or t
  misc_feature (2942)..(2945): n is a, c, g, or t
  misc_feature (2947)..(2948): n is a, c, g, or t
  misc_feature (2950)..(2950): n is a, c, g, or t
  misc_feature (2952)..(2952): n is a, c, g, or t
  misc_feature (2955)..(2955): n is a, c, g, or t
  misc_feature (2959)..(2959): n is a, c, g, or t
  misc_feature (2961)..(2961): n is a, c, g, or t
  misc_feature (2964)..(2965): n is a, c, g, or t
  misc_feature (2968)..(2968): n is a, c, g, or t
  misc_feature (2971)..(2971): n is a, c, g, or t
  misc_feature (2973)..(2973): n is a, c, g, or t
  misc_feature (2975)..(2976): n is a, c, g, or t
  misc_feature (2978)..(2979): n is a, c, g, or t
  misc_feature (2991)..(2994): n is a, c, g, or t
  misc_feature (2996)..(2996): n is a, c, g, or t
  misc_feature (2998)..(3000): n is a, c, g, or t
  misc_feature (3002)..(3003): n is a, c, g, or t
  misc_feature (3013)..(3013): n is a, c, g, or t
  misc_feature (3015)..(3017): n is a, c, g, or t
  misc_feature (3026)..(3026): n is a, c, g, or t
  misc_feature (3029)..(3029): n is a, c, g, or t
  misc_feature (3036)..(3036): n is a, c, g, or t
  misc_feature (3038)..(3040): n is a, c, g, or t
  misc_feature (3050)..(3052): n is a, c, g, or t
  misc_feature (3055)..(3055): n is a, c, g, or t
  misc_feature (3066)..(3066): n is a, c, g, or t
  misc_feature (3069)..(3070): n is a, c, g, or t
  misc_feature (3075)..(3075): n is a, c, g, or t
  misc_feature (3079)..(3080): n is a, c, g, or t
  misc_feature (3082)..(3082): n is a, c, g, or t
  misc_feature (3090)..(3090): n is a, c, g, or t
  misc_feature (3092)..(3093): n is a, c, g, or t
  misc_feature (3096)..(3096): n is a, c, g, or t
  misc_feature (3098)..(3099): n is a, c, g, or t
  misc_feature (3103)..(3103): n is a, c, g, or t
  misc_feature (3105)..(3105): n is a, c, g, or t
  misc_feature (3107)..(3107): n is a, c, g, or t
  misc_feature (3109)..(3109): n is a, c, g, or t
  misc_feature (3111)..(3113): n is a, c, g, or t
  misc_feature (3117)..(3117): n is a, c, g, or t
  misc_feature (3120)..(3121): n is a, c, g, or t
  misc_feature (3125)..(3125): n is a, c, g, or t
  misc_feature (3139)..(3139): n is a, c, g, or t
  misc_feature (3141)..(3142): n is a, c, g, or t
  misc_feature (3146)..(3146): n is a, c, g, or t
  misc_feature (3148)..(3148): n is a, c, g, or t
  misc_feature (3153)..(3155): n is a, c, g, or t
  misc_feature (3160)..(3160): n is a, c, g, or t
  misc_feature (3163)..(3165): n is a, c, g, or t
  misc_feature (3169)..(3170): n is a, c, g, or t
  misc_feature (3175)..(3175): n is a, c, g, or t
  misc_feature (3178)..(3178): n is a, c, g, or t
  misc_feature (3180)..(3180): n is a, c, g, or t
  misc_feature (3183)..(3183): n is a, c, g, or t
  misc_feature (3196)..(3196): n is a, c, g, or t
  misc_feature (3204)..(3205): n is a, c, g, or t
  misc_feature (3208)..(3208): n is a, c, g, or t
  misc_feature (3216)..(3217): n is a, c, g, or t
  misc_feature (3222)..(3222): n is a, c, g, or t
  misc_feature (3224)..(3224): n is a, c, g, or t
  misc_feature (3227)..(3228): n is a, c, g, or t
  misc_feature (3230)..(3230): n is a, c, g, or t
  misc_feature (3233)..(3233): n is a, c, g, or t
  misc_feature (3245)..(3245): n is a, c, g, or t
  misc_feature (3247)..(3248): n is a, c, g, or t
  misc_feature (3250)..(3250): n is a, c, g, or t
  misc_feature (3252)..(3252): n is a, c, g, or t
  misc_feature (3256)..(3256): n is a, c, g, or t
  misc_feature (3258)..(3259): n is a, c, g, or t
  misc_feature (3262)..(3263): n is a, c, g, or t
  misc_feature (3270)..(3272): n is a, c, g, or t
  misc_feature (3274)..(3275): n is a, c, g, or t
  misc_feature (3277)..(3278): n is a, c, g, or t
  misc_feature (3282)..(3284): n is a, c, g, or t
  misc_feature (3290)..(3291): n is a, c, g, or t
  misc_feature (3298)..(3298): n is a, c, g, or t
  misc_feature (3304)..(3304): n is a, c, g, or t
  misc_feature (3307)..(3307): n is a, c, g, or t
  misc_feature (3309)..(3310): n is a, c, g, or t
  misc_feature (3317)..(3317): n is a, c, g, or t
  misc_feature (3320)..(3320): n is a, c, g, or t
  misc_feature (3327)..(3327): n is a, c, g, or t
  misc_feature (3329)..(3329): n is a, c, g, or t
  misc_feature (3331)..(3331): n is a, c, g, or t
  misc_feature (3337)..(3337): n is a, c, g, or t
  misc_feature (3342)..(3342): n is a, c, g, or t
  misc_feature (3347)..(3347): n is a, c, g, or t
  misc_feature (3352)..(3352): n is a, c, g, or t
  misc_feature (3355)..(3355): n is a, c, g, or t
  misc_feature (3358)..(3358): n is a, c, g, or t
  misc_feature (3363)..(3363): n is a, c, g, or t
  misc_feature (3371)..(3371): n is a, c, g, or t
  misc_feature (3378)..(3379): n is a, c, g, or t
  misc_feature (3381)..(3381): n is a, c, g, or t
  misc_feature (3383)..(3383): n is a, c, g, or t
  misc_feature (3385)..(3385): n is a, c, g, or t
  misc_feature (3389)..(3389): n is a, c, g, or t
  misc_feature (3394)..(3394): n is a, c, g, or t
  misc_feature (3398)..(3399): n is a, c, g, or t
  misc_feature (3405)..(3406): n is a, c, g, or t
  misc_feature (3417)..(3417): n is a, c, g, or t
  misc_feature (3419)..(3419): n is a, c, g, or t
  misc_feature (3425)..(3425): n is a, c, g, or t
  misc_feature (3427)..(3427): n is a, c, g, or t
  misc_feature (3430)..(3432): n is a, c, g, or t
  misc_feature (3434)..(3434): n is a, c, g, or t
  misc_feature (3437)..(3438): n is a, c, g, or t
  misc_feature (3444)..(3444): n is a, c, g, or t
  misc_feature (3455)..(3455): n is a, c, g, or t
  misc_feature (3458)..(3459): n is a, c, g, or t
  misc_feature (3461)..(3461): n is a, c, g, or t
  misc_feature (3463)..(3464): n is a, c, g, or t
  misc_feature (3469)..(3469): n is a, c, g, or t
  misc_feature (3475)..(3475): n is a, c, g, or t
  misc_feature (3477)..(3478): n is a, c, g, or t
  misc_feature (3480)..(3483): n is a, c, g, or t
  misc_feature (3487)..(3487): n is a, c, g, or t
  misc_feature (3495)..(3495): n is a, c, g, or t
  misc_feature (3498)..(3498): n is a, c, g, or t
  misc_feature (3501)..(3502): n is a, c, g, or t
  misc_feature (3505)..(3507): n is a, c, g, or t
  misc_feature (3511)..(3511): n is a, c, g, or t
  misc_feature (3513)..(3514): n is a, c, g, or t
  misc_feature (3529)..(3530): n is a, c, g, or t
  misc_feature (3536)..(3537): n is a, c, g, or t
  misc_feature (3544)..(3544): n is a, c, g, or t
  misc_feature (3553)..(3553): n is a, c, g, or t
  misc_feature (3555)..(3555): n is a, c, g, or t
  misc_feature (3557)..(3557): n is a, c, g, or t
  misc_feature (3563)..(3563): n is a, c, g, or t
  misc_feature (3565)..(3565): n is a, c, g, or t
  misc_feature (3567)..(3567): n is a, c, g, or t
  misc_feature (3575)..(3576): n is a, c, g, or t
  misc_feature (3578)..(3578): n is a, c, g, or t
  misc_feature (3581)..(3581): n is a, c, g, or t
  misc_feature (3588)..(3588): n is a, c, g, or t
  misc_feature (3590)..(3590): n is a, c, g, or t
  misc_feature (3592)..(3593): n is a, c, g, or t
  misc_feature (3595)..(3595): n is a, c, g, or t
  misc_feature (3604)..(3606): n is a, c, g, or t
  misc_feature (3608)..(3608): n is a, c, g, or t
  misc_feature (3614)..(3616): n is a, c, g, or t
  misc_feature (3619)..(3620): n is a, c, g, or t
  misc_feature (3626)..(3627): n is a, c, g, or t
  misc_feature (3629)..(3631): n is a, c, g, or t
  misc_feature (3633)..(3635): n is a, c, g, or t
  misc_feature (3637)..(3637): n is a, c, g, or t
  misc_feature (3640)..(3640): n is a, c, g, or t
  misc_feature (3642)..(3643): n is a, c, g, or t
  misc_feature (3645)..(3649): n is a, c, g, or t
  misc_feature (3652)..(3653): n is a, c, g, or t
  misc_feature (3655)..(3661): n is a, c, g, or t
  misc_feature (3663)..(3668): n is a, c, g, or t
  misc_feature (3670)..(3671): n is a, c, g, or t
  misc_feature (3673)..(3677): n is a, c, g, or t
  misc_feature (3679)..(3680): n is a, c, g, or t
  misc_feature (3683)..(3683): n is a, c, g, or t
  misc_feature (3687)..(3688): n is a, c, g, or t
  misc_feature (3690)..(3692): n is a, c, g, or t
  misc_feature (3695)..(3696): n is a, c, g, or t
  misc_feature (3698)..(3700): n is a, c, g, or t
  misc_feature (3702)..(3702): n is a, c, g, or t
  misc_feature (3705)..(3708): n is a, c, g, or t
  misc_feature (3710)..(3711): n is a, c, g, or t
  misc_feature (3713)..(3713): n is a, c, g, or t
  misc_feature (3715)..(3715): n is a, c, g, or t
  misc_feature (3717)..(3718): n is a, c, g, or t
  misc_feature (3720)..(3720): n is a, c, g, or t
  misc_feature (3722)..(3723): n is a, c, g, or t
  misc_feature (3726)..(3726): n is a, c, g, or t
  misc_feature (3730)..(3732): n is a, c, g, or t
  misc_feature (3734)..(3734): n is a, c, g, or t
  misc_feature (3742)..(3742): n is a, c, g, or t
  misc_feature (3744)..(3746): n is a, c, g, or t
  misc_feature (3749)..(3749): n is a, c, g, or t
  misc_feature (3751)..(3753): n is a, c, g, or t
  misc_feature (3755)..(3758): n is a, c, g, or t
  misc_feature (3760)..(3763): n is a, c, g, or t
  misc_feature (3765)..(3765): n is a, c, g, or t
  misc_feature (3768)..(3769): n is a, c, g, or t
  misc_feature (3772)..(3772): n is a, c, g, or t
  misc_feature (3774)..(3776): n is a, c, g, or t
  misc_feature (3778)..(3778): n is a, c, g, or t
  misc_feature (3782)..(3782): n is a, c, g, or t
  misc_feature (3785)..(3786): n is a, c, g, or t
  misc_feature (3788)..(3789): n is a, c, g, or t
  misc_feature (3792)..(3796): n is a, c, g, or t
  misc_feature (3798)..(3800): n is a, c, g, or t
  misc_feature (3802)..(3802): n is a, c, g, or t
  misc_feature (3807)..(3808): n is a, c, g, or t
  misc_feature (3811)..(3814): n is a, c, g, or t
  misc_feature (3816)..(3819): n is a, c, g, or t
  misc_feature (3821)..(3822): n is a, c, g, or t
  misc_feature (3827)..(3827): n is a, c, g, or t
  misc_feature (3829)..(3833): n is a, c, g, or t
  misc_feature (3835)..(3835): n is a, c, g, or t
  misc_feature (3839)..(3847): n is a, c, g, or t
  misc_feature (3851)..(3852): n is a, c, g, or t
  misc_feature (3856)..(3856): n is a, c, g, or t
  misc_feature (3858)..(3861): n is a, c, g, or t
  misc_feature (3863)..(3863): n is a, c, g, or t
  misc_feature (3866)..(3866): n is a, c, g, or t
  misc_feature (3868)..(3868): n is a, c, g, or t
  misc_feature (3870)..(3872): n is a, c, g, or t
  misc_feature (3874)..(3882): n is a, c, g, or t
  misc_feature (3884)..(3885): n is a, c, g, or t
  misc_feature (3891)..(3894): n is a, c, g, or t
  misc_feature (3896)..(3897): n is a, c, g, or t
  misc_feature (3899)..(3900): n is a, c, g, or t
  misc_feature (3902)..(3903): n is a, c, g, or t
  misc_feature (3905)..(3906): n is a, c, g, or t
  misc_feature (3908)..(3908): n is a, c, g, or t
  misc_feature (3911)..(3915): n is a, c, g, or t
  misc_feature (3918)..(3923): n is a, c, g, or t
  misc_feature (3925)..(3934): n is a, c, g, or t
  misc_feature (3936)..(3940): n is a, c, g, or t
  misc_feature (3942)..(3942): n is a, c, g, or t
  misc_feature (3944)..(3944): n is a, c, g, or t
  misc_feature (3947)..(3947): n is a, c, g, or t
  misc_feature (3950)..(3951): n is a, c, g, or t
  misc_feature (3954)..(3955): n is a, c, g, or t
  misc_feature (3957)..(3958): n is a, c, g, or t
  misc_feature (3961)..(3962): n is a, c, g, or t
  misc_feature (3964)..(3965): n is a, c, g, or t
  misc_feature (3967)..(3971): n is a, c, g, or t
  misc_feature (3973)..(3974): n is a, c, g, or t
  misc_feature (3976)..(3976): n is a, c, g, or t
  misc_feature (3981)..(3989): n is a, c, g, or t
  misc_feature (3992)..(3992): n is a, c, g, or t
  misc_feature (3996)..(3999): n is a, c, g, or t
atcgtataagtctcccacagaagagcttttttcaaaaaggtagcgaacncatttaagtagtcctacagacccctttacgcctccggcctcaccttcttgtaaaaaggagagcgagcctgaggtgcgcgnatcaaattctttttgatatacacccagcaatgcgtaaagcaattccacgtcaacagcttgaattgacgaggttattgatgcagctttctcatactgctgctcaagaagcagcagctgaagggcatacttaaaatttccttgcaaagctaaatcaattgcgcgtttatgtagagcaattttcttctctancggacccagctcaaggtcttcnttcaaaggtggcagaggcttttgcaaaatcaacttcagtaaantcatatatgccgtttgcttaagaaatccgttaaatgaagtgagattnttgantgccctatcagcatctttagtattcatcggccccttagcantagacagcgaatccaccattcccttagcagcttttttacttgagttatcgagcgtacagtcagaatgcgtggcagtaagtgcnttatctaccagctcaatatatccagcatctgcaaattccgctgcatgagaaagaacaatttcccagataatctcttctctaaccagtgagctcacaaacgcagccttagagaaatcttctctatcgatnagcagggctatagctttcagaacaagcttttcatgcttactcgctagagccacaagctcctgtttattaaagttcaacacatcaaatcttgtagcatgaatacacgagaaacgcctagtttctacatgcacgccaaagaaaggngcatcttgctctatcttggccaaatactcaagatcaacttgtccgcatatacggctcaaatcatcaaatgagccaacaccgagcaacatcatgcccagcctgagcctaagttcctcaatgcctagcgagcttctgagcatatacgatgcaacgcaagcaagactagttagatacgtaattggaacatccgcatctccatgctcgcaaaatgtaactggcaaagantaaacaagcgttggaataccgcgngtcaatctcatattagtcaaaattgattgttcagaattatctattccaggcataaacgtgagcagctcattcttncccaaaacatacacgctagggacttcgtcgattaactgacgagcttcaggagataaagaaatcgcaacaagacagccagccatncgaagncgcgcaattgatttaacctggcgagnaacaaaatactcgtcagacggaggaaaatcatcaataagaactaaccttttaaccgcctttgatttcttngcattgcagatagaagtncttttcttagtaagaatctgagttgcctctttagccgacanactngaaagagagatttcntacacagtccatccgtgtgactgcgcataatccgccaactcacgcaaaaacatngtcttncccatgcagggctctgcacaaagcgcgagcggcctattggtcttttccattgttctgaggaagtgctgaggtggnactaccctgctatagtcacccatcacatggcgagaagacccaccgagcagcgactctgttccagcagtttctctgttttctgactccataaaacctctccttactgttcaaacactcaagcgctacatgcgctctaacatttcttgtctcaaaatttggtgtgggataaataatcaagccaaatttgtcagaaagtgagaaggtttaggtgaacggtaggtgaaatatggtcagattcgtgacagattagtaacaaaatacacacagaaatgcacaaatgttaaaacaagataacatcaaatggtaaaaattatcttccgtgaacggcatttaattaagaaaattatgtaaatattgtgatacacaataaatatataatacgtaataaatatggatttttagtaaaaatttttatgctattttcgaatattntctaccaaaaaaagaggaccccacaaaagtgagatcctctcgacataaaaatgccccttgttggtcagcgacgtcctgctctcccacggacttactccgcagtaccatcggcgctcgggggcttaacttctgggttcggaatgggaccaggtgtgcctcccctgccatggtcgctgaccaacaaggggtattcttgtttcatgagggttttctcacgtgccctgagggccgcacagtgtgacgttaaattcaaaggcttcaaaaatcacgcatcagttcaaaatatattaaagaaaagaagagctcgaccgattagtaatgctcgactgaatgccttacagcacttacatctgcatcctatcaacctcgtagtctacaaggggtcttaccgaaaggaaaactcatcttgggatgggcttcccgcttagatgctttcagcggttatcccgaccggactcagctaccgggcaatgctattggttaacaacccgtacaccggaggtccgtccaccccggtcctctcgtactaggggcagcctccctcaattttcctacgcccacagaggatagggaccgaactgtctcacgacgttctgaacccagctcgcgtaccgctttaaatggcgaacagccatacccttgggacctgctccagccccnnnatgngnngagccgacatcnangtgncaaaccttcccgncnnngtggactcttggggnagatcngnntgtnanccccnnnnnnccntttgtncnttgngnganggncanaccnntctnngccgnnggatcnntngnncctggnnncccnncnnctcnncttgtaggccncgcantcaagcctgcttntnctcntgcnctcnnnnngntggtngccgacnatcctgngcanacnttncntgcncctcngntanattttnggagncnaccgcnccagtcanacnnnccncctnncnnnntnntnangcngganancgnncgnaantnannannccagaacgtcgnnnntngnnntnnaagggtgacncnnnagagactgncgnccctggntnnnagtctcccannnatnctctacacganganncggcngccnntntcaagctncnntanannttcncngngncnnnccgnccnnctgngggtaagtcgcatntnnacgncnagtgnnntttcnccnnntctnnggttnagncngcntccaaatcgttangcctttcnngcnggtcggannttacncnacnngnaanttcgctaccttngnncngntatngnnacnnccgccgnnnanngnngctnnnattcgnngcttcgntaatgntancnnctcctcntgnccttccngnancgggcnggcgncagancctanacntcntcttncgacttcngcagagnncngngntttngatanacanncgcttnnacctatttacngngaccgntnttnnntnggnnagtaantcccttcaccnaanncngnnccccntctccngnngnnnngggncaattttnccnagnnccnnnaccntnnttctcccgatcgccnnggtatnntctaccnacccacctntntnggtttncngnacgggctnntnagngctcccnananntntttcttggnnntntgggcnnnctnncttcanncnnntnnntngtncnncnnnnnagnnannnnnnnannnnnntnncnnnnntnntcngccnncnnnccnncnnngngannnncnnancncnncntnnctncccnnntncgtcaccncnnnggngnnnannnncnnnngnagnnacngnnntntctnccnntnntgnnnnnannncnctttnnggnnnngnnnnanntcccncnnnnncntggnnnnnnnnncctnncccngnnnncnttngntnnncnnnnnnnnngnnttttannnntnncnngnnanncntgnnnnnatnnnnnntnnnnnnnnnncnnnnntngnttntcnnacnncnncanncnntnnnnnanncnctccnnnnnnnnntanaaannnnt

SEQ ID NO: 708 - DNA, 4000 bp, Escherichia coli
  misc_feature (234)..(234): n is a, c, g, or t
  misc_feature (243)..(243): n is a, c, g, or t
  misc_feature (792)..(792): n is a, c, g, or t
  misc_feature (1220)..(1220): n is a, c, g, or t
  misc_feature (1771)..(1771): n is a, c, g, or t
  misc_feature (1941)..(1941): n is a, c, g, or t
  misc_feature (1992)..(1992): n is a, c, g, or t
  misc_feature (1994)..(1994): n is a, c, g, or t
  misc_feature (2024)..(2024): n is a, c, g, or t
ccaatcattccttttggtgttgggtcttcattcgaagggcatcttaacgctccatatggtggaatttcaatcgatatgaataatatgaataaaatactaaatgtttacccagaagaccttctagttgttgttcaaccgggtgtgacaagggagcaacttaatactcatttaagggatacaggtttatttttcccaatagatccaggagctaatgcttcaattggaggaatgacngcaactagngcatccggaacaaatgcagtgagatatggtactatgaaagataacgtggtagctcttgaagttgttactccagatggtcaaatcataaaaactgctaataaagcaaggaaaagctctgctggatatgatttaactcgtctaatggttggttccgaaggtactttaggtataacaacagaaatcacacttaaactatatggtatcccagaagttatagcaggtggaagggtaagttttccttctgtgaaagatgcaacagacactgttataacaactatacaggctggaatacctgtggccagaattgagtttatggatcttgctcaagtaaaagcggttaataactattcgaaaacaaacttgccagaagctccattgttgttggtagagtttcatggaagtgagtcgtctgtaaaagaacagtcagaattgtttggagagattgcttctgattttggaggtattgattttgagtggacgtcaaataatgaagaaagaaataaattatggaaagctcgtcatgatgcatactggtcatgtagagctgtnaggccagacgcctcattatattctactgacgtttgtgtgcctatttcaaaattgtcagattgtatttctgaaactgttgaagacatggaaaaaaataaattaattggtccaatagtaagccatgcaggtgatggaaatttccatgttgctttactgattgataaaaataataaaaatgagttagaaaagttagatagttttttagtcagaatatcagaacgagccattagaatggatggcacttgcacaggagaacatggagtagggcagggcaaaagaaaatatatgttaaaagagttgggtaatgctgttgatattatgaaaaaagttaaaaatgcatttgacccggataaaatcatgaaccctggcaaactttttttataatattgtcatttaatcttacatggtataattaccatataatctgntaaatgttttaatctaaggtatagagactcctctataattttaaatgatcacatacataattattagtttcctaatgatggtaacacctggtccaggtgttttatccttggcaggtgttggtgctggctttggatggcgtattggaattatgtacctaattggcttatttttgggaacaaatggggttgctctttttgtggttcttggatttaaaaagtttttatttgaaatagatggagttgagctaacttttttatttttatcattatcctacttgtcatttttatcttggagaatagctacttcggataataaaactggttttaagcaaagcttaaaggcaccaagactatatgaaggaatactgttacaatttataaatcccaaagcctatgttgttcaaggtcatttattcatagttttatctttgggtatttcatcttatgaattagaaattattactaaatttatcattgtcaattctatatggatacctattcattttttttggttatggctaggcataagtttaaaaaaatggtctttagcntctaataagcaactatgggttaatagaggtatggggcttgcacttttcgcagtcgtgatattgtcaggtataatggaattaaattcaaaaatataaatgattattttttaatcataataaaattttaaaaaaaataacgcttaaaaaataatcatatttagaattctaanaaacgtatctaacttacaagaagaacttttagagttgattccctataatgnanttgtaaataaactcccccagtttactacanaaataaactaatatattcctccctaatattggttttaataggtgcagaggatctccttaaaatcctcaccaattaataagttgctcttccacctgaaatatcaaaaacacctgctgtggtaaaactattttctctacttgccaagaaagctataagtgaagctacctcttcaacagtaacaaacctatttctaggaattttagaaatcatataatcaataaattcttgtgatacttgatccaaaatcctagtttttgctgtggctggagtaatacaatttactgctatatcttgatcagcagtttctttgcctaaagatttagttaaacctattactgctgcttttgaagcagaatacgcaggagcattagggttaccttctttaccagctatggaagctatatttataattctgccataacctctatctctcatttttttaacgacatatttattacaataaaaaacaccattaacatttacgttgaaaactcttgaccattcatctactgggtagtcccatgttgaaaaagttgggcctgcaatacctgcgctacatactaaaatatctattttatcaattttatttatagttttttcagtagcttcttcgactgctttattgtctgtttggtcgactttcaaaaaatgacaatttaattctctagccgcatttaatcctaatttttcatcaatatcccaaatcataacctcacaaccatcatcaataagtcttttggcagtggcatagccaattccttgagcaccaccagtaattaccgcagtttgtccatcaaaattagtcataaattttcccctatattttttgataattatggatttatttaaaaataaataatcatagatattattatttatattttatattgttaattaattcattgctagaaaaaactaagttatagggagtaatttcatggaggtagtacacattataattattggaattctttcttgtgttgcaatggatttgtggcaaagaatcctaaaaatcatatttcaaataaatccatctgattgggcagttgttggcagatggttcgttttattaataacttcgggcaagctttataatccaaacatagactccgaacaatcaattaaaaatgagttgcctattggttggattgttcattattctgtggcaatactatattcattagttttttttatattttataaatttcaaattttgaatgcatcatatcttgatggaattgtttttggtttaatcagtgttattgtaccatggtttttctttatgcctatacttggtaaaggctttttagcaacaaaaaccccatcaccacttatggcttgttcattggcaataggcagccactttgttataggtttatctataggctcattttttcaaatttttggttactaaatattttagggaaaatttaagtatgtccgagagtaaattaagagaaagtatatgtttttttgcttcctccttatttgaaaggggggttactcatggatcaacaggaaatatatctgttaggttaaatgataacgagattctagttacaccatctggttcatcttttggtagattggatcctaatgaaatagttaagataacaaaatccggagaatttgaaggacctttaccaccgacaaaagaattgccactccataaggcattttacgaaacgagaggcttaaagtcaggtgcagtagtccatttacattccactcattcagtagctttatcaatgataccagggattgacgaagacaatgttttacctgcttatacaccttattcgataatgttattaggaaaagtaaaattgcttcctttttttattcccggtgatcccgctatgggagatgcaattaggggcttggtaggtaagagatcagctgttcttttagctaatcatggtccagtagtatcaggtaaagatcttgaggcatcggttaatgccattgaagaatta

SEQ ID NO: 709 - DNA, 4000 bp, Escherichia coli
  misc_feature (90)..(90): n is a, c, g, or t
  misc_feature (115)..(115): n is a, c, g, or t
  misc_feature (1490)..(1490): n is a, c, g, or t
  misc_feature (1982)..(1982): n is a, c, g, or t
  misc_feature (1985)..(1985): n is a, c, g, or t
  misc_feature (1988)..(1988): n is a, c, g, or t
  misc_feature (1997)..(1997): n is a, c, g, or t
  misc_feature (3016)..(3016): n is a, c, g, or t
  misc_feature (3643)..(3643): n is a, c, g, or t
  misc_feature (3901)..(3901): n is a, c, g, or t
gcaggaaattcattacttactttagcattcgaaattttgagtagtaaagatattaatctaaatgaaaaaataaaaaataatttgataaanaaaatatcagaatgctctggacatntaggcatagctggtggtcaatttttagatttgagttttgaacataagaaagtttctaaaaaacaaataattgatatggaaatcaaaaaaactggtaagctttttagtttttgttgttcagcaccgctgattattaaaaataaaaagacaatagaaatcaaatcatttgaaaaaattggatcagatataggtttattgtttcaggttgctgatgatttaattgattataaaggttcatctaaaatagccggaaaaaaaaccagaaaagacgagaaacaaggaaaagctactcttataagtttgatgggttactataatgctgttaaatatgccgaaaaaataagctttaatttaaaaaaaagtataaaaaaatatggatctaaatcagaaaatttaaaacaaaccattgattatatattgtatcgagataaatgaataataattacaagtttttaaaccaaatcaattttcctgtagaccttaaaaaaatatctgaagcagatttggtaactgttgcagacgaattgagacaggaaacaatcaatgctgtatctgaaactggtggtcatttaggtgcaagcttaggagttgttgaattaacggtagctctgcattacgtatttaataccccaaaagataaattgatttgggacgtaggtcaccaatcttatcctcacaaaattttaactggtagaaaagacaaaattagaaccttaagacaaggtgggggtatttctggttttaccaaaaggcaagaaagtgaatatgatccatttggggcagcacacagttcaacatcaatatcttctgcattaggtatggcagaggccaacaaactttcaaacaaacaagacaatgttgtagctgtaattggtgatggagcaattagtgctggtatggcttatgaagctatgaataatgcaggtgcttcaaaaactaaaatgatcgtaattcttaatgataacgatatgtctattgcaagacctgttggtgcaatgagtacttatttagcaaaaatattttctggcaaagtatattttagtttaagagaaacaataaagttaattacttcagctttttcaaaaagatttagctcaaaagcaggaaaagcagaggacttattaagatctgctttcacaggtggtacattgtttagctcacttggattctattatctaggcccaattgatggtcatgatttatcttctttagttccaatacttaaaaatgcaaaagattctaaacatcaaggtccaatcttaattcatataaaaactaaaaaggggaaaggttattcttatgctgaggaagcaaaagatcactaccatggtgtcactaaatttaatattcaaacaggcgaacaagttaaaagtgcnagtagtttaccttcttatacaaaagtatttgcaaatacgcttgttgaacatgctaaaaaagatagtaaaattgtagctatcactgccgcaatgccagatggaactggtcttgatgtttttgcaaaagaatttcctgagagaacatttgacgttggaatagcagagcaacacgcagtaacatttgcagcaggattagcaacagaaaattttaaaccttatgcagcaatttattcaacattcttacaaagagcgtatgatcaagttgtgcatgatgtggctattcaaagtttacctgtaagatttgcaattgatcgagctggattggtaggtgctgacggacctacacatgcaggtagttttgatattacttatcttgcaagtcttcctaattttgttgtgatggctgcaagtaatgaagcagaactagtaaaaatgattaatacttcagttgatattaatgataagccttgcgcttttagatatccaagaggnacnggnataggtgtngaattaccaccaataactgaaaagcttataattggaaaaggaaatataattcaagaaggaaaaaaacttgctattttaaattttggagcaagattgaaagagacaatggttgcgtctgaaaatttaaaaaagaaaggtgtcaatgttactattgtagatgctaggtttgctaaacctttagatgaaaatttaatatggcaattagctacaactcatgaggcaatccttaccatagaagaggggtcgattggaggctttgggtctcacgttgtagattttttatcaagaaaaagtttgttggataatggattaaaatttagatccatgtttttacctgattattttatagatcaagataatccagagaaaatgtataaaagtgctgggttggatgcaaagtcaattgaggaaaaagtgttagatttactgaactcaaatataattttacaaaaacaaaaaaattaaattattgacactgcgctttatgcattaggtagtgatcaagtaatacacaacttaacattgcttctcctactggaactgctctaatacccacgcaaggatcgtgtcttccttttacagatatagttgtgttttttccaaatttatcaattgtttttctagattttaaaattgatgatgttggtttgaccgcaaaagatacaattatatcctgacctgaagaaattccgccaaggattcccccagcattatttgagttaaattttagttttttatttttttgaaatatttcatctgaattttcctcaccagataattttgcagaattcattccacttccaatatttactccttttacagcattgatgctcatcatcgcagaagcaatatccatgtctaacttagaatatatcggagcacctaatcctgcgggtataccttttgctctaacttcaattatggctccacaagatgagcctgattttcttatatctaataaatatttttcccataattttaacatagatttatctgggcaaaaaaatggattattattnataattttttcgttccatttgctagtgtcacatcctaaaatacctaactgtgtaactgcacctaaaattttgaaatttcttcctaatttactttgtaaaactttatttgctatcgcccctgcagctactcttgcagctgtttcccttgcagatgaacgaccaccacctcggtagtctctgatcccatactttttaaaataagtaaaatcagcatgtccaggtcgaaatttattcttaatattcccataatcttttgagcgcatatcttcattgtaaatgataagagatatcggagttccagtagttttcccctcaaacacgcctgataaaatttgtactttatcactttcttttctttgagtggtaaattttgattgtccaggtttcctcttatccaaaaatttttgaatatctttttcatctaaacttattaaaggtggacaaccatcaattatgcaaccaattgcaggtccatgggactctccccaggtagtgaaacgaaataactttccaaaagtattaaatgacattatttatattgtatagattattttgttaaaattatgaatcaaaaaaactcacttggattgaatttatgttttatggatcttgatgatcctatagaantatttgacaaatggtatgatgaagcaaaaaaatcagaaataaatgatccaaatgcgattgcattagctacatcgaatataaataacattccatcagttagaatggtattaatgaaagaatttaatgaaaaaggatttgttttctatacaaatttaaacagtcaaaaaagtagagagataaaagaaaaccccaatgcttcaatgtgctttcattggaaaagtctcttaagacaggtaagaattaatggtgctattgagnctgtaaaagatcaacaggcagatcaatattataattcaagaggctatgaaagtagaataggtgcctgggcctctaaacaaagcacagtcttaaataata

SEQ ID NO: 710 - DNA, 4000 bp, Escherichia coli
  misc_feature (1984)..(1984): n is a, c, g, or t
  misc_feature (1986)..(1987): n is a, c, g, or t
  misc_feature (1990)..(1990): n is a, c, g, or t
  misc_feature (1995)..(1996): n is a, c, g, or t
  misc_feature (1998)..(1998): n is a, c, g, or t
  misc_feature (2004)..(2005): n is a, c, g, or t
  misc_feature (2011)..(2011): n is a, c, g, or t
  misc_feature (2013)..(2014): n is a, c, g, or t
  misc_feature (2020)..(2020): n is a, c, g, or t
  misc_feature (2034)..(2035): n is a, c, g, or t
  misc_feature (2043)..(2044): n is a, c, g, or t
  misc_feature (2046)..(2046): n is a, c, g, or t
  misc_feature (2049)..(2050): n is a, c, g, or t
  misc_feature (2067)..(2068): n is a, c, g, or t
  misc_feature (2077)..(2077): n is a, c, g, or t
tcctgacacaagaccggcatattttccaaatccccgccgaagcttttgaaccgcccatccggatggactaccggccgcggcggggcccgacgctttttgcccctttgccggggacaggattttgtccgggtcagccggcgggcatccgctccgccttctgagctgggggcagggcaagccggaaacccaggttgttgttgcggttgtccgggttgttcctgttgcgattcgccgcgcgcgtgttggcggcattgttgttccaactgccgccgcgattgacgcggttggaaccggaagacggcccctcaggacaaaaccccaaaacgggaaataacattccttcgaaaaccatcgctatcggcaaaacgcgtgaattcaagcaaagaatccatatgccggacaagttcatccacggaccattcgccattcatttgtttgccttcataaagtctgaacttattgacaaatcttcttttactgcgtggtgacagcagaatcttttgcggaaacactctgtatccaagaaagggaattcccctggcacagcggttcatctgaatatccggtttaaccgtaagcgacagacgcgcttgcaggaaatccttgattgccggcaattccacatgcatcaatttgtcccggtcatcatcgaaaatcagaaaatcatccatgtaccggacatagccgcggacctttcgctcttccttaatccagtgatcgaaaacggacaggtaaaaattggccaaatgctgcgaaatcagattgccgatgggcaatcctttgcccgtttcaacttcataggaggacataatcttctcgaaaagcaaaagaatgtctttttcacggaagcgacgcgccagcgccccaagcaaaatcgcgtgatcaatggaatcaaaatacttccggacatccagtttgagaaaccaatcgaaacgcccggcaaattcctgcgctcgcagaatagctttctgtccgccctttcctttccggcaggcataggaatcgtaaatggcataggattccagaaccggctcgcagatattcatgatcgcgtgatggagaactcgctcgggaaaggaagccgcgcaaatcagccttttcttgggatcataaacctgaaaatagcggtaatgtccgatatcaggatttctgtcttccagctggccgtgaatcttctcgatgttttcctcaaagtttttcctgaaatcgatcacatcgcggcgcgcctgtttcccccgggcggccttgagaaaggccagtcggatattatcccgatccgctatttgacggtagagatcacccgcgctcatcatgcctgcgcccctgtgtcggcgttcttctccatgccgacgattttaagaatcgcatcgccgtatttaccggcgcggctttcacccacgccgtcgatggttttgagatcggcaagcgtggcgattcgcttttgggcaatagccgccagttgttcgttggtgagaatggtgtagacgggaactgcttccagcgtggcggcctgcttgcgccaatcgcgcagtttgacgaaaagcgcaaaatcttccggggacaggatttcacggtaatcggtcttgttgcggttttcgcccttcttgaattccttttcgcccgcctgcggcagatattcgacggccagacaccacagggaattttcaccctgattgacgaattctttatgaatcgtcagcgcccgcaccgatcttagaaacgtgtttaacgccgtttccgcctcatcgcagtgcgctatgggaatctgaaaaaacttgaattgaacggccataataaaaaatccagtgattgtttccgctcaacattaataaacagtgcgtgcctttaggctcgctgaattaagccgtctgcccgcagcatctctgccgaatcaggccggctccgctgcggcctgcttgcgacagagatgctgaacctgcccggctcactgacctgggggcagggcaagccggaaacccaggtngnngtngcggnngnccgggnngtaccngnngcgatncgccgcgcgcgcgnnggcggcanngntgnnccaactgccgccgcganngacgcggtnggaaccggaagacggccccccaggattatccctgccgctgctactgtaataattcctaccataccaatcctgacaccattcccagacattgccgctcatatcgtgcagtcccagaccattcggccgcttctgccccacggggtgcgtctgtccaccggaattggcatcataccaggcataatcgcccaaagatgatccatcgctcgtcccggaccacttctccctcttgccgccgcttcttgccgcatactcccactcggcctccgtgggcaggcgataccgctttccgctctgattgttgagtttccgtatgaattcctgaacatcacgccaggaaacattttccaccgggcagttgtcgccgcaactgctgaaatgggatggattgcttcccatgattctttgccactgtccctgcgtgacttcgtatttgccgatgtagaaatcatccacgcagacttcatgaaccggcttttcgtccctatcaccacccccgaaggtgtcgcccatctgataacagccgcctttgacgaagacaaacgacatgccggtcgtaacatcggtaaaagcgtccccgcccgtcgtcagttcccaatccaccgcgccgcgaaaaccgcgagggaaatcctgcaggatgttccagcttatgcgtttgccgcgccccgtccggaccttgcccacgtcgccctcgacgtgcaggtcggaggatttgtaggttttgccttccacggtaatggtcaggttgacgtccgcctcccgctccttcccctccagatcgtagctgatcaccaggcggttcccctcctgccgcgcccgctcgtttttgagttccgccgcaaaaatggtggcgggaacgaaaaagacaatcaaaaacattagaataaacggtcgtttcatcggtttcctcattcttttccgggcctgaaagcccggaccgcgttttctatcgcgcgacgacttcatagggcagaatgacatcttcacactggtcaatgatttccgagagccttgcgaaaaattcgctcacggggacggcctcacccggcgtaaagcgtttcaggacatcgattttcgacgcttcatcccatgcgacaaccaaaacagcctcggcatctcttgggtggccgggcagcgtctgcatctccagctccactttggcgtctcttgcgggaaagacaagggtcttccccggggcaagatggttttccttctcgtaggcattgggaaacaggagcgccgcggtgtcatcggccatgatgttgaacagcgcgactccggccgcgctttttgttttgaccgttgcttttgccttctcgccggcgcggaaaacggcattgttgagatgggcggcgagccccagggtttttgctttccgtttgggaatatagacgtccgcgacgattttgacccgatattccgggatgggcgctgtggatgggtccttctgatactgccccaggggcagccaggtgactttctcggcgatgacaaagccgcgtgaatacgttttgatgaaatcggcggcaagggtgaaattggtcaccagcgtggcggcggttacggaaacacccgccgcctgctcgatggccgccgcccttgcccgctgcagggccgtcagttgcgactgctcggcgctcatgccgacgatggcgcaggcgccttcggcctcaatgccttttttgatctcgccgctgcgttcggggttttgcccggcgacgaccaaaacgggcgtgaccagcatcgccgtcaggatcagaaaaaatatgaagcgcctgttttccctcattttcaacctcaatattttcaacctccatccgtctcgtgaaccctgcatagctttgacggacgtaaaaaagcgtcgccgccgtcaccctgagcccgtcgaagggtgaacgtaaatattcgatatcacgccatgcttcg

SEQ ID NO: 711 - DNA, 4000 bp, Escherichia coli
  misc_feature (421)..(422): n is a, c, g, or t
  misc_feature (426)..(426): n is a, c, g, or t
  misc_feature (428)..(429): n is a, c, g, or t
  misc_feature (431)..(431): n is a, c, g, or t
  misc_feature (433)..(434): n is a, c, g, or t
  misc_feature (436)..(436): n is a, c, g, or t
  misc_feature (439)..(439): n is a, c, g, or t
  misc_feature (442)..(446): n is a, c, g, or t
  misc_feature (448)..(448): n is a, c, g, or t
  misc_feature (450)..(453): n is a, c, g, or t
  misc_feature (455)..(455): n is a, c, g, or t
  misc_feature (457)..(459): n is a, c, g, or t
  misc_feature (464)..(469): n is a, c, g, or t
  misc_feature (471)..(474): n is a, c, g, or t
  misc_feature (476)..(482): n is a, c, g, or t
  misc_feature (485)..(485): n is a, c, g, or t
  misc_feature (489)..(489): n is a, c, g, or t
  misc_feature (491)..(492): n is a, c, g, or t
  misc_feature (494)..(494): n is a, c, g, or t
  misc_feature (496)..(496): n is a, c, g, or t
  misc_feature (499)..(499): n is a, c, g, or t
  misc_feature (501)..(501): n is a, c, g, or t
  misc_feature (504)..(505): n is a, c, g, or t
  misc_feature (507)..(507): n is a, c, g, or t
  misc_feature (510)..(512): n is a, c, g, or t
  misc_feature (514)..(514): n is a, c, g, or t
  misc_feature (516)..(516): n is a, c, g, or t
  misc_feature (521)..(522): n is a, c, g, or t
  misc_feature (524)..(524): n is a, c, g, or t
  misc_feature (527)..(531): n is a, c, g, or t
  misc_feature (533)..(534): n is a, c, g, or t
  misc_feature (538)..(542): n is a, c, g, or t
  misc_feature (544)..(544): n is a, c, g, or t
  misc_feature (546)..(552): n is a, c, g, or t
  misc_feature (556)..(556): n is a, c, g, or t
  misc_feature (558)..(558): n is a, c, g, or t
  misc_feature (560)..(560): n is a, c, g, or t
  misc_feature (563)..(564): n is a, c, g, or t
  misc_feature (566)..(566): n is a, c, g, or t
  misc_feature (568)..(568): n is a, c, g, or t
  misc_feature (572)..(574): n is a, c, g, or t
  misc_feature (576)..(576): n is a, c, g, or t
  misc_feature (579)..(586): n is a, c, g, or t
  misc_feature (588)..(588): n is a, c, g, or t
  misc_feature (592)..(595): n is a, c, g, or t
  misc_feature (597)..(598): n is a, c, g, or t
  misc_feature (602)..(602): n is a, c, g, or t
  misc_feature (604)..(605): n is a, c, g, or t
  misc_feature (608)..(608): n is a, c, g, or t
  misc_feature (610)..(616): n is a, c, g, or t
  misc_feature (618)..(618): n is a, c, g, or t
  misc_feature (620)..(630): n is a, c, g, or t
  misc_feature (634)..(634): n is a, c, g, or t
  misc_feature (638)..(640): n is a, c, g, or t
  misc_feature (642)..(642): n is a, c, g, or t
  misc_feature (644)..(644): n is a, c, g, or t
  misc_feature (646)..(648): n is a, c, g, or t
  misc_feature (650)..(654): n is a, c, g, or t
  misc_feature (657)..(661): n is a, c, g, or t
  misc_feature (663)..(664): n is a, c, g, or t
  misc_feature (666)..(668): n is a, c, g, or t
  misc_feature (670)..(673): n is a, c, g, or t
  misc_feature (675)..(676): n is a, c, g, or t
  misc_feature (679)..(681): n is a, c, g, or t
  misc_feature (685)..(686): n is a, c, g, or t
  misc_feature (688)..(689): n is a, c, g, or t
  misc_feature (701)..(705): n is a, c, g, or t
  misc_feature (710)..(714): n is a, c, g, or t
  misc_feature (717)..(717): n is a, c, g, or t
  misc_feature (720)..(720): n is a, c, g, or t
  misc_feature (723)..(724): n is a, c, g, or t
  misc_feature (727)..(728): n is a, c, g, or t
  misc_feature (734)..(734): n is a, c, g, or t
  misc_feature (736)..(737): n is a, c, g, or t
  misc_feature (740)..(744): n is a, c, g, or t
  misc_feature (748)..(748): n is a, c, g, or t
  misc_feature (750)..(751): n is a, c, g, or t
  misc_feature (754)..(755): n is a, c, g, or t
  misc_feature (757)..(760): n is a, c, g, or t
  misc_feature (763)..(763): n is a, c, g, or t
  misc_feature (765)..(767): n is a, c, g, or t
  misc_feature (769)..(771): n is a, c, g, or t
  misc_feature (773)..(773): n is a, c, g, or t
  misc_feature (776)..(778): n is a, c, g, or t
  misc_feature (780)..(781): n is a, c, g, or t
  misc_feature (787)..(787): n is a, c, g, or t
  misc_feature (789)..(790): n is a, c, g, or t
  misc_feature (792)..(794): n is a, c, g, or t
  misc_feature (797)..(797): n is a, c, g, or t
  misc_feature (799)..(801): n is a, c, g, or t
  misc_feature (803)..(806): n is a, c, g, or t
  misc_feature (808)..(808): n is a, c, g, or t
  misc_feature (813)..(814): n is a, c, g, or t
  misc_feature (816)..(816): n is a, c, g, or t
  misc_feature (818)..(821): n is a, c, g, or t
  misc_feature (824)..(828): n is a, c, g, or t
  misc_feature (831)..(831): n is a, c, g, or t
  misc_feature (835)..(835): n is a, c, g, or t
  misc_feature (838)..(838): n is a, c, g, or t
  misc_feature (840)..(841): n is a, c, g, or t
  misc_feature (845)..(845): n is a, c, g, or t
  misc_feature (847)..(848): n is a, c, g, or t
  misc_feature (850)..(852): n is a, c, g, or t
  misc_feature (856)..(859): n is a, c, g, or t
  misc_feature (862)..(863): n is a, c, g, or t
  misc_feature (868)..(868): n is a, c, g, or t
  misc_feature (870)..(873): n is a, c, g, or t
  misc_feature (876)..(876): n is a, c, g, or t
  misc_feature (878)..(878): n is a, c, g, or t
  misc_feature (885)..(887): n is a, c, g, or t
  misc_feature (889)..(889): n is a, c, g, or t
  misc_feature (891)..(893): n is a, c, g, or t
  misc_feature (895)..(896): n is a, c, g, or t
  misc_feature (904)..(905): n is a, c, g, or t
  misc_feature (907)..(908): n is a, c, g, or t
  misc_feature (911)..(911): n is a, c, g, or t
  misc_feature (914)..(914): n is a, c, g, or t
  misc_feature (916)..(916): n is a, c, g, or t
  misc_feature (918)..(918): n is a, c, g, or t
  misc_feature (922)..(922): n is a, c, g, or t
  misc_feature (925)..(925): n is a, c, g, or t
  misc_feature (928)..(929): n is a, c, g, or t
  misc_feature (932)..(934): n is a, c, g, or t
  misc_feature (942)..(942): n is a, c, g, or t
  misc_feature (945)..(947): n is a, c, g, or t
  misc_feature (951)..(951): n is a, c, g, or t
  misc_feature (955)..(955): n is a, c, g, or t
  misc_feature (959)..(960): n is a, c, g, or t
  misc_feature (964)..(964): n is a, c, g, or t
  misc_feature (966)..(966): n is a, c, g, or t
  misc_feature (968)..(970): n is a, c, g, or t
  misc_feature (974)..(974): n is a, c, g, or t
  misc_feature (980)..(980): n is a, c, g, or t
  misc_feature (984)..(985): n is a, c, g, or t
  misc_feature (989)..(989): n is a, c, g, or t
  misc_feature (992)..(992): n is a, c, g, or t
  misc_feature (994)..(995): n is a, c, g, or t
  misc_feature (999)..(1006): n is a, c, g, or t
  misc_feature (1009)..(1010): n is a, c, g, or t
  misc_feature (1013)..(1015): n is a, c, g, or t
  misc_feature (1017)..(1017): n is a, c, g, or t
  misc_feature (1019)..(1021): n is a, c, g, or t
  misc_feature (1024)..(1024): n is a, c, g, or t
  misc_feature (1027)..(1032): n is a, c, g, or t
  misc_feature (1035)..(1035): n is a, c, g, or t
  misc_feature (1037)..(1037): n is a, c, g, or t
  misc_feature (1039)..(1040): n is a, c, g, or t
  misc_feature (1044)..(1048): n is a, c, g, or t
  misc_feature (1050)..(1062): n is a, c, g, or t
  misc_feature (1064)..(1064): n is a, c, g, or t
  misc_feature (1066)..(1070): n is a, c, g, or t
  misc_feature (1072)..(1072): n is a, c, g, or t
  misc_feature (1074)..(1074): n is a, c, g, or t
  misc_feature (1077)..(1084): n is a, c, g, or t
  misc_feature (1086)..(1086): n is a, c, g, or t
  misc_feature (1088)..(1088): n is a, c, g, or t
  misc_feature (1090)..(1092): n is a, c, g, or t
  misc_feature (1095)..(1095): n is a, c, g, or t
  misc_feature (1097)..(1100): n is a, c, g, or t
  misc_feature (1103)..(1103): n is a, c, g, or t
  misc_feature (1105)..(1106): n is a, c, g, or t
  misc_feature (1120)..(1121): n is a, c, g, or t
  misc_feature (1123)..(1123): n is a, c, g, or t
  misc_feature (1126)..(1126): n is a, c, g, or t
  misc_feature (1128)..(1130): n is a, c, g, or t
  misc_feature (1132)..(1132): n is a, c, g, or t
  misc_feature (1135)..(1135): n is a, c, g, or t
  misc_feature (1147)..(1147): n is a, c, g, or t
  misc_feature (1329)..(1329): n is a, c, g, or t
  misc_feature (1333)..(1333): n is a, c, g, or t
  misc_feature (1336)..(1336): n is a, c, g, or t
  misc_feature (1377)..(1377): n is a, c, g, or t
  misc_feature (1823)..(1823): n is a, c, g, or t
  misc_feature (1825)..(1825): n is a, c, g, or t
  misc_feature (1837)..(1837): n is a, c, g, or t
  misc_feature (1839)..(1839): n is a, c, g, or t
  misc_feature (1986)..(1986): n is a, c, g, or t
  misc_feature (1997)..(1998): n is a, c, g, or t
  misc_feature (2037)..(2037): n is a, c, g, or t
  misc_feature (2069)..(2069): n is a, c, g, or t
  misc_feature (2498)..(2498): n is a, c, g, or t
  misc_feature (2577)..(2577): n is a, c, g, or t
  misc_feature (2761)..(2761): n is a, c, g, or t
  misc_feature (2778)..(2778): n is a, c, g, or t
  misc_feature (2809)..(2809): n is a, c, g, or t
  misc_feature (2823)..(2823): n is a, c, g, or t
  misc_feature (2835)..(2837): n is a, c, g, or t
  misc_feature (2841)..(2841): n is a, c, g, or t
  misc_feature (2843)..(2846): n is a, c, g, or t
  misc_feature (2850)..(2851): n is a, c, g, or t
  misc_feature (2854)..(2854): n is a, c, g, or t
  misc_feature (2856)..(2856): n is a, c, g, or t
  misc_feature (2859)..(2860): n is a, c, g, or t
  misc_feature (2862)..(2863): n is a, c, g, or t
  misc_feature (2865)..(2866): n is a, c, g, or t
  misc_feature (2869)..(2869): n is a, c, g, or t
  misc_feature (2871)..(2872): n is a, c, g, or t
  misc_feature (2876)..(2876): n is a, c, g, or t
  misc_feature (2878)..(2878): n is a, c, g, or t
  misc_feature (2881)..(2881): n is a, c, g, or t
  misc_feature (2885)..(2885): n is a, c, g, or t
  misc_feature (2887)..(2887): n is a, c, g, or t
  misc_feature (2889)..(2889): n is a, c, g, or t
  misc_feature (2892)..(2892): n is a, c, g, or t
  misc_feature (2895)..(2897): n is a, c, g, or t
  misc_feature (2902)..(2905): n is a, c, g, or t
  misc_feature (2907)..(2907): n is a, c, g, or t
  misc_feature (2910)..(2911): n is a, c, g, or t
  misc_feature (2913)..(2916): n is a, c, g, or t
  misc_feature (2919)..(2919): n is a, c, g, or t
  misc_feature (2922)..(2923): n is a, c, g, or t
  misc_feature (2925)..(2925): n is a, c, g, or t
  misc_feature (2928)..(2929): n is a, c, g, or t
  misc_feature (2932)..(2936): n is a, c, g, or t
  misc_feature (2938)..(2938): n is a, c, g, or t
  misc_feature (2942)..(2943): n is a, c, g, or t
  misc_feature (2946)..(2947): n is a, c, g, or t
  misc_feature (2949)..(2951): n is a, c, g, or t
  misc_feature (2953)..(2954): n is a, c, g, or t
  misc_feature (2956)..(2956): n is a, c, g, or t
  misc_feature (2962)..(2964): n is a, c, g, or t
  misc_feature (2967)..(2967): n is a, c, g, or t
  misc_feature (2969)..(2970): n is a, c, g, or t
  misc_feature (2974)..(2975): n is a, c, g, or t
  misc_feature (3038)..(3039): n is a, c, g, or t
  misc_feature (3041)..(3042): n is a, c, g, or t
  misc_feature (3044)..(3045): n is a, c, g, or t
  misc_feature (3047)..(3049): n is a, c, g, or t
  misc_feature (3051)..(3053): n is a, c, g, or t
  misc_feature (3055)..(3055): n is a, c, g, or t
  misc_feature (3058)..(3059): n is a, c, g, or t
  misc_feature (3064)..(3070): n is a, c, g, or t
  misc_feature (3073)..(3078): n is a, c, g, or t
  misc_feature (3080)..(3082): n is a, c, g, or t
  misc_feature (3084)..(3101): n is a, c, g, or t
  misc_feature (3103)..(3106): n is a, c, g, or t
  misc_feature (3108)..(3117): n is a, c, g, or t
  misc_feature (3119)..(3123): n is a, c, g, or t
  misc_feature (3125)..(3125): n is a, c, g, or t
  misc_feature (3128)..(3128): n is a, c, g, or t
  misc_feature (3130)..(3143): n is a, c, g, or t
  misc_feature (3146)..(3146): n is a, c, g, or t
  misc_feature (3148)..(3148): n is a, c, g, or t
  misc_feature (3151)..(3151): n is a, c, g, or t
  misc_feature (3153)..(3154): n is a, c, g, or t
  misc_feature (3156)..(3163): n is a, c, g, or t
  misc_feature (3165)..(3166): n is a, c, g, or t
  misc_feature (3169)..(3169): n is a, c, g, or t
  misc_feature (3171)..(3176): n is a, c, g, or t
  misc_feature (3180)..(3180): n is a, c, g, or t
  misc_feature (3182)..(3182): n is a, c, g, or t
  misc_feature (3184)..(3184): n is a, c, g, or t
  misc_feature (3189)..(3189): n is a, c, g, or t
  misc_feature (3194)..(3195): n is a, c, g, or t
  misc_feature (3197)..(3200): n is a, c, g, or t
  misc_feature (3202)..(3203): n is a, c, g, or t
  misc_feature (3205)..(3208): n is a, c, g, or t
  misc_feature (3210)..(3211): n is a, c, g, or t
  misc_feature (3213)..(3217): n is a, c, g, or t
  misc_feature (3219)..(3227): n is a, c, g, or t
  misc_feature (3230)..(3230): n is a, c, g, or t
  misc_feature (3232)..(3234): n is a, c, g, or t
  misc_feature (3236)..(3239): n is a, c, g, or t
  misc_feature (3241)..(3242): n is a, c, g, or t
  misc_feature (3244)..(3250): n is a, c, g, or t
  misc_feature (3254)..(3254): n is a, c, g, or t
  misc_feature (3256)..(3257): n is a, c, g, or t
  misc_feature (3259)..(3261): n is a, c, g, or t
  misc_feature (3265)..(3265): n is a, c, g, or t
  misc_feature (3268)..(3270): n is a, c, g, or t
  misc_feature (3272)..(3275): n is a, c, g, or t
  misc_feature (3277)..(3284): n is a, c, g, or t
  misc_feature (3287)..(3287): n is a, c, g, or t
  misc_feature (3289)..(3291): n is a, c, g, or t
  misc_feature (3293)..(3293): n is a, c, g, or t
  misc_feature (3295)..(3295): n is a, c, g, or t
  misc_feature (3298)..(3300): n is a, c, g, or t
  misc_feature (3305)..(3306): n is a, c, g, or t
  misc_feature (3310)..(3310): n is a, c, g, or t
  misc_feature (3313)..(3317): n is a, c, g, or t
  misc_feature (3324)..(3327): n is a, c, g, or t
  misc_feature (3329)..(3330): n is a, c, g, or t
  misc_feature (3332)..(3332): n is a, c, g, or t
  misc_feature (3335)..(3335): n is a, c, g, or t
  misc_feature (3338)..(3339): n is a, c, g, or t
  misc_feature (3345)..(3345): n is a, c, g, or t
  misc_feature (3348)..(3352): n is a, c, g, or t
  misc_feature (3354)..(3354): n is a, c, g, or t
  misc_feature (3356)..(3356): n is a, c, g, or t
  misc_feature (3359)..(3359): n is a, c, g, or t
  misc_feature (3361)..(3362): n is a, c, g, or t
  misc_feature (3368)..(3370): n is a, c, g, or t
  misc_feature (3375)..(3377): n is a, c, g, or t
  misc_feature (3379)..(3382): n is a, c, g, or t
  misc_feature (3385)..(3385): n is a, c, g, or t
  misc_feature (3388)..(3388): n is a, c, g, or t
  misc_feature (3391)..(3391): n is a, c, g, or t
  misc_feature (3394)..(3398): n is a, c, g, or t
  misc_feature (3403)..(3407): n is a, c, g, or t
  misc_feature (3409)..(3409): n is a, c, g, or t
  misc_feature (3413)..(3413): n is a, c, g, or t
  misc_feature (3417)..(3417): n is a, c, g, or t
  misc_feature (3423)..(3428): n is a, c, g, or t
  misc_feature (3430)..(3430): n is a, c, g, or t
  misc_feature (3436)..(3437): n is a, c, g, or t
  misc_feature (3441)..(3441): n is a, c, g, or t
  misc_feature (3443)..(3443): n is a, c, g, or t
  misc_feature (3448)..(3448): n is a, c, g, or t
  misc_feature (3450)..(3451): n is a, c, g, or t
  misc_feature (3453)..(3454): n is a, c, g, or t
  misc_feature (3456)..(3460): n is a, c, g, or t
  misc_feature (3462)..(3465): n is a, c, g, or t
  misc_feature (3469)..(3469): n is a, c, g, or t
  misc_feature (3471)..(3473): n is a, c, g, or t
  misc_feature (3477)..(3478): n is a, c, g, or t
  misc_feature (3480)..(3480): n is a, c, g, or t
  misc_feature (3482)..(3484): n is a, c, g, or t
  misc_feature (3489)..(3490): n is a, c, g, or t
  misc_feature (3492)..(3492): n is a, c, g, or t
  misc_feature (3499)..(3499): n is a, c, g, or t
  misc_feature (3501)..(3502): n is a, c, g, or t
  misc_feature (3504)..(3504): n is a, c, g, or t
  misc_feature (3507)..(3507): n is a, c, g, or t
  misc_feature (3509)..(3509): n is a, c, g, or t
  misc_feature (3511)..(3513): n is a, c, g, or t
  misc_feature (3516)..(3516): n is a, c, g, or t
  misc_feature (3518)..(3518): n is a, c, g, or t
  misc_feature (3525)..(3527): n is a, c, g, or t
  misc_feature (3531)..(3531): n is a, c, g, or t
  misc_feature (3534)..(3534): n is a, c, g, or t
  misc_feature (3536)..(3536): n is a, c, g, or t
  misc_feature (3539)..(3545): n is a, c, g, or t
  misc_feature (3547)..(3547): n is a, c, g, or t
  misc_feature (3551)..(3551): n is a, c, g, or t
  misc_feature (3553)..(3556): n is a, c, g, or t
  misc_feature (3558)..(3559): n is a, c, g, or t
  misc_feature (3561)..(3566): n is a, c, g, or t
  misc_feature (3568)..(3568): n is a, c, g, or t
  misc_feature (3570)..(3570): n is a, c, g, or t
  misc_feature (3572)..(3574): n is a, c, g, or t
  misc_feature (3576)..(3579): n is a, c, g, or t
  misc_feature (3582)..(3583): n is a, c, g, or t
  misc_feature (3585)..(3586): n is a, c, g, or t
  misc_feature (3588)..(3589): n is a, c, g, or t
  misc_feature (3592)..(3593): n is a, c, g, or t
  misc_feature (3595)..(3596): n is a, c, g, or t
  misc_feature (3599)..(3600): n is a, c, g, or t
  misc_feature (3603)..(3604): n is a, c, g, or t
  misc_feature (3606)..(3606): n is a, c, g, or t
  misc_feature (3608)..(3610): n is a, c, g, or t
  misc_feature (3612)..(3612): n is a, c, g, or t
  misc_feature (3614)..(3616): n is a, c, g, or t
  misc_feature (3618)..(3621): n is a, c, g, or t
  misc_feature (3623)..(3627): n is a, c, g, or t
  misc_feature (3631)..(3631): n is a, c, g, or t
  misc_feature (3633)..(3633): n is a, c, g, or t
  misc_feature (3635)..(3635): n is a, c, g, or t
  misc_feature (3637)..(3645): n is a, c, g, or t
  misc_feature (3648)..(3650): n is a, c, g, or t
  misc_feature (3653)..(3654): n is a, c, g, or t
  misc_feature (3656)..(3656): n is a, c, g, or t
  misc_feature (3658)..(3660): n is a, c, g, or t
  misc_feature (3664)..(3671): n is a, c, g, or t
  misc_feature (3673)..(3674): n is a, c, g, or t
  misc_feature (3677)..(3680): n is a, c, g, or t
  misc_feature (3682)..(3685): n is a, c, g, or t
  misc_feature (3687)..(3688): n is a, c, g, or t
  misc_feature (3690)..(3693): n is a, c, g, or t
  misc_feature (3696)..(3696): n is a, c, g, or t
  misc_feature (3699)..(3700): n is a, c, g, or t
  misc_feature (3702)..(3703): n is a, c, g, or t
  misc_feature (3705)..(3706): n is a, c, g, or t
  misc_feature (3709)..(3709): n is a, c, g, or t
  misc_feature (3711)..(3711): n is a, c, g, or t
  misc_feature (3713)..(3724): n is a, c, g, or t
  misc_feature (3726)..(3726): n is a, c, g, or t
  misc_feature (3728)..(3731): n is a, c, g, or t
  misc_feature (3733)..(3737): n is a, c, g, or t
  misc_feature (3740)..(3742): n is a, c, g, or t
  misc_feature (3746)..(3766): n is a, c, g, or t
  misc_feature (3768)..(3768): n is a, c, g, or t
  misc_feature (3771)..(3776): n is a, c, g, or t
  misc_feature (3778)..(3780): n is a, c, g, or t
  misc_feature (3782)..(3782): n is a, c, g, or t
  misc_feature (3785)..(3792): n is a, c, g, or t
  misc_feature (3795)..(3795): n is a, c, g, or t
  misc_feature (3797)..(3798): n is a, c, g, or t
  misc_feature (3800)..(3804): n is a, c, g, or t
  misc_feature (3807)..(3807): n is a, c, g, or t
  misc_feature (3809)..(3815): n is a, c, g, or t
  misc_feature (3817)..(3820): n is a, c, g, or t
  misc_feature (3823)..(3825): n is a, c, g, or t
  misc_feature (3827)..(3835): n is a, c, g, or t
  misc_feature (3837)..(3839): n is a, c, g, or t
  misc_feature (3841)..(3844): n is a, c, g, or t
  misc_feature (3847)..(3848): n is a, c, g, or t
  misc_feature (3851)..(3852): n is a, c, g, or t
  misc_feature (3855)..(3855): n is a, c, g, or t
  misc_feature (3857)..(3857): n is a, c, g, or t
  misc_feature (3859)..(3868): n is a, c, g, or t
  misc_feature (3870)..(3874): n is a, c, g, or t
  misc_feature (3876)..(3877): n is a, c, g, or t
  misc_feature (3879)..(3880): n is a, c, g, or t
  misc_feature (3882)..(3885): n is a, c, g, or t
  misc_feature (3888)..(3888): n is a, c, g, or t
  misc_feature (3891)..(3891): n is a, c, g, or t
  misc_feature (3893)..(3893): n is a, c, g, or t
  misc_feature (3896)..(3898): n is a, c, g, or t
  misc_feature (3900)..(3900): n is a, c, g, or t
  misc_feature (3902)..(3903): n is a, c, g, or t
  misc_feature (3905)..(3914): n is a, c, g, or t
  misc_feature (3917)..(3917): n is a, c, g, or t
  misc_feature (3919)..(3920): n is a, c, g, or t
  misc_feature (3922)..(3923): n is a, c, g, or t
  misc_feature (3926)..(3926): n is a, c, g, or t
  misc_feature (3930)..(3932): n is a, c, g, or t
  misc_feature (3938)..(3938): n is a, c, g, or t
  misc_feature (3942)..(3946): n is a, c, g, or t
  misc_feature (3949)..(3949): n is a, c, g, or t
  misc_feature (3951)..(3954): n is a, c, g, or t
  misc_feature (3956)..(3959): n is a, c, g, or t
  misc_feature (3962)..(3964): n is a, c, g, or t
  misc_feature (3967)..(3970): n is a, c, g, or t
  misc_feature (3973)..(3974): n is a, c, g, or t
  misc_feature (3976)..(3976): n is a, c, g, or t
  misc_feature (3979)..(3979): n is a, c, g, or t
  misc_feature (3982)..(3982): n is a, c, g, or t
  misc_feature (3985)..(3985): n is a, c, g, or t
  misc_feature (3987)..(4000): n is a, c, g, or t
tggcaggatcaaccagaatacaatcaccgggtagaaaatcaccggcgacgaagtataaacgacttcgacgcagtcttttcaccgcacacaacactttagatggtatacatccaaacgcagctctcctctcaaacaccgatctcgactatgatacacacatgaatgtactagacccctctcgatcgcacagcgagtaaaaataggcattgcgccgcttttacttcaaagcctttacacatataactatatacacatcaactcgaaccaccgacaacatcagcttcataaagtagtcggccggtcatatgcgaacacgagattacatatgtatcgatgtattgtacaaatgataaaagtatcgatgtatagaaaaaagcttacagcacccagtattccaaggcggtcgcccaaccaagtactnnctgngnncnanntngtntannnnngntnnnngnannngaacnnnnnnannnnannnnnnntgnccgnanncngnaancnaanntngtnnncntngcaanngntannnnntnngtannnnnantnnnnnnnaacntngnacnngntnggcnnnanttnnnnnnnnanattnnnntnncaangnnttntnnnnnnnanannnnnnnnnnnattntatnnntnantnnncnnnnntannnnntnntnnntnnnntnngtnnngacnnannttaatcaattannnnnatacnnnnntgnttnaanngtnntagcananngannnnnccgntnnaannannnnagncnnntnnntngannnannaaaaantnngnnntcnannntnnnngnattanntncnnnnatnnnnnttntttntgngnnttgntnnannnaccnnnntannttagnannnngtnanttcagtnnntntnnnannaaattttnngnnacngtncngnactnagnctnnttnnngttttggncgnnnttcnaccnaatnntttncntnnntctnttaaanaatnnatanaanannaaannnnnnnnaannttnnntntnnncanatnnnnnnaananannccannnnntnnnnnnnnnnnnntngnnnnncnantcnnnnnnnntnantnnnatntnnnnatntnncaatttatcaacanntnccntnnnanatnttgaaaaaatanaggcggtccgtctaaagcggaccaaagtaaagtcaagggctaagtctcaatagatcgcagatttactctgctctacatacttacaacaccccgaccgaaagccaagtcgtctacaaataattgggcgcctagtcgctaacgcaagggctattgcacagctactagcaggatcgttaatcganaccnacnagtgttgtcgtgcgtatcgggcatattcaccgaagtgtatntatgccttctagcaaccaggaaccatgaatcgttgcatgtttggacgggattctgacttagaggcgttcagtcatatgcccccagatggtagcttcgcaccattggcttttcagccaagcacataaaccaaatgtctgaacctgcggttcctctcgtactgagcaggattaccattgcaacgacgagtcatcagtagggtaaaactaacctgtctcacgacggtctaaacccagctcacgttccctgttagttggtgaacaatcaaacgcttggcgaattctgcttcgcaatgataggaagagccgacatcgaaggatcaaaaagcgacgtcgctatgaacgcttggccgccacaagccagttatccctgtggtaacttttctgacacctcttgcttaaaactcgtaaagtcaaaaggatcgataggccacgctttcacggtctgnantcgtactgaaantntagatcaagtgagcttttgcccttttgctctacgcgaggtttctgtcctcactgagctcaccttaggacacctgcgttaccatttgacagatgtaccgccccagtcaaactccccgcctgacactgtcttcagagcggatcgcaccnaacacaagganngatgcttcgaaccaaaaggtagaccggtgaaggtcaatntccgcttaactgaataagtaaagaaacgatanaagtagtggtatttcaagatcgccttgcggctcccacctatgctacacctcctatgtctcttcacaaagtcagactagagtcaagctcaacagggtcttctttccccgctgatttggccaagcccgttcccttggctgtggtttcgctagatggtagccagggacagtgggaatctcgttaatccattcatgcgcgtcactaattagatgacgaggcatttggctaccttaagagagtcatagttactcccgccgtttacccgagcttggttgaatttcttcactttgacattcagagcactgggcagaaatcacattgcgtcaacaccaggctgcggccatcgcaatgctatgttttaattagccagtcagattcccctggtccgtaccagttctatgtcggttgctttttgccgaacgtagccgatngccgaaaccaccggcgaagccatgccagatccacgcgccgccaatcgacgctaggcccaaccgttgccagtcagacccnaagcatcaatagcaggcatcgcttcctagcacagcccgtcacggcccaacccatagagccaatccttgttccgaagttacggatccaatttgccgacttcccttgactacatcagtctaaggccagaggctgttcaccttggagacctgctgcggatatgggtacggcctggcgcgaacattangaacgtctagctcgganttttaagtgtcgacagtcgtgcaccggacancacaagaagtgtgntgctttacgggnnntgcnannnncctnnctncngcnnanncnnttncnnggantnagncccntncnaanaannnagaannnntnccnngnnnnccnccnncnaanncgnnnnngnttgnnttnncnnncnnanagcagnnnttncnntacnntccatctccgcgtccaggttcgggaatattaacccgattccctttcgaccaaaatcaggcatnnannanntnnnannnangannaaaannnnnnnctnnnnnnannncnnnnnnnnnnnnnnnnnnannnncnnnnnnnnnntnnnnnantgntnnnnnnnnnnnnnnctncnccncnncnnnnnnnnannttntnnnnnnaatntntnctacnaccannannnncnncnnnngnngnnnnncnnnnnnnnnccncnnncnnnncnncnnnnnnnaccncnncnnncctnctnnncnnnntnnnnnnnnttnannnantnccnnnccggnntagnatnnnnncacaacnnnncnncnccntcnnttttcnggnnnnntngnttngnnaggtgnnntgttnnncnnnnctnggnggnttnnnnnttccnnnnncnccgncctnctgtcnnnnnnanccaacnncttnantgggntnngnngnnnnntnnnntttngnnncttnncnannngtttnntncatcccncnncnccngntnnnctnancaaaaannncccnctngncannnnnnnantcanannnnannannnnnnantnannnannnnccnntnntnnccnntnnaannttnnanannngntnnngnnnntnnnnncccnangncnnnnnnnnnttnnnttnncngnnnaaannnnnnnncnnaannnncnnnntnncnnnnggnaanntnngnnggnancnnnnnnnnnnnngntnnnntnnnnnttnnncccnnnnnnnnnnnnnnnnnnnnnanttnnnnnntnnnanccnnnnnnnnccncnncnnnnnttncnnnnnnntnnnnccnnncnnnnnnnnntnnncnnnnttnnggnnccnancnnnnnnnnnnannnnncnncnntnnnnccnaancnaannngngnngnnnnnnnnnngcncnncnnttnttcnnnaaaaanaaannnnngancnnnncnnnnttnnnttnnnnttnncnttnggnttnannnnnnnnnnnnnn

SEQ ID NO: 712 - DNA, 4000 bp, Escherichia coli
  misc_feature (4)..(4): n is a, c, g, or t
  misc_feature (14)..(15): n is a, c, g, or t
  misc_feature (17)..(18): n is a, c, g, or t
  misc_feature (22)..(22): n is a, c, g, or t
  misc_feature (46)..(46): n is a, c, g, or t
  misc_feature (60)..(60): n is a, c, g, or t
  misc_feature (64)..(65): n is a, c, g, or t
  misc_feature (85)..(85): n is a, c, g, or t
  misc_feature (105)..(105): n is a, c, g, or t
  misc_feature (116)..(116): n is a, c, g, or t
  misc_feature (151)..(151): n is a, c, g, or t
  misc_feature (426)..(426): n is a, c, g, or t
  misc_feature (729)..(729): n is a, c, g, or t
  misc_feature (792)..(792): n is a, c, g, or t
  misc_feature (939)..(939): n is a, c, g, or t
  misc_feature (942)..(942): n is a, c, g, or t
  misc_feature (1667)..(1667): n is a, c, g, or t
  misc_feature (1704)..(1704): n is a, c, g, or t
  misc_feature (1928)..(1928): n is a, c, g, or t
  misc_feature (1988)..(1988): n is a, c, g, or t
  misc_feature (2002)..(2002): n is a, c, g, or t
  misc_feature (2014)..(2014): n is a, c, g, or t
  misc_feature (2032)..(2032): n is a, c, g, or t
  misc_feature (3116)..(3116): n is a, c, g, or t
  misc_feature (3128)..(3128): n is a, c, g, or t
  misc_feature (3464)..(3464): n is a, c, g, or t
  misc_feature (3575)..(3575): n is a, c, g, or t
tttnttattgaatnntnnaccnttttcctaccaattcatagaaganttataaagagtttngggnngattcataagccatataccnatcctctactaacgatgtancctgaagaacnaacgaaatcagcagaaatcaagccacaatcttcanacttcaagctctgaaaacatcagaaactgaactggaaaccaacggatgcgaactccttcaactggaagtaagcatgacgtgaatcacgtgctacaccatcgtcaaagcgcggataaataaacagctgagttgatatgtaacggttgaattggaaggagaatgtattctcccactccacctccgaacgcctataagtggtgtaaccatagagtcgggtacgccatgtgagcatctccaagagcttccattccaaatcaattgtgcactccgaaccnaagtcatgtaggaaatgatgacccgttccgatacccaatcggtctgaaagttcaagcattcgagtatatttcaggttataagcaagaggcgcaatatggaatgttcccttcaaacgatggcccaaccagtcggcagaatagtccataccaagagagatattgatgtttgctggggagagaaaagccgaataaaccgttggatcattcgaacgataagacttcccaaactgcgtatatccgatgaactgaacggtgtaataccatttctttgtggcttgtagaccgaacttagaagtaagtcgnatgaggtcatccgtactcttcacactgtgcaaagagtcggaacggctactctgcataccatanttcagctccaatcggttactccatttcaccttttgtttattgttataattggcgtccatgacgactgctgcaagggcagcatagttgctttcaccacctttataccagttatccgagacgtaattctgcaagaactgcaaggaatanctnccactgtaagtccagaaattaggacgtacaaccatcacttccacaggtactgtggcgggttctacgggcttatcgttcaccttttcaaccaagtgtacgtcatgaacaatcggttgttctatctcattcagctttgtctgctgtgcctgaacagcatcatttgttgtccagacaaggtcgggacgcgtcagataaagtcgcatcagttccgtgtcataagagctctcgggcttgccaagggagaacatattcccagcaacatccctatagaatgtcaacggaagaaacagtcttgaactccctctcccacggattttcgattgctttttcgtgttttttacgctaaagatactgtccttcagccatgccagagagtcggcatactgtttggcaacacctgtcgacggcacgttatccttgaccactgacacacgacgttgctgtgctgcagcacccaaactaactaaaaaaaacactgaaagtaagatccttaatctcattatagcatgcttaattttctgcaaacttacatcaattttttcgaataaagagcttctttgacagaaaaataagtgttttaaaccatcttaccactcattaaacctacaaaaacacagaacagatgcgcttattttctatctctttccaactgaaactgctgcaagagaagcaacgtaaaagcatgtttttccagccttcaatcacaacaaattaagttgagaacnacacccaataagaaggtaacacaagcagacttaaaanaagatacatgagcgattacagaagagaacaaatgctacttttgtaaaacaaattaccaattgatttttaaaagaggctcttttgcattctaaaagatgcccttttgcaatgtaaaaggtgcccttttgacgtgtaaaagacgcccttttgcaacgtaaaagacgcccttttacaagcctgtttgtaactaactgaaaactataaggttacaaagtcggaaaaanacgattatccttcatttcccactcaatagcgtttcaaatattgtaagtttgttttaccanacaagaataccacnattttaccgaantaacatcgacagaaaggnacacacaattacgaatattcagtacgattacccccactttggaacagaaatttacaaaggcatgaaaaacaaacaacccatttaatcccgtcataatgaaatcattgtacccgaaaacatcccacaattacacgataaaacagaagcaaaagacagatgaaaaaataattgttggataacaagagtattctatggaaaattcgtatctttgcacattagtttgaaaccaacgataaacgttttacaaagacaataattaaacatacatacaatcgtggctgaaacaaagtatatcttcgttactggtggcgtagtttcctcacttggtaaaggaattatctcgtcatctattggcaagcttcttcaagcgagaggctacaacatcaccatccaaaagtttgatccatacattaacatcgacccaggaacgctgaatccgtatgaacacggtgagtgttacgtgactgttgatgggatggaaaccgacctcgacctcggtcattacgaacgctttacaggtatcaagaccaccaaagccaactctatgacaacgggacgtatctacaaaagcgtcatagacaaggagcgtcggggtgattatcttggcaaaacgattcaagttgtaccgcatattacggacgaaataaaacgtaacatcaaactacttggacagaaatatcactatgatttcgtgataacagaaatcggaggaacgattggtgacatcgagtcagcaccgttcctggaggctatccgacagatgaaatgggaactgggaaagcgtgctatcaaccttcacctgacgtatgttccttatctgaaggctgccggtgagctgaagacaaagcctacacagcacagtgttaaggaactgcagagtgtgggaatacagccagatgtacttgttttgcgcacagaaaagcatcttgatgacgacatccgcaagaaggttgcagccttctgtaacgtcgatttcgactgtgtcgtacagagtgaggacctccccagcatctacgatgtgcctattaacatgctcaatcagggcttggacgaagccattttacgcaagtgtggtgagcagatnggtgacaaaccngctctcggaccatggagagaattcctcgatagacagcgtaaagcaacgaaagaggtacacatcggactcgtcgggaagtatgatttgcaggatgcttacaagagtattcgtgaaggattgttgcaggctggcgtttataacgaccacaaaacaatcattactttcatcaattcagaggaactgacagagcagaatgtagaagaaaaactcaaaggtcaggatggtgttgtcatatgtccgggcttcggacaacgtggtattgagggaaagattatcgccgctcactatacccgtacacataatatcccaaccttcggtatctgtcttggtatgcanatgatggttatcgagttcgcacgcaacgtccttggatataaagatgccaactcacgtgagatcgacgagaagactccacacaatgttattgacatcatggaggagcagaanaacatcacgaatatgggtggaacgatgcgccttggagcttatgaatgtgtgctccgtcagggttcacatacgttcaacatctataaacaagagcacattcaggagcgtcaccgccaccgttatgagttcaacaacagctacgagaaagagtttgagaagaacggtatgatgtgcgtcggacgtaatccggagagtgaactcattgagatcgttgagataccagggctgaaatggtacatcggtacacagttccatccagagtatcagtcaacggttctccatccgcacccactcttcttagactttgtaaaagcatcaattgaaaatcagaaaaagaaataatggataagaatactatcgcgggctttgtcttgatagccctcgttctctttggatttgcatggtggcagcagccatcagctgaa

SEQ ID NO: 713 - DNA, 4000 bp, Escherichia coli
  misc_feature (45)..(45): n is a, c, g, or t
  misc_feature (60)..(60): n is a, c, g, or t
  misc_feature (84)..(84): n is a, c, g, or t
  misc_feature (87)..(87): n is a, c, g, or t
  misc_feature (159)..(159): n is a, c, g, or t
  misc_feature (163)..(163): n is a, c, g, or t
  misc_feature (243)..(243): n is a, c, g, or t
  misc_feature (363)..(363): n is a, c, g, or t
  misc_feature (379)..(379): n is a, c, g, or t
  misc_feature (390)..(390): n is a, c, g, or t
  misc_feature (394)..(394): n is a, c, g, or t
  misc_feature (441)..(441): n is a, c, g, or t
  misc_feature (621)..(621): n is a, c, g, or t
  misc_feature (657)..(657): n is a, c, g, or t
  misc_feature (1083)..(1083): n is a, c, g, or t
  misc_feature (1231)..(1231): n is a, c, g, or t
  misc_feature (1234)..(1234): n is a, c, g, or t
  misc_feature (1237)..(1237): n is a, c, g, or t
  misc_feature (1252)..(1252): n is a, c, g, or t
  misc_feature (1318)..(1318): n is a, c, g, or t
  misc_feature (1351)..(1351): n is a, c, g, or t
  misc_feature (1414)..(1414): n is a, c, g, or t
  misc_feature (1495)..(1495): n is a, c, g, or t
  misc_feature (1552)..(1552): n is a, c, g, or t
  misc_feature (1708)..(1708): n is a, c, g, or t
  misc_feature (1762)..(1762): n is a, c, g, or t
  misc_feature (1987)..(1987): n is a, c, g, or t
  misc_feature (1990)..(1990): n is a, c, g, or t
  misc_feature (2023)..(2023): n is a, c, g, or t
  misc_feature (2320)..(2320): n is a, c, g, or t
  misc_feature (2512)..(2512): n is a, c, g, or t
  misc_feature (3081)..(3081): n is a, c, g, or t
  misc_feature (3207)..(3207): n is a, c, g, or t
  misc_feature (3822)..(3822): n is a, c, g, or t
  misc_feature (3825)..(3825): n is a, c, g, or t
  misc_feature (3891)..(3891): n is a, c, g, or t
  misc_feature (3894)..(3894): n is a, c, g, or t
  misc_feature (3897)..(3897): n is a, c, g, or t
atcgttgaagcgatctcaaactcaagccaaaccatcggcgataangctaaaaaagctggngagctttgcaaaaaatcagcccanatnaatgaaaaaatagaaaatatgaaccagctaatgaacgagagcgttagcttaaatgagacctctacgaaggantatntagagactggaaataaggtcgaagagctgataaaaggcatcgtaaatatcgatgaaatttcaaaacaaaactcaaaaagnatggatgaaatctcacttgcagccgctcatctttcaaagatgactgataatctaaacactagcctttcaaaatttagaacctgataaatttagccaaatctttggctaaatttaactttntcttttaaatttatcncttaagtagcnagcngattttttactttaagcttacgatcatgatgtaaatttatgaaatantttttattttgtgttatttaagtcggcattttggcttaagagatgagatgacgtatgcaagagtatgatattttagatgttttatcaaacaaaaaggtcctttgcttagaggatgaagaggcgattttgcgaaatatctgcgcctcgctggagctctttttcgcagaggttaaaggcgtnacagacggctttgatgcgcttgagcttgctatgagnggggcgtatgacgtgctagtgcttgatatcagcgtgccaaatatcgatggtcttgagatcgctaaaaaagtaagagctatcaatcaaaaaatccctatcgtgatcttatcaagccacgtcgagcaagagtatctgtggcgcgcggttgagctaaagatcacaagatatcttgcaaaaccatacgataaaaaatcttttgttaaagcgcttgaagatgtggcttttgagctagttggacgcacaccaactatcaggctaaatgacgagcttgagtatgattttggcaaaaaagcgctttatgtaaatggcgaaatttctcatctaagcaagagcgagagcaagcttttggagtactttttaaacaacaaaaaccaaactatcacttatgagcaaatttttgactacatctgggactacgagcagccnacaaaagaggcgataaagacgatcgtaaaagagcttagaagaaagcttggcaaagatgtgatcaaaaatttatacggcgtgggctatctttgtgagatataaatttcagctaatagtcggtgcttttatctttgtctatctgctagtntcngcncttgttttaaatttntacaacgatcttgcgatgaaagacgccaaaaaagaggcgtattatgttttagagggcataaattcngtaagagagtacatcgctggagttcagcgcccnctaatcgagcagttaaaagagcagggcatcttaaaagaggacttttttgacgagagacttctntcatcttcatatataagccgtgaaatttacaacatccaaaagaaaaaatacaaccttgaatttgactacaagctagttgcnatcgctccgctaaataaagcccacgagccaaatgaatttgaagctggcgtcttgcanggctttaaagagaataaatttaaagaatttgtaaagataataaaagatgaaaatggctcacagctctttgtgggtctgcctataaaaaaccaaagtccaagctgtctagcctgtcatagcagtgcaaatgccccacaacaaatgctagaaaaatanggcatggagggcatagagatcccagacgtgaacgaaacggtcgcgatgatctcntttaagataccaatccgcgccatttttacctaccacttgcaagaggtcatcgtcataatgagcgctataacgcttatctttgggctatttttgctacttgtttataagatgcataggcgaggcgaggagagcaaaaagcagactgagcagctgatgatacatcaaagccgcctagcctctatgggcgagatgataggcaatatctcgcaccagtggaagcagccnctngctcagataagctcagctttgataaatttaganctctatcaggagcgaaaaaagcttgatgaggcgaaaatttatgagtttatagaagagacaagcaagcagataaatttcatgtcagaaaccgttgatgactttaaaaatttctttagtccaaataccttgagaaaagagtttaaggtgcttgaagtgataaatcaaacgataaaaattttaaacgcaacgcttaaaaagtatcagatcgaagtgcagcttgacgtgagagaaaattttgaggtatttgcaaattttaatgagataatccaaattttaataaacatcataaacaacgcnaaagacgcatttaagcagagctacacaaagccaagagtgataaagataagcgcctttttaaaagatgatcgcaagaatttatgcgtgcaaaataacgcaggagcgataaaaaattcatttttaaaggtcatctttgagccacactttagcacaaaagagagcggtagcgggcttgggctatatatgagccgncttatcgctcgcaaaaacaacgccctaatctttgctaaaaatgtggatgaaaaccacgttgcatttacaattagtttcgaaaatttataatttgttaattttcccccttttctgcccttttttggtgttaagattatcagtatgaaatcattttgattttaggataaaaattcaaaggaggagacgtgagaaacttacacaaagccttagcaggcttactcatgggtgttagtatctttgcttcacaagcctgttgcgaagagcataatatgcagatgtccgataaagcacgtgatgttatcgcaaatcctaaaggcacactgcaaagtagaggtgttgtctccttgcaagactacgtcgtagaagagcaagagatgtataactggctatttaaaaaccaccctatttttacaaagtatggtggcaaaaccgtcggcaaaatggtcgttcatgaccgtggcttagagtggcttgccgagggacatggctttgatatgtcaaagcttagtaaaagagatggtggtaagggctatagctctatgatgtatagaattccagccacctcatcncttcagtttcctaataaatttgtaggtccagaaaagtgcggtgagtgtcacccagctcagtatgaggtctggagcagatctcgccacgcaactactatgcgcttccctggcgagcacccagaggtnaataacaacctaactgagccagtatttgacaaagataccgcttctatccttccaaaaggtatcactccagatgtcatctacgcaaccgttggtcacttaagaactaagatgggctacgtcgatgcatggctacttcgtggtacttactacgttgagggcggtttgctaagagatggcacaggtcagatcgtagctggcggtaaccaatggcaaagaacatgggcgttaaatttagacgacgcaactgttaaaaagataaaagagctcgtcccagaatttcctggcacgcttgaagagtatggcgataatggcggatatgttagaggtcttgcctcatacgccgcaaaacataaaaagtcgatgtttttccaagcaaactcatcatattgtgaggtttgccacccagttaaatttgactttaagtcaaaagcagaattttacgcagcacttggtaatgccaaagagcttcaaaaacacactatctcaaaaggcgtaagctgtgaggagtgccacggagctggcggtcaccttgatggagctacaaattttagaacatcaaactgcgaacgctgtcaccaaagatttaactttagcccagatctaatgcgagctaanccncttaacaacggcaagcttgatctctcactaagctctaaatttaaatcaatgggaccaggatgcggntcnganggctcacaatcatactttaccgctcactacgataaaggcatgagatgcgtcacttgccacgatccacacgacaacacaggtaacgttgtaggcgataagagcg

SEQ ID NO: 714 - DNA, 4000 bp, Escherichia coli
  misc_feature (1)..(1): n is a, c, g, or t
  misc_feature (3)..(4): n is a, c, g, or t
  misc_feature (7)..(9): n is a, c, g, or t
  misc_feature (11)..(12): n is a, c, g, or t
  misc_feature (14)..(14): n is a, c, g, or t
  misc_feature (20)..(20): n is a, c, g, or t
  misc_feature (22)..(23): n is a, c, g, or t
  misc_feature (27)..(27): n is a, c, g, or t
  misc_feature (30)..(30): n is a, c, g, or t
  misc_feature (32)..(32): n is a, c, g, or t
  misc_feature (35)..(35): n is a, c, g, or t
  misc_feature (37)..(37): n is a, c, g, or t
  misc_feature (39)..(40): n is a, c, g, or t
  misc_feature (42)..(42): n is a, c, g, or t
  misc_feature (44)..(45): n is a, c, g, or t
  misc_feature (47)..(48): n is a, c, g, or t
  misc_feature (51)..(56): n is a, c, g, or t
  misc_feature (62)..(62): n is a, c, g, or t
  misc_feature (65)..(65): n is a, c, g, or t
  misc_feature (69)..(70): n is a, c, g, or t
  misc_feature (73)..(73): n is a, c, g, or t
  misc_feature (75)..(75): n is a, c, g, or t
  misc_feature (78)..(78): n is a, c, g, or t
  misc_feature (82)..(82): n is a, c, g, or t
  misc_feature (91)..(96): n is a, c, g, or t
  misc_feature (101)..(101): n is a, c, g, or t
  misc_feature (109)..(110): n is a, c, g, or t
  misc_feature (113)..(114): n is a, c, g, or t
  misc_feature (116)..(116): n is a, c, g, or t
  misc_feature (124)..(124): n is a, c, g, or t
  misc_feature (126)..(126): n is a, c, g, or t
  misc_feature (128)..(128): n is a, c, g, or t
  misc_feature (130)..(131): n is a, c, g, or t
  misc_feature (139)..(139): n is a, c, g, or t
  misc_feature (141)..(141): n is a, c, g, or t
  misc_feature (146)..(146): n is a, c, g, or t
  misc_feature (148)..(148): n is a, c, g, or t
  misc_feature (151)..(151): n is a, c, g, or t
  misc_feature (153)..(155): n is a, c, g, or t
  misc_feature (159)..(159): n is a, c, g, or t
  misc_feature (163)..(163): n is a, c, g, or t
  misc_feature (175)..(175): n is a, c, g, or t
  misc_feature (179)..(179): n is a, c, g, or t
  misc_feature (181)..(182): n is a, c, g, or t
  misc_feature (184)..(184): n is a, c, g, or t
  misc_feature (186)..(186): n is a, c, g, or t
  misc_feature (189)..(190): n is a, c, g, or t
  misc_feature (196)..(197): n is a, c, g, or t
  misc_feature (199)..(199): n is a, c, g, or t
  misc_feature (207)..(209): n is a, c, g, or t
  misc_feature (217)..(218): n is a, c, g, or t
  misc_feature (220)..(220): n is a, c, g, or t
  misc_feature (223)..(223): n is a, c, g, or t
  misc_feature (227)..(227): n is a, c, g, or t
  misc_feature (238)..(238): n is a, c, g, or t
  misc_feature (244)..(244): n is a, c, g, or t
  misc_feature (246)..(246): n is a, c, g, or t
  misc_feature (248)..(248): n is a, c, g, or t
  misc_feature (250)..(251): n is a, c, g, or t
  misc_feature (257)..(258): n is a, c, g, or t
  misc_feature (261)..(261): n is a, c, g, or t
  misc_feature (269)..(269): n is a, c, g, or t
  misc_feature (272)..(273): n is a, c, g, or t
  misc_feature (276)..(276): n is a, c, g, or t
  misc_feature (280)..(280): n is a, c, g, or t
  misc_feature (283)..(284): n is a, c, g, or t
  misc_feature (293)..(294): n is a, c, g, or t
  misc_feature (302)..(302): n is a, c, g, or t
  misc_feature (305)..(305): n is a, c, g, or t
  misc_feature (310)..(310): n is a, c, g, or t
  misc_feature (319)..(319): n is a, c, g, or t
  misc_feature (323)..(323): n is a, c, g, or t
  misc_feature (327)..(328): n is a, c, g, or t
  misc_feature (332)..(332): n is a, c, g, or t
  misc_feature (335)..(335): n is a, c, g, or t
  misc_feature (337)..(338): n is a, c, g, or t
  misc_feature (342)..(345): n is a, c, g, or t
  misc_feature (348)..(348): n is a, c, g, or t
  misc_feature (350)..(350): n is a, c, g, or t
  misc_feature (352)..(352): n is a, c, g, or t
  misc_feature (360)..(363): n is a, c, g, or t
  misc_feature (367)..(367): n is a, c, g, or t
  misc_feature (373)..(373): n is a, c, g, or t
  misc_feature (375)..(375): n is a, c, g, or t
  misc_feature (381)..(381): n is a, c, g, or t
  misc_feature (383)..(384): n is a, c, g, or t
  misc_feature (386)..(386): n is a, c, g, or t
  misc_feature (395)..(397): n is a, c, g, or t
  misc_feature (399)..(399): n is a, c, g, or t
  misc_feature (401)..(401): n is a, c, g, or t
  misc_feature (404)..(406): n is a, c, g, or t
  misc_feature (411)..(414): n is a, c, g, or t
  misc_feature (416)..(419): n is a, c, g, or t
  misc_feature (421)..(421): n is a, c, g, or t
  misc_feature (424)..(424): n is a, c, g, or t
  misc_feature (426)..(426): n is a, c, g, or t
  misc_feature (428)..(428): n is a, c, g, or t
  misc_feature (430)..(431): n is a, c, g, or t
  misc_feature (435)..(436): n is a, c, g, or t
  misc_feature (439)..(440): n is a, c, g, or t
  misc_feature (442)..(442): n is a, c, g, or t
  misc_feature (445)..(445): n is a, c, g, or t
  misc_feature (447)..(448): n is a, c, g, or t
  misc_feature (451)..(451): n is a, c, g, or t
  misc_feature (453)..(456): n is a, c, g, or t
  misc_feature (458)..(458): n is a, c, g, or t
  misc_feature (460)..(460): n is a, c, g, or t
  misc_feature (465)..(467): n is a, c, g, or t
  misc_feature (470)..(471): n is a, c, g, or t
  misc_feature (473)..(473): n is a, c, g, or t
  misc_feature (476)..(477): n is a, c, g, or t
  misc_feature (481)..(482): n is a, c, g, or t
  misc_feature (485)..(485): n is a, c, g, or t
  misc_feature (488)..(488): n is a, c, g, or t
  misc_feature (490)..(491): n is a, c, g, or t
  misc_feature (493)..(494): n is a, c, g, or t
  misc_feature (496)..(496): n is a, c, g, or t
  misc_feature (499)..(500): n is a, c, g, or t
  misc_feature (503)..(506): n is a, c, g, or t
  misc_feature (508)..(508): n is a, c, g, or t
  misc_feature (510)..(517): n is a, c, g, or t
  misc_feature (520)..(522): n is a, c, g, or t
  misc_feature (526)..(526): n is a, c, g, or t
  misc_feature (529)..(530): n is a, c, g, or t
  misc_feature (532)..(536): n is a, c, g, or t
  misc_feature (541)..(542): n is a, c, g, or t
  misc_feature (544)..(544): n is a, c, g, or t
  misc_feature (546)..(555): n is a, c, g, or t
  misc_feature (557)..(560): n is a, c, g, or t
  misc_feature (563)..(566): n is a, c, g, or t
  misc_feature (569)..(569): n is a, c, g, or t
  misc_feature (572)..(572): n is a, c, g, or t
  misc_feature (574)..(577): n is a, c, g, or t
  misc_feature (579)..(584): n is a, c, g, or t
  misc_feature (586)..(588): n is a, c, g, or t
  misc_feature (590)..(594): n is a, c, g, or t
  misc_feature (596)..(596): n is a, c, g, or t
  misc_feature (598)..(598): n is a, c, g, or t
  misc_feature (601)..(602): n is a, c, g, or t
  misc_feature (606)..(611): n is a, c, g, or t
  misc_feature (613)..(615): n is a, c, g, or t
  misc_feature (622)..(622): n is a, c, g, or t
  misc_feature (624)..(626): n is a, c, g, or t
  misc_feature (632)..(633): n is a, c, g, or t
  misc_feature (635)..(637): n is a, c, g, or t
  misc_feature (639)..(639): n is a, c, g, or t
  misc_feature (642)..(642): n is a, c, g, or t
  misc_feature (644)..(647): n is a, c, g, or t
  misc_feature (649)..(650): n is a, c, g, or t
  misc_feature (654)..(654): n is a, c, g, or t
  misc_feature (656)..(657): n is a, c, g, or t
  misc_feature (659)..(659): n is a, c, g, or t
  misc_feature (662)..(662): n is a, c, g, or t
  misc_feature (664)..(664): n is a, c, g, or t
  misc_feature (669)..(673): n is a, c, g, or t
  misc_feature (676)..(676): n is a, c, g, or t
  misc_feature (682)..(683): n is a, c, g, or t
  misc_feature (685)..(685): n is a, c, g, or t
  misc_feature (690)..(690): n is a, c, g, or t
  misc_feature (693)..(694): n is a, c, g, or t
  misc_feature (696)..(700): n is a, c, g, or t
  misc_feature (702)..(703): n is a, c, g, or t
  misc_feature (706)..(706): n is a, c, g, or t
  misc_feature (714)..(715): n is a, c, g, or t
  misc_feature (718)..(719): n is a, c, g, or t
  misc_feature (722)..(724): n is a, c, g, or t
  misc_feature (726)..(726): n is a, c, g, or t
  misc_feature (827)..(829): n is a, c, g, or t
  misc_feature (831)..(831): n is a, c, g, or t
  misc_feature (833)..(833): n is a, c, g, or t
  misc_feature (835)..(837): n is a, c, g, or t
  misc_feature (839)..(839): n is a, c, g, or t
  misc_feature (841)..(841): n is a, c, g, or t
  misc_feature (843)..(843): n is a, c, g, or t
  misc_feature (845)..(848): n is a, c, g, or t
  misc_feature (851)..(856): n is a, c, g, or t
  misc_feature (859)..(859): n is a, c, g, or t
  misc_feature (862)..(863): n is a, c, g, or t
  misc_feature (866)..(869): n is a, c, g, or t
  misc_feature (873)..(876): n is a, c, g, or t
  misc_feature (878)..(878): n is a, c, g, or t
  misc_feature (880)..(882): n is a, c, g, or t
  misc_feature (884)..(885): n is a, c, g, or t
  misc_feature (888)..(888): n is a, c, g, or t
  misc_feature (893)..(897): n is a, c, g, or t
  misc_feature (899)..(902): n is a, c, g, or t
  misc_feature (904)..(909): n is a, c, g, or t
  misc_feature (911)..(914): n is a, c, g, or t
  misc_feature (916)..(918): n is a, c, g, or t
  misc_feature (921)..(921): n is a, c, g, or t
  misc_feature (924)..(924): n is a, c, g, or t
  misc_feature (928)..(928): n is a, c, g, or t
  misc_feature (931)..(932): n is a, c, g, or t
  misc_feature (935)..(935): n is a, c, g, or t
  misc_feature (938)..(939): n is a, c, g, or t
  misc_feature (941)..(943): n is a, c, g, or t
  misc_feature (946)..(946): n is a, c, g, or t
  misc_feature (948)..(948): n is a, c, g, or t
  misc_feature (950)..(952): n is a, c, g, or t
  misc_feature (956)..(959): n is a, c, g, or t
  misc_feature (963)..(966): n is a, c, g, or t
  misc_feature (969)..(970): n is a, c, g, or t
  misc_feature (973)..(973): n is a, c, g, or t
  misc_feature (976)..(978): n is a, c, g, or t
  misc_feature (980)..(980): n is a, c, g, or t
  misc_feature (982)..(984): n is a, c, g, or t
  misc_feature (987)..(988): n is a, c, g, or t
  misc_feature (990)..(990): n is a, c, g, or t
  misc_feature (994)..(994): n is a, c, g, or t
  misc_feature (996)..(998): n is a, c, g, or t
  misc_feature (1001)..(1010): n is a, c, g, or t
  misc_feature (1012)..(1012): n is a, c, g, or t
  misc_feature (1014)..(1014): n is a, c, g, or t
  misc_feature (1016)..(1018): n is a, c, g, or t
  misc_feature (1020)..(1023): n is a, c, g, or t
  misc_feature (1025)..(1026): n is a, c, g, or t
  misc_feature (1028)..(1029): n is a, c, g, or t
  misc_feature (1031)..(1031): n is a, c, g, or t
  misc_feature (1033)..(1033): n is a, c, g, or t
  misc_feature (1035)..(1036): n is a, c, g, or t
  misc_feature (1038)..(1038): n is a, c, g, or t
  misc_feature (1041)..(1041): n is a, c, g, or t
  misc_feature (1044)..(1045): n is a, c, g, or t
  misc_feature (1047)..(1056): n is a, c, g, or t
  misc_feature (1059)..(1060): n is a, c, g, or t
  misc_feature (1062)..(1069): n is a, c, g, or t
  misc_feature (1073)..(1073): n is a, c, g, or t
  misc_feature (1075)..(1075): n is a, c, g, or t
  misc_feature (1077)..(1077): n is a, c, g, or t
  misc_feature (1079)..(1083): n is a, c, g, or t
  misc_feature (1085)..(1089): n is a, c, g, or t
  misc_feature (1091)..(1094): n is a, c, g, or t
  misc_feature (1098)..(1099): n is a, c, g, or t
  misc_feature (1101)..(1101): n is a, c, g, or t
  misc_feature (1104)..(1108): n is a, c, g, or t
  misc_feature (1111)..(1119): n is a, c, g, or t
  misc_feature (1121)..(1122): n is a, c, g, or t
  misc_feature (1127)..(1127): n is a, c, g, or t
  misc_feature (1129)..(1131): n is a, c, g, or t
  misc_feature (1133)..(1134): n is a, c, g, or t
  misc_feature (1136)..(1146): n is a, c, g, or t
  misc_feature (1148)..(1148): n is a, c, g, or t
  misc_feature (1150)..(1150): n is a, c, g, or t
  misc_feature (1152)..(1152): n is a, c, g, or t
  misc_feature (1154)..(1155): n is a, c, g, or t
  misc_feature (1157)..(1158): n is a, c, g, or t
  misc_feature (1160)..(1164): n is a, c, g, or t
  misc_feature (1166)..(1167): n is a, c, g, or t
  misc_feature (1170)..(1170): n is a, c, g, or t
  misc_feature (1172)..(1173): n is a, c, g, or t
  misc_feature (1175)..(1176): n is a, c, g, or t
  misc_feature (1178)..(1178): n is a, c, g, or t
  misc_feature (1180)..(1180): n is a, c, g, or t
  misc_feature (1182)..(1182): n is a, c, g, or t
  misc_feature (1184)..(1186): n is a, c, g, or t
  misc_feature (1188)..(1188): n is a, c, g, or t
  misc_feature (1190)..(1190): n is a, c, g, or t
  misc_feature (1192)..(1196): n is a, c, g, or t
  misc_feature (1201)..(1202): n is a, c, g, or t
  misc_feature (1204)..(1204): n is a, c, g, or t
  misc_feature (1208)..(1209): n is a, c, g, or t
  misc_feature (1211)..(1211): n is a, c, g, or t
  misc_feature (1213)..(1213): n is a, c, g, or t
  misc_feature (1215)..(1217): n is a, c, g, or t
  misc_feature (1219)..(1225): n is a, c, g, or t
  misc_feature (1227)..(1230): n is a, c, g, or t
  misc_feature (1232)..(1240): n is a, c, g, or t
  misc_feature (1242)..(1248): n is a, c, g, or t
  misc_feature (1250)..(1258): n is a, c, g, or t
  misc_feature (1260)..(1260): n is a, c, g, or t
  misc_feature (1263)..(1272): n is a, c, g, or t
  misc_feature (1275)..(1275): n is a, c, g, or t
  misc_feature (1278)..(1286): n is a, c, g, or t
  misc_feature (1292)..(1292): n is a, c, g, or t
  misc_feature (1294)..(1294): n is a, c, g, or t
  misc_feature (1296)..(1305): n is a, c, g, or t
  misc_feature (1307)..(1308): n is a, c, g, or t
  misc_feature (1310)..(1310): n is a, c, g, or t
  misc_feature (1312)..(1322): n is a, c, g, or t
  misc_feature (1324)..(1327): n is a, c, g, or t
  misc_feature (1329)..(1333): n is a, c, g, or t
  misc_feature (1335)..(1335): n is a, c, g, or t
  misc_feature (1339)..(1340): n is a, c, g, or t
  misc_feature (1342)..(1342): n is a, c, g, or t
  misc_feature (1346)..(1346): n is a, c, g, or t
  misc_feature (1361)..(1363): n is a, c, g, or t
  misc_feature (1365)..(1365): n is a, c, g, or t
  misc_feature (1369)..(1371): n is a, c, g, or t
  misc_feature (1373)..(1373): n is a, c, g, or t
  misc_feature (1375)..(1376): n is a, c, g, or t
  misc_feature (1380)..(1381): n is a, c, g, or t
  misc_feature (1383)..(1384): n is a, c, g, or t
  misc_feature (1386)..(1386): n is a, c, g, or t
  misc_feature (1390)..(1390): n is a, c, g, or t
  misc_feature (1392)..(1399): n is a, c, g, or t
  misc_feature (1401)..(1401): n is a, c, g, or t
  misc_feature (1403)..(1403): n is a, c, g, or t
  misc_feature (1407)..(1409): n is a, c, g, or t
  misc_feature (1411)..(1413): n is a, c, g, or t
  misc_feature (1415)..(1415): n is a, c, g, or t
  misc_feature (1418)..(1418): n is a, c, g, or t
  misc_feature (1420)..(1420): n is a, c, g, or t
  misc_feature (1422)..(1427): n is a, c, g, or t
  misc_feature (1429)..(1430): n is a, c, g, or t
  misc_feature (1432)..(1434): n is a, c, g, or t
  misc_feature (1436)..(1436): n is a, c, g, or t
  misc_feature (1438)..(1438): n is a, c, g, or t
  misc_feature (1443)..(1443): n is a, c, g, or t
  misc_feature (1445)..(1446): n is a, c, g, or t
  misc_feature (1448)..(1448): n is a, c, g, or t
  misc_feature (1450)..(1452): n is a, c, g, or t
  misc_feature (1454)..(1456): n is a, c, g, or t
  misc_feature (1459)..(1461): n is a, c, g, or t
  misc_feature (1463)..(1464): n is a, c, g, or t
  misc_feature (1466)..(1466): n is a, c, g, or t
  misc_feature (1469)..(1470): n is a, c, g, or t
  misc_feature (1473)..(1473): n is a, c, g, or t
  misc_feature (1476)..(1476): n is a, c, g, or t
  misc_feature (1479)..(1480): n is a, c, g, or t
  misc_feature (1482)..(1484): n is a, c, g, or t
  misc_feature (1486)..(1487): n is a, c, g, or t
  misc_feature (1489)..(1493): n is a, c, g, or t
  misc_feature (1495)..(1497): n is a, c, g, or t
  misc_feature (1499)..(1499): n is a, c, g, or t
  misc_feature (1501)..(1501): n is a, c, g, or t
  misc_feature (1503)..(1503): n is a, c, g, or t
  misc_feature (1505)..(1505): n is a, c, g, or t
  misc_feature (1507)..(1516): n is a, c, g, or t
  misc_feature (1519)..(1522): n is a, c, g, or t
  misc_feature (1525)..(1525): n is a, c, g, or t
  misc_feature (1527)..(1527): n is a, c, g, or t
  misc_feature (1529)..(1531): n is a, c, g, or t
  misc_feature (1533)..(1533): n is a, c, g, or t
  misc_feature (1535)..(1535): n is a, c, g, or t
  misc_feature (1537)..(1538): n is a, c, g, or t
  misc_feature (1540)..(1540): n is a, c, g, or t
  misc_feature (1542)..(1543): n is a, c, g, or t
  misc_feature (1545)..(1546): n is a, c, g, or t
  misc_feature (1548)..(1549): n is a, c, g, or t
  misc_feature (1552)..(1553): n is a, c, g, or t
  misc_feature (1555)..(1555): n is a, c, g, or t
  misc_feature (1557)..(1557): n is a, c, g, or t
  misc_feature (1559)..(1564): n is a, c, g, or t
  misc_feature (1567)..(1567): n is a, c, g, or t
  misc_feature (1571)..(1571): n is a, c, g, or t
  misc_feature (1575)..(1576): n is a, c, g, or t
  misc_feature (1579)..(1579): n is a, c, g, or t
  misc_feature (1581)..(1582): n is a, c, g, or t
  misc_feature (1584)..(1587): n is a, c, g, or t
  misc_feature (1592)..(1592): n is a, c, g, or t
  misc_feature (1596)..(1596): n is a, c, g, or t
  misc_feature (1598)..(1598): n is a, c, g, or t
  misc_feature (1600)..(1600): n is a, c, g, or t
  misc_feature (1603)..(1604): n is a, c, g, or t
  misc_feature (1609)..(1609): n is a, c, g, or t
  misc_feature (1611)..(1612): n is a, c, g, or t
  misc_feature (1615)..(1615): n is a, c, g, or t
  misc_feature (1617)..(1620): n is a, c, g, or t
  misc_feature (1622)..(1622): n is a, c, g, or t
  misc_feature (1624)..(1624): n is a, c, g, or t
  misc_feature (1626)..(1626): n is a, c, g, or t
  misc_feature (1630)..(1631): n is a, c, g, or t
  misc_feature (1633)..(1635): n is a, c, g, or t
  misc_feature (1962)..(1962): n is a, c, g, or t
  misc_feature (1965)..(1966): n is a, c, g, or t
  misc_feature (1987)..(1987): n is a, c, g, or t
  misc_feature (2201)..(2201): n is a, c, g, or t
  misc_feature (2558)..(2560): n is a, c, g, or t
  misc_feature (2564)..(2565): n is a, c, g, or t
  misc_feature (2567)..(2567): n is a, c, g, or t
  misc_feature (2569)..(2569): n is a, c, g, or t
  misc_feature (2571)..(2574): n is a, c, g, or t
  misc_feature (2577)..(2577): n is a, c, g, or t
  misc_feature (2581)..(2581): n is a, c, g, or t
  misc_feature (2583)..(2583): n is a, c, g, or t
  misc_feature (2586)..(2587): n is a, c, g, or t
  misc_feature (2589)..(2590): n is a, c, g, or t
  misc_feature (2593)..(2593): n is a, c, g, or t
  misc_feature (2595)..(2596): n is a, c, g, or t
  misc_feature (2599)..(2600): n is a, c, g, or t
  misc_feature (2602)..(2605): n is a, c, g, or t
  misc_feature (2608)..(2613): n is a, c, g, or t
  misc_feature (2615)..(2615): n is a, c, g, or t
  misc_feature (2617)..(2621): n is a, c, g, or t
  misc_feature (2623)..(2623): n is a, c, g, or t
  misc_feature (2626)..(2626): n is a, c, g, or t
  misc_feature (2628)..(2628): n is a, c, g, or t
  misc_feature (2631)..(2632): n is a, c, g, or t
  misc_feature (2634)..(2634): n is a, c, g, or t
  misc_feature (2637)..(2639): n is a, c, g, or t
  misc_feature (2641)..(2647): n is a, c, g, or t
  misc_feature (2649)..(2651): n is a, c, g, or t
  misc_feature (2653)..(2657): n is a, c, g, or t
  misc_feature (2659)..(2659): n is a, c, g, or t
  misc_feature (2661)..(2663): n is a, c, g, or t
  misc_feature (2665)..(2665): n is a, c, g, or t
  misc_feature (2667)..(2667): n is a, c, g, or t
  misc_feature (2670)..(2671): n is a, c, g, or t
  misc_feature (2675)..(2676): n is a, c, g, or t
  misc_feature (2679)..(2680): n is a, c, g, or t
  misc_feature (2684)..(2688): n is a, c, g, or t
  misc_feature (2690)..(2692): n is a, c, g, or t
  misc_feature (2694)..(2694): n is a, c, g, or t
  misc_feature (2696)..(2701): n is a, c, g, or t
  misc_feature (2703)..(2707): n is a, c, g, or t
  misc_feature (2711)..(2713): n is a, c, g, or t
  misc_feature (2716)..(2720): n is a, c, g, or t
  misc_feature (2722)..(2722): n is a, c, g, or t
  misc_feature (2725)..(2726): n is a, c, g, or t
  misc_feature (2728)..(2730): n is a, c, g, or t
  misc_feature (2733)..(2736): n is a, c, g, or t
  misc_feature (2738)..(2738): n is a, c, g, or t
  misc_feature (2740)..(2747): n is a, c, g, or t
  misc_feature (2749)..(2750): n is a, c, g, or t
  misc_feature (2755)..(2755): n is a, c, g, or t
  misc_feature (2758)..(2759): n is a, c, g, or t
  misc_feature (2761)..(2762): n is a, c, g, or t
  misc_feature (2765)..(2767): n is a, c, g, or t
  misc_feature (2769)..(2771): n is a, c, g, or t
  misc_feature (2775)..(2775): n is a, c, g, or t
  misc_feature (2777)..(2780): n is a, c, g, or t
  misc_feature (2782)..(2783): n is a, c, g, or t
  misc_feature (2785)..(2785): n is a, c, g, or t
  misc_feature (2788)..(2790): n is a, c, g, or t
  misc_feature (2792)..(2792): n is a, c, g, or t
  misc_feature (2794)..(2794): n is a, c, g, or t
  misc_feature (2796)..(2796): n is a, c, g, or t
  misc_feature (2798)..(2805): n is a, c, g, or t
  misc_feature (2808)..(2808): n is a, c, g, or t
  misc_feature (2810)..(2812): n is a, c, g, or t
  misc_feature (2814)..(2815): n is a, c, g, or t
  misc_feature (2818)..(2818): n is a, c, g, or t
  misc_feature (2822)..(2824): n is a, c, g, or t
  misc_feature (2827)..(2829): n is a, c, g, or t
  misc_feature (2832)..(2832): n is a, c, g, or t
  misc_feature (2834)..(2837): n is a, c, g, or t
  misc_feature (2840)..(2840): n is a, c, g, or t
  misc_feature (2843)..(2845): n is a, c, g, or t
  misc_feature (2848)..(2848): n is a, c, g, or t
  misc_feature (2851)..(2856): n is a, c, g, or t
  misc_feature (2859)..(2861): n is a, c, g, or t
  misc_feature (2863)..(2864): n is a, c, g, or t
  misc_feature (2867)..(2868): n is a, c, g, or t
  misc_feature (2872)..(2876): n is a, c, g, or t
  misc_feature (2878)..(2879): n is a, c, g, or t
  misc_feature (2881)..(2882): n is a, c, g, or t
  misc_feature (2887)..(2887): n is a, c, g, or t
  misc_feature (2889)..(2890): n is a, c, g, or t
  misc_feature (2892)..(2892): n is a, c, g, or t
  misc_feature (2894)..(2900): n is a, c, g, or t
  misc_feature (2902)..(2903): n is a, c, g, or t
  misc_feature (2907)..(2910): n is a, c, g, or t
  misc_feature (2912)..(2912): n is a, c, g, or t
  misc_feature (2914)..(2914): n is a, c, g, or t
  misc_feature (2918)..(2919): n is a, c, g, or t
  misc_feature (2921)..(2921): n is a, c, g, or t
  misc_feature (2924)..(2926): n is a, c, g, or t
  misc_feature (2931)..(2931): n is a, c, g, or t
  misc_feature (2933)..(2933): n is a, c, g, or t
  misc_feature (2935)..(2935): n is a, c, g, or t
  misc_feature (2940)..(2941): n is a, c, g, or t
  misc_feature (2947)..(2947): n is a, c, g, or t
  misc_feature (2950)..(2952): n is a, c, g, or t
  misc_feature (2955)..(2957): n is a, c, g, or t
  misc_feature (2959)..(2964): n is a, c, g, or t
  misc_feature (2966)..(2966): n is a, c, g, or t
  misc_feature (2968)..(2969): n is a, c, g, or t
  misc_feature (2971)..(2973): n is a, c, g, or t
  misc_feature (2975)..(2978): n is a, c, g, or t
  misc_feature (2981)..(2981): n is a, c, g, or t
  misc_feature (2983)..(2983): n is a, c, g, or t
  misc_feature (2986)..(2989): n is a, c, g, or t
  misc_feature (2991)..(2991): n is a, c, g, or t
  misc_feature (2995)..(2995): n is a, c, g, or t
  misc_feature (2998)..(2998): n is a, c, g, or t
  misc_feature (3002)..(3004): n is a, c, g, or t
  misc_feature (3006)..(3006): n is a, c, g, or t
  misc_feature (3010)..(3012): n is a, c, g, or t
  misc_feature (3014)..(3014): n is a, c, g, or t
  misc_feature (3018)..(3022): n is a, c, g, or t
  misc_feature (3024)..(3026): n is a, c, g, or t
  misc_feature (3029)..(3030): n is a, c, g, or t
  misc_feature (3032)..(3033): n is a, c, g, or t
  misc_feature (3036)..(3036): n is a, c, g, or t
  misc_feature (3039)..(3039): n is a, c, g, or t
  misc_feature (3041)..(3041): n is a, c, g, or t
  misc_feature (3044)..(3045): n is a, c, g, or t
  misc_feature (3047)..(3048): n is a, c, g, or t
  misc_feature (3050)..(3050): n is a, c, g, or t
  misc_feature (3053)..(3055): n is a, c, g, or t
  misc_feature (3057)..(3058): n is a, c, g, or t
  misc_feature (3060)..(3060): n is a, c, g, or t
  misc_feature (3064)..(3064): n is a, c, g, or t
  misc_feature (3066)..(3071): n is a, c, g, or t
  misc_feature (3073)..(3075): n is a, c, g, or t
  misc_feature (3077)..(3078): n is a, c, g, or t
  misc_feature (3081)..(3081): n is a, c, g, or t
  misc_feature (3083)..(3083): n is a, c, g, or t
  misc_feature (3479)..(3479): n is a, c, g, or t
  misc_feature (3481)..(3481): n is a, c, g, or t
  misc_feature (3484)..(3484): n is a, c, g, or t
  misc_feature (3486)..(3486): n is a, c, g, or t
  misc_feature (3489)..(3489): n is a, c, g, or t
  misc_feature (3491)..(3491): n is a, c, g, or t
  misc_feature (3495)..(3497): n is a, c, g, or t
  misc_feature (3501)..(3502): n is a, c, g, or t
  misc_feature (3504)..(3504): n is a, c, g, or t
  misc_feature (3506)..(3508): n is a, c, g, or t
  misc_feature (3510)..(3510): n is a, c, g, or t
  misc_feature (3513)..(3514): n is a, c, g, or t
  misc_feature (3516)..(3516): n is a, c, g, or t
  misc_feature (3518)..(3518): n is a, c, g, or t
  misc_feature (3520)..(3523): n is a, c, g, or t
  misc_feature (3525)..(3525): n is a, c, g, or t
  misc_feature (3528)..(3528): n is a, c, g, or t
  misc_feature (3530)..(3531): n is a, c, g, or t
  misc_feature (3533)..(3533): n is a, c, g, or t
  misc_feature (3535)..(3535): n is a, c, g, or t
  misc_feature (3538)..(3538): n is a, c, g, or t
  misc_feature (3540)..(3540): n is a, c, g, or t
  misc_feature (3542)..(3544): n is a, c, g, or t
  misc_feature (3547)..(3547): n is a, c, g, or t
  misc_feature (3549)..(3549): n is a, c, g, or t
  misc_feature (3552)..(3552): n is a, c, g, or t
  misc_feature (3555)..(3559): n is a, c, g, or t
  misc_feature (3561)..(3563): n is a, c, g, or t
  misc_feature (3566)..(3569): n is a, c, g, or t
  misc_feature (3574)..(3575): n is a, c, g, or t
  misc_feature (3578)..(3580): n is a, c, g, or t
  misc_feature (3582)..(3584): n is a, c, g, or t
  misc_feature (3586)..(3588): n is a, c, g, or t
  misc_feature (3591)..(3591): n is a, c, g, or t
  misc_feature (3594)..(3595): n is a, c, g, or t
  misc_feature (3600)..(3600): n is a, c, g, or t
  misc_feature (3603)..(3603): n is a, c, g, or t
  misc_feature (3605)..(3609): n is a, c, g, or t
  misc_feature (3611)..(3612): n is a, c, g, or t
  misc_feature (3616)..(3617): n is a, c, g, or t
  misc_feature (3621)..(3622): n is a, c, g, or t
  misc_feature (3626)..(3627): n is a, c, g, or t
  misc_feature (3630)..(3630): n is a, c, g, or t
  misc_feature (3632)..(3633): n is a, c, g, or t
  misc_feature (3635)..(3635): n is a, c, g, or t
  misc_feature (3637)..(3638): n is a, c, g, or t
  misc_feature (3640)..(3640): n is a, c, g, or t
  misc_feature (3642)..(3642): n is a, c, g, or t
  misc_feature (3644)..(3645): n is a, c, g, or t
  misc_feature (3648)..(3651): n is a, c, g, or t
  misc_feature (3653)..(3654): n is a, c, g, or t
  misc_feature (3660)..(3662): n is a, c, g, or t
  misc_feature (3666)..(3667): n is a, c, g, or t
  misc_feature (3669)..(3669): n is a, c, g, or t
  misc_feature (3671)..(3673): n is a, c, g, or t
  misc_feature (3675)..(3675): n is a, c, g, or t
  misc_feature (3678)..(3679): n is a, c, g, or t
  misc_feature (3681)..(3681): n is a, c, g, or t
  misc_feature (3683)..(3683): n is a, c, g, or t
  misc_feature (3685)..(3688): n is a, c, g, or t
  misc_feature (3690)..(3690): n is a, c, g, or t
  misc_feature (3693)..(3693): n is a, c, g, or t
  misc_feature (3695)..(3695): n is a, c, g, or t
  misc_feature (3698)..(3698): n is a, c, g, or t
  misc_feature (3700)..(3700): n is a, c, g, or t
  misc_feature (3703)..(3703): n is a, c, g, or t
  misc_feature (3705)..(3705): n is a, c, g, or t
  misc_feature (3708)..(3708): n is a, c, g, or t
  misc_feature (3710)..(3710): n is a, c, g, or t
  misc_feature (3713)..(3713): n is a, c, g, or t
  misc_feature (3715)..(3715): n is a, c, g, or t
  misc_feature (3717)..(3717): n is a, c, g, or t
  misc_feature (3719)..(3722): n is a, c, g, or t
  misc_feature (3724)..(3726): n is a, c, g, or t
  misc_feature (3729)..(3729): n is a, c, g, or t
  misc_feature (3731)..(3732): n is a, c, g, or t
  misc_feature (3734)..(3735): n is a, c, g, or t
  misc_feature (3738)..(3740): n is a, c, g, or t
  misc_feature (3742)..(3744): n is a, c, g, or t
  misc_feature (3747)..(3748): n is a, c, g, or t
  misc_feature (3751)..(3751): n is a, c, g, or t
  misc_feature (3756)..(3756): n is a, c, g, or t
  misc_feature (3760)..(3760): n is a, c, g, or t
  misc_feature (3765)..(3765): n is a, c, g, or t
  misc_feature (3770)..(3771): n is a, c, g, or t
  misc_feature (3776)..(3776): n is a, c, g, or t
  misc_feature (3781)..(3782): n is a, c, g, or t
  misc_feature (3786)..(3787): n is a, c, g, or t
  misc_feature (3791)..(3791): n is a, c, g, or t
  misc_feature (3796)..(3796): n is a, c, g, or t
  misc_feature (3801)..(3802): n is a, c, g, or t
  misc_feature (3813)..(3814): n is a, c, g, or t
  misc_feature (3820)..(3822): n is a, c, g, or t
  misc_feature (3826)..(3827): n is a, c, g, or t
  misc_feature (3829)..(3829): n is a, c, g, or t
  misc_feature (3831)..(3831): n is a, c, g, or t
  misc_feature (3833)..(3836): n is a, c, g, or t
  misc_feature (3838)..(3838): n is a, c, g, or t
  misc_feature (3841)..(3841): n is a, c, g, or t
  misc_feature (3843)..(3843): n is a, c, g, or t
  misc_feature (3846)..(3846): n is a, c, g, or t
  misc_feature (3848)..(3848): n is a, c, g, or t
  misc_feature (3868)..(4000): n is a, c, g, or t
nanntannnannancacatnannattnatnangtnantnnantnnannttnnnnnnaaaacnttnttannagntnttnaaanttttaatannnnnnttatnatttatannatnngnattatttntntnannattgtttnanttatntnaanannnattnaaanaattattaatanattnannananttnntataannantgttattnnnattattannanaanaatnattattttttnaattantnanannattatnnaanttattatnatnnaanctanttnnattattatnnatattttnatnattanaataattanaatnattnntaanatntnnaaannnntcntntnatttaatnnnntaanatttantntaattntnntnaatattttnnnantnatnnnaattnnnntnnnntntanantnannaatnnatnntnatnannaantnnnnanancatcnnnatnnanttnntaannatngantnntnnangtnnagnnnntntnnnnnnnnttnnntcantannannnnnttttnntntnnnnnnnnnntnnnngtnnnnttnatnannnnannnnnntnnntnnnnngngnatnnattnnnnnnannnagtttanannnctagtnncnnntntantnnnntnnttantnntnttntnatttnnnnnatnataatnntnattanaannannnnntnnatnaaaatttnnatnnttnnnanttttaataatcaaagtcttaataataatcaaattttacaaatcataatttcaataattaaaatacaaagaatcaaaattttaataattttaataatccaannntnantnnnantntnannnntannnnnnatntcnnatnnnnaatnnnnantnnnannttnaattnnnnntnnnntnnnnnntnnnnannnttnaantttnaannttnaanntnnnaantntnnnattnnnnattnnnnatnnganatnnnanannntannanttangnnntannnnnnnnnntngncnnnannnnannanntntnanntnttnaanntnnnnnnnnnnccnnannnnnnnnaatngnanannnnntnnnnntnnnnaatnnanaannnnnaannnnnnnnntnntgttnannntnnannnnnnnnnnntntnananntnntnnnnntnntantnntnntnantntnnnantntnnnnnttttnntntttnnantntnnnannnnnnnannnntnnnnnnnnnannnnnnnannnnnnnnntngtnnnnnnnnnnttnaannnnnnnnnatgatncnannnnnnnnnntnntngnnnnnnnnnnntnnnntnnnnnantttnntnattnatttattgatttatnnntntatnnntntnnttanntnntnaaanannnnnnnnantnttannntnnnantantnannnnnntnnannnantnaaaanannanannnannnatnnntnnantannacnatngcnntnnngnngnnnnnannnananananannnnnnnnnnatnnnntantntnnnantntnnantnntnnannatnntnanannnnnntanttanttanntantnnannnntatanaaanananatnntatanannttntnnnnanananaaanngnnnatatatcattgttgacaaaataaaacatttcatttttgcaatattaattctatcattattaattaaaataatattaattaacaatgaatttaaataattaaaaaaagtataaaataattaatgggtaatcatgaattactatatatttattatatactgaactatattctaaataataaaataaaaatttaataatactttggagatataataaacaatattaattgattaataaaaatgatatattaataaaaaataaattaataagtaatatatatataacaaaacaatattacacaagaaaaaaacaataataaatataattcnttnnaaaaaaaaaaaaaaaaaattnatttttttaatataagaattaaaataaaacctttcacaataaatagataaataaataaatattataaattataaaattgaatttattaatttttataatttatttttataaattcttttctataaaaatgtataaataaataatttaaagtttaataaatatattattttttttaaatcaataattaaaaaataaatattatatcaaaattaantaaaataatactatttaattaaattagttataaattatttatataataaatctattattatttttaaatatttaatattaaattataaatatataaatgaataaattgataaatcttttttagaactatgtggagaatgtatttttattgttttattaattattaaaagaaacaaaaagtttaataaaattatttttacattaaactttttcatatatttaaaagttcattatatataatatatatattttttatttaaacatattcataattttcattaaataaataaaattttttttttttatgttttatattattttttataatttgtagatttttaaattaaatctttaaaannnaatnnantnannnnttnaatntnttnntnnatntnnaannannnnatnnnnnnantnnnnnantanantannanaannnannnnnnnannntnnnnntntnnntntnttnntttnnttnntttnnnnntnnnanannnnnnannnnnttannnatnnnnnantanntnnntannnntntnnnnnnnntnntaacnttnnanngtnnnannntatnannnnannanatnnnantntntnnnnnnnnatnannnanntantcannnatnnnttnannnnttnaannnttnaannnnnnaannnannaanntatnnnnntnntnnaattntnnantnnnnnnntnnaaannnntnanatanntntannnatttnananttttnnattttntannnttnnntnnnnnntnannannnannnntananaannnnanaaantantaannnantaannnantaannnnntnnnaanntnnaanaananaannanntnaannntnnanatanannnnnnannnanngantnaaaataaaataaaataaaataaattagtaataattttgaaaaataaaataaaataaatagttgaaatataaatataaagtacagattgaatgaattaaaataaaataaaataaaataaaataaatagtagaatattaaataagaaagtacagattgaataaaataagataaaataaaataaatagtagagtataaatgtaaagtacagattgaataaaataaaataaaaatgtaaagtacagattgaataaaataaaataaaataagataaaataaatagtagagtataaatgtaaagtaaaataaaataaaataaaataaaaatgtaaagtacagattgaataaaataaaataaaataagataaaataaatagtagagtataaatgtaaaataananaananaananaaannnaaannanannntnaannananannnnanaanannananaananannntanantanaannnnnannnaannnnaaatnnaannnannnannnaanaanntaaantanannnnnannaaannaaannaaannaanannanannanananntannnnannataaannnaaannanannntnaannananannnnanaananaananaananaananaanananannnnannntananntnnaannnannnatnnaanaaaanaaantaaantaaannaaaanaaaannaaannaaanaaaanaaaannaaataaaatannataaannnaaannananannnnanaananaananaaaataaaataaaataaaannnnnnnnnnnnnnnnnnnnnnnnnnnnnnnnnnnnnnnnnnnnnnnnnnnnnnnnnnnnnnnnnnnnnnnnnnnnnnnnnnnnnnnnnnnnnnnnnnnnnnnnnnnnnnnnnnnnnnnnnnnnnnnnnnnnn

SEQ ID NO: 715 - DNA, 4000 bp, Escherichia coli
  misc_feature (2506)..(2506): n is a, c, g, or t
  misc_feature (2545)..(2545): n is a, c, g, or t
  misc_feature (2547)..(2548): n is a, c, g, or t
  misc_feature (2554)..(2554): n is a, c, g, or t
  misc_feature (2558)..(2558): n is a, c, g, or t
  misc_feature (2560)..(2561): n is a, c, g, or t
  misc_feature (2565)..(2565): n is a, c, g, or t
  misc_feature (2567)..(2567): n is a, c, g, or t
  misc_feature (2575)..(2576): n is a, c, g, or t
  misc_feature (2579)..(2579): n is a, c, g, or t
  misc_feature (2581)..(2581): n is a, c, g, or t
  misc_feature (2585)..(2591): n is a, c, g, or t
  misc_feature (2594)..(2595): n is a, c, g, or t
  misc_feature (2598)..(2598): n is a, c, g, or t
  misc_feature (2600)..(2601): n is a, c, g, or t
  misc_feature (2604)..(2606): n is a, c, g, or t
  misc_feature (2608)..(2608): n is a, c, g, or t
  misc_feature (2610)..(2610): n is a, c, g, or t
  misc_feature (2613)..(2613): n is a, c, g, or t
  misc_feature (2615)..(2615): n is a, c, g, or t
  misc_feature (2617)..(2617): n is a, c, g, or t
  misc_feature (2622)..(2622): n is a, c, g, or t
  misc_feature (2624)..(2626): n is a, c, g, or t
  misc_feature (2629)..(2630): n is a, c, g, or t
  misc_feature (2632)..(2634): n is a, c, g, or t
  misc_feature (2636)..(2637): n is a, c, g, or t
  misc_feature (2639)..(2640): n is a, c, g, or t
  misc_feature (2645)..(2646): n is a, c, g, or t
  misc_feature (2649)..(2649): n is a, c, g, or t
  misc_feature (2652)..(2652): n is a, c, g, or t
  misc_feature (2654)..(2659): n is a, c, g, or t
  misc_feature (2661)..(2661): n is a, c, g, or t
  misc_feature (2664)..(2665): n is a, c, g, or t
  misc_feature (2668)..(2668): n is a, c, g, or t
  misc_feature (2670)..(2670): n is a, c, g, or t
  misc_feature (2672)..(2672): n is a, c, g, or t
  misc_feature (2675)..(2675): n is a, c, g, or t
  misc_feature (2679)..(2679): n is a, c, g, or t
  misc_feature (2685)..(2685): n is a, c, g, or t
  misc_feature (2689)..(2691): n is a, c, g, or t
  misc_feature (2694)..(2694): n is a, c, g, or t
  misc_feature (2697)..(2698): n is a, c, g, or t
  misc_feature (2700)..(2705): n is a, c, g, or t
  misc_feature (2707)..(2708): n is a, c, g, or t
  misc_feature (2711)..(2717): n is a, c, g, or t
  misc_feature (2719)..(2719): n is a, c, g, or t
  misc_feature (2723)..(2723): n is a, c, g, or t
  misc_feature (2725)..(2725): n is a, c, g, or t
  misc_feature (2728)..(2728): n is a, c, g, or t
  misc_feature (2730)..(2732): n is a, c, g, or t
  misc_feature (2737)..(2737): n is a, c, g, or t
  misc_feature (2739)..(2739): n is a, c, g, or t
  misc_feature (2741)..(2741): n is a, c, g, or t
  misc_feature (2743)..(2743): n is a, c, g, or t
  misc_feature (2751)..(2752): n is a, c, g, or t
  misc_feature (2754)..(2754): n is a, c, g, or t
  misc_feature (2756)..(2756): n is a, c, g, or t
  misc_feature (2761)..(2761): n is a, c, g, or t
  misc_feature (2764)..(2764): n is a, c, g, or t
  misc_feature (2767)..(2770): n is a, c, g, or t
  misc_feature (2772)..(2773): n is a, c, g, or t
  misc_feature (2776)..(2776): n is a, c, g, or t
  misc_feature (2779)..(2779): n is a, c, g, or t
  misc_feature (2781)..(2781): n is a, c, g, or t
  misc_feature (2783)..(2784): n is a, c, g, or t
  misc_feature (2788)..(2788): n is a, c, g, or t
  misc_feature (2790)..(2792): n is a, c, g, or t
  misc_feature (2794)..(2795): n is a, c, g, or t
  misc_feature (2798)..(2801): n is a, c, g, or t
  misc_feature (2803)..(2804): n is a, c, g, or t
  misc_feature (2806)..(2808): n is a, c, g, or t
  misc_feature (2810)..(2810): n is a, c, g, or t
  misc_feature (2814)..(2821): n is a, c, g, or t
  misc_feature (2823)..(2830): n is a, c, g, or t
  misc_feature (2832)..(2833): n is a, c, g, or t
  misc_feature (2836)..(2837): n is a, c, g, or t
  misc_feature (2839)..(2839): n is a, c, g, or t
  misc_feature (2844)..(2846): n is a, c, g, or t
  misc_feature (2849)..(2850): n is a, c, g, or t
  misc_feature (2852)..(2852): n is a, c, g, or t
  misc_feature (2856)..(2859): n is a, c, g, or t
  misc_feature (2861)..(2862): n is a, c, g, or t
  misc_feature (2865)..(2865): n is a, c, g, or t
  misc_feature (2867)..(2867): n is a, c, g, or t
  misc_feature (2870)..(2870): n is a, c, g, or t
  misc_feature (2872)..(2875): n is a, c, g, or t
  misc_feature (2877)..(2877): n is a, c, g, or t
  misc_feature (2884)..(2884): n is a, c, g, or t
  misc_feature (2886)..(2888): n is a, c, g, or t
  misc_feature (2890)..(2890): n is a, c, g, or t
  misc_feature (2892)..(2892): n is a, c, g, or t
  misc_feature (2894)..(2904): n is a, c, g, or t
  misc_feature (2906)..(2907): n is a, c, g, or t
  misc_feature (2912)..(2915): n is a, c, g, or t
  misc_feature (2917)..(2917): n is a, c, g, or t
  misc_feature (2920)..(2922): n is a, c, g, or t
  misc_feature (2924)..(2924): n is a, c, g, or t
  misc_feature (2926)..(2927): n is a, c, g, or t
  misc_feature (2930)..(2930): n is a, c, g, or t
  misc_feature (2932)..(2932): n is a, c, g, or t
  misc_feature (2934)..(2935): n is a, c, g, or t
  misc_feature (2937)..(2941): n is a, c, g, or t
  misc_feature (2943)..(2948): n is a, c, g, or t
  misc_feature (2950)..(2950): n is a, c, g, or t
  misc_feature (2952)..(2953): n is a, c, g, or t
  misc_feature (2955)..(2956): n is a, c, g, or t
  misc_feature (2959)..(2959): n is a, c, g, or t
  misc_feature (2961)..(2963): n is a, c, g, or t
  misc_feature (2966)..(2966): n is a, c, g, or t
  misc_feature (2970)..(2970): n is a, c, g, or t
  misc_feature (2973)..(2973): n is a, c, g, or t
  misc_feature (2980)..(2983): n is a, c, g, or t
  misc_feature (2985)..(2986): n is a, c, g, or t
  misc_feature (2988)..(2990): n is a, c, g, or t
  misc_feature (2992)..(2992): n is a, c, g, or t
  misc_feature (2994)..(2995): n is a, c, g, or t
  misc_feature (2997)..(2997): n is a, c, g, or t
  misc_feature (3000)..(3000): n is a, c, g, or t
  misc_feature (3003)..(3005): n is a, c, g, or t
  misc_feature (3009)..(3009): n is a, c, g, or t
  misc_feature (3012)..(3013): n is a, c, g, or t
  misc_feature (3015)..(3015): n is a, c, g, or t
  misc_feature (3019)..(3019): n is a, c, g, or t
  misc_feature (3021)..(3021): n is a, c, g, or t
  misc_feature (3025)..(3026): n is a, c, g, or t
  misc_feature (3028)..(3034): n is a, c, g, or t
  misc_feature (3036)..(3036): n is a, c, g, or t
  misc_feature (3041)..(3044): n is a, c, g, or t
  misc_feature (3046)..(3046): n is a, c, g, or t
  misc_feature (3048)..(3049): n is a, c, g, or t
  misc_feature (3051)..(3051): n is a, c, g, or t
  misc_feature (3053)..(3053): n is a, c, g, or t
  misc_feature (3056)..(3056): n is a, c, g, or t
  misc_feature (3061)..(3061): n is a, c, g, or t
  misc_feature (3063)..(3063): n is a, c, g, or t
  misc_feature (3067)..(3068): n is a, c, g, or t
  misc_feature (3071)..(3072): n is a, c, g, or t
  misc_feature (3075)..(3075): n is a, c, g, or t
  misc_feature (3081)..(3081): n is a, c, g, or t
  misc_feature (3084)..(3084): n is a, c, g, or t
  misc_feature (3086)..(3088): n is a, c, g, or t
  misc_feature (3090)..(3093): n is a, c, g, or t
  misc_feature (3096)..(3098): n is a, c, g, or t
  misc_feature (3100)..(3103): n is a, c, g, or t
  misc_feature (3105)..(3105): n is a, c, g, or t
  misc_feature (3107)..(3115): n is a, c, g, or t
  misc_feature (3118)..(3118): n is a, c, g, or t
  misc_feature (3121)..(3121): n is a, c, g, or t
  misc_feature (3127)..(3128): n is a, c, g, or t
  misc_feature (3130)..(3131): n is a, c, g, or t
  misc_feature (3133)..(3133): n is a, c, g, or t
  misc_feature (3135)..(3137): n is a, c, g, or t
  misc_feature (3141)..(3142): n is a, c, g, or t
  misc_feature (3147)..(3151): n is a, c, g, or t
  misc_feature (3153)..(3154): n is a, c, g, or t
  misc_feature (3156)..(3156): n is a, c, g, or t
  misc_feature (3158)..(3160): n is a, c, g, or t
  misc_feature (3162)..(3162): n is a, c, g, or t
  misc_feature (3165)..(3166): n is a, c, g, or t
  misc_feature (3168)..(3169): n is a, c, g, or t
  misc_feature (3172)..(3175): n is a, c, g, or t
  misc_feature (3178)..(3178): n is a, c, g, or t
  misc_feature (3182)..(3183): n is a, c, g, or t
  misc_feature (3187)..(3187): n is a, c, g, or t
  misc_feature (3189)..(3190): n is a, c, g, or t
  misc_feature (3194)..(3195): n is a, c, g, or t
  misc_feature (3197)..(3200): n is a, c, g, or t
  misc_feature (3204)..(3205): n is a, c, g, or t
  misc_feature (3207)..(3207): n is a, c, g, or t
  misc_feature (3209)..(3209): n is a, c, g, or t
  misc_feature (3212)..(3212): n is a, c, g, or t
  misc_feature (3218)..(3218): n is a, c, g, or t
  misc_feature (3220)..(3225): n is a, c, g, or t
  misc_feature (3228)..(3229): n is a, c, g, or t
  misc_feature (3231)..(3235): n is a, c, g, or t
  misc_feature (3237)..(3238): n is a, c, g, or t
  misc_feature (3242)..(3246): n is a, c, g, or t
  misc_feature (3249)..(3257): n is a, c, g, or t
  misc_feature (3260)..(3260): n is a, c, g, or t
  misc_feature (3262)..(3262): n is a, c, g, or t
  misc_feature (3265)..(3271): n is a, c, g, or t
  misc_feature (3273)..(3273): n is a, c, g, or t
  misc_feature (3276)..(3276): n is a, c, g, or t
  misc_feature (3279)..(3279): n is a, c, g, or t
  misc_feature (3281)..(3284): n is a, c, g, or t
  misc_feature (3287)..(3289): n is a, c, g, or t
  misc_feature (3291)..(3291): n is a, c, g, or t
  misc_feature (3293)..(3294): n is a, c, g, or t
  misc_feature (3298)..(3298): n is a, c, g, or t
  misc_feature (3300)..(3300): n is a, c, g, or t
  misc_feature (3305)..(3305): n is a, c, g, or t
  misc_feature (3307)..(3307): n is a, c, g, or t
  misc_feature (3310)..(3312): n is a, c, g, or t
  misc_feature (3314)..(3316): n is a, c, g, or t
  misc_feature (3318)..(3318): n is a, c, g, or t
  misc_feature (3320)..(3322): n is a, c, g, or t
  misc_feature (3324)..(3324): n is a, c, g, or t
  misc_feature (3326)..(3329): n is a, c, g, or t
  misc_feature (3331)..(3335): n is a, c, g, or t
  misc_feature (3340)..(3342): n is a, c, g, or t
  misc_feature (3344)..(3344): n is a, c, g, or t
  misc_feature (3346)..(3348): n is a, c, g, or t
  misc_feature (3351)..(3351): n is a, c, g, or t
  misc_feature (3354)..(3354): n is a, c, g, or t
  misc_feature (3356)..(3358): n is a, c, g, or t
  misc_feature (3360)..(3360): n is a, c, g, or t
  misc_feature (3362)..(3363): n is a, c, g, or t
  misc_feature (3367)..(3367): n is a, c, g, or t
  misc_feature (3371)..(3373): n is a, c, g, or t
  misc_feature (3375)..(3379): n is a, c, g, or t
  misc_feature (3382)..(3383): n is a, c, g, or t
  misc_feature (3386)..(3386): n is a, c, g, or t
  misc_feature (3388)..(3388): n is a, c, g, or t
  misc_feature (3390)..(3390): n is a, c, g, or t
  misc_feature (3392)..(3392): n is a, c, g, or t
  misc_feature (3394)..(3395): n is a, c, g, or t
  misc_feature (3400)..(3400): n is a, c, g, or t
  misc_feature (3403)..(3403): n is a, c, g, or t
  misc_feature (3405)..(3405): n is a, c, g, or t
  misc_feature (3407)..(3407): n is a, c, g, or t
  misc_feature (3409)..(3409): n is a, c, g, or t
  misc_feature (3411)..(3411): n is a, c, g, or t
  misc_feature (3414)..(3421): n is a, c, g, or t
  misc_feature (3425)..(3425): n is a, c, g, or t
  misc_feature (3428)..(3436): n is a, c, g, or t
  misc_feature (3438)..(3438): n is a, c, g, or t
  misc_feature (3441)..(3445): n is a, c, g, or t
  misc_feature (3447)..(3449): n is a, c, g, or t
  misc_feature (3451)..(3464): n is a, c, g, or t
  misc_feature (3466)..(3466): n is a, c, g, or t
  misc_feature (3469)..(3472): n is a, c, g, or t
  misc_feature (3474)..(3482): n is a, c, g, or t
  misc_feature (3484)..(3485): n is a, c, g, or t
  misc_feature (3487)..(3489): n is a, c, g, or t
  misc_feature (3491)..(3491): n is a, c, g, or t
  misc_feature (3493)..(3495): n is a, c, g, or t
  misc_feature (3499)..(3499): n is a, c, g, or t
  misc_feature (3501)..(3501): n is a, c, g, or t
  misc_feature (3503)..(3503): n is a, c, g, or t
  misc_feature (3505)..(3506): n is a, c, g, or t
  misc_feature (3508)..(3508): n is a, c, g, or t
  misc_feature (3510)..(3513): n is a, c, g, or t
  misc_feature (3515)..(3515): n is a, c, g, or t
  misc_feature (3517)..(3518): n is a, c, g, or t
  misc_feature (3520)..(3524): n is a, c, g, or t
  misc_feature (3526)..(3536): n is a, c, g, or t
  misc_feature (3538)..(3538): n is a, c, g, or t
  misc_feature (3540)..(3542): n is a, c, g, or t
  misc_feature (3545)..(3545): n is a, c, g, or t
  misc_feature (3547)..(3548): n is a, c, g, or t
  misc_feature (3550)..(3551): n is a, c, g, or t
  misc_feature (3553)..(3562): n is a, c, g, or t
  misc_feature (3565)..(3565): n is a, c, g, or t
  misc_feature (3567)..(3577): n is a, c, g, or t
  misc_feature (3579)..(3579): n is a, c, g, or t
  misc_feature (3581)..(3582): n is a, c, g, or t
  misc_feature (3585)..(3596): n is a, c, g, or t
  misc_feature (3598)..(3602): n is a, c, g, or t
  misc_feature (3605)..(3608): n is a, c, g, or t
  misc_feature (3611)..(3616): n is a, c, g, or t
  misc_feature (3618)..(3619): n is a, c, g, or t
  misc_feature (3622)..(3629): n is a, c, g, or t
  misc_feature (3631)..(3632): n is a, c, g, or t
  misc_feature (3634)..(3640): n is a, c, g, or t
  misc_feature (3642)..(3645): n is a, c, g, or t
  misc_feature (3647)..(3650): n is a, c, g, or t
  misc_feature (3652)..(3653): n is a, c, g, or t
  misc_feature (3655)..(3657): n is a, c, g, or t
  misc_feature (3659)..(3661): n is a, c, g, or t
  misc_feature (3665)..(3665): n is a, c, g, or t
  misc_feature (3667)..(3670): n is a, c, g, or t
  misc_feature (3672)..(3674): n is a, c, g, or t
  misc_feature (3678)..(3679): n is a, c, g, or t
  misc_feature (3683)..(3685): n is a, c, g, or t
  misc_feature (3687)..(3690): n is a, c, g, or t
  misc_feature (3693)..(3702): n is a, c, g, or t
  misc_feature (3705)..(3711): n is a, c, g, or t
  misc_feature (3713)..(3720): n is a, c, g, or t
  misc_feature (3722)..(3724): n is a, c, g, or t
  misc_feature (3726)..(3727): n is a, c, g, or t
  misc_feature (3729)..(3733): n is a, c, g, or t
  misc_feature (3735)..(3737): n is a, c, g, or t
  misc_feature (3739)..(3743): n is a, c, g, or t
  misc_feature (3746)..(3749): n is a, c, g, or t
  misc_feature (3753)..(3758): n is a, c, g, or t
  misc_feature (3760)..(3764): n is a, c, g, or t
  misc_feature (3766)..(3772): n is a, c, g, or t
  misc_feature (3774)..(3776): n is a, c, g, or t
  misc_feature (3780)..(3782): n is a, c, g, or t
  misc_feature (3784)..(3788): n is a, c, g, or t
  misc_feature (3790)..(3795): n is a, c, g, or t
  misc_feature (3797)..(3797): n is a, c, g, or t
  misc_feature (3799)..(3806): n is a, c, g, or t
  misc_feature (3810)..(3817): n is a, c, g, or t
  misc_feature (3819)..(3825): n is a, c, g, or t
  misc_feature (3827)..(3827): n is a, c, g, or t
  misc_feature (3832)..(3835): n is a, c, g, or t
  misc_feature (3837)..(3842): n is a, c, g, or t
  misc_feature (3844)..(3845): n is a, c, g, or t
  misc_feature (3847)..(3848): n is a, c, g, or t
  misc_feature (3850)..(3850): n is a, c, g, or t
  misc_feature (3852)..(3852): n is a, c, g, or t
ggtataggggagttaaatgaagagtttacctctttaaagactattattgcccaagctgacgcagtagtacgaaaaatagagaagctaggggatagttgccctacttgtctacaagatattgacgcaggcaaacacacggagttattagaagagcagaagagtgcagtatctattagcactaagaggaagaacgaagtgcagaatctcgtcatcaacttaaaaaaacaattattagaatataaaaagcatcaaactactattgaaaattttgagaagctttctactcttatagacaataaactgcccagtaagacagaagacaagttagagttagaagagaaaatcaataagtttactgccgaaatttctaaaaaacaatcggagattaaggatatatcatctcagaataatgaaataacgaaatttaatactgagttagactatttagttaagcaagtaaaagattttaaactaaagttactttctgaagaatctaacttaaagaaaactaacaatgtatacgctaacttggaagtattaaagaaagcttttagtactaacggtttagtagcgtacaagattgaaaacttagtcaaagacctagaagacttggtaaaccaatacttggccgagttgtccgatggacgctttggcctcgagtttgtggttactaacgacagactgaacgtagttatctctgatgaaggtagggatattgatatccttgcgctaagtagcggcgagttggcccgagttaatacatcaacattactagccattagaaaactaatgagtacactatctaagtctaagattaatgttctattcttagatgaagtaataggagttctggacgacgaaggtagagagaagctaattgaggtattgttaaaagaacatgatctaaatactttcttggttagccataattggtctcatccattgcttactaaaatcaatgttattaaagagaagaagatatcgaggttagaatggcagtagctaataaaagtaaagctaaaggtacgagggccgaggcggccctatgtgtagttcttagaaaggctacaggatggaactgggaaaggatacctttatcaggggctttagatgctaaacacggtctcaaaggcgacgtttatattcctaaggaacttatgaagtacagtgtggaagtgaagcactacaaagatgaccacctcactagtaagttgctaactgggaaaactcctcaaattatggaatggtggaagcagacagtaagagagcagcaggaaaatgaagcggaacaccccttactggtattcaagtttgataggagtaagtggttctgtgcattccttcaagaacctgtgaaggactacaggcacttgtactattccgaaggtatatatttagcaaagttagatgactggcttactgaccgctgtaaagacgattgggtttggaaacgcacataaaacaaaacccgcttaattgcgggttttttattgtctattcaaaaatctactatcgtgtgctccatataaggaaaaggtttgtagtcttcattacctataacaaaccccattaagtcttctatttgatttatatcccccgcaaagtaagagtcctttataggtattatacggttatgattaccttcggggaattcaatatgagtagctactactaaatagtcctcgtttatttctataaattttgtcatattattatcctattgataggttattgatacgtacccatgctttgtagattgaaagtcgaagcccccttgtaatactatagtataacctgtacctcctgtaacagaagtagagaaggtactagaccctctggcggtaccagtagcatactgactggcacaagcagtattatcggcgtacgacccactagcagaccctcccaaggctgaagtggttgccccccttaaatcccaaactgaacgagcacaggtactacaaccatggaagtaacaggtgcctcccttggttgttcctgctccatatattactacatctacagtaccggagtaagggggagtccaagtatacgtaccattggtattatattcataaggaccacaattgtcagtattgcaagactgagagtctgatgttgacccagagcaatcagaccctccataagttgcagaaggattactacaggttctacttctagtttgagtacccccaccgcacgaaactgaacaagaactccaatccccccaagaactccagtctccgttaacggaaggactagtactaaataagtaagaagctttctgctcccctgacgtaggacgacggtcccctcccgagctatagtatttaccgtaatactctgatatattaatagggttagaacccccatgagtactttgtatttcagaccattttatctgtcctgatgattgcattgccattagttattctcctttgaatatttgcccttagtccttagtcaatgatacaaaggcagggtcaacatcatctttaggattagnagtccagtgcatcgtcatattaatctcacgattagactntnnagtttntggncnntaantntcaacacnntcntntgannnnnnnttnnccntnntannntntntgnangntgtgntnnnatnnannntnncnngttanntantantnnnnnnancannctntncnttntgtnttatcngttnnntgnacnntnnnnnngnntannnnnnnancccngnatncnnngccantncnancttggatnntntntgttntgncannnntnncantancntnnaacnannnannttnnnntnntnnntntacnnnnnnnnannnnnnnnannatnntnacatnnntanncnaccnnnncnngtncnaancnnnnangatacantnnncntncnnnnnnnnnnncnnttacnnnntnaannncnannaancnanntnnnnntnnnnnncntnngnnaancnnntgngccntgnatatatnnnnanntnnngncnntnttnttnnnagtncanntntaantncccnntnnnnnnnanttgtnnnnancnnangnacnacatnantgcnnatnncangattgnctntnnnannnngannnannnnantnnnnnnnnncanaanaaaaannannanannntctnnatctnnnnngnntncnnncnccnnannaannnnaanaccnncccnannagcnntnnnnaccnnangntcnatgtanannnnnnccnntnnnnntnnaatnnnnnatnnnnnnnnnccnanatnnnnnnntnctngantnnnnttnnnantnntttncntaatntncgnnnannntnannngntnnnnannnnnatgtnnntntnnnatntgntnnnancnnattnaacnnnannnnnatnnagncntntnanntcctnaancngnancntannnnnnnntgtntcnnnnnnnnntnaannnnncnnntnnnnnnnnnnnnnntntannnntnnnnnnnnntnngnnntntnnnactncngntnntncnnnnantnncnnnnnannnnnnnnnnnantnnnaangnntnntnnnnnnnnnntgntnnnnnnnnnnntnanngtnnnnnnnnnnnntnnnnntannnnccnnnnnntnntannnnnnnnanntnnnnnnntnnnnannnntnntnnnannncatntnnnnannntaanncagnnncnnnngcnnnnnnnnnntcnnnnnnntnnnnnnnngnnntnntnnnnntnnnannnnnaannnnattnnnnnntnnnnnannnnnnntnnnaccnnnannnnnannnnnntnannnnnnnnagannnnnnnncnnnnnnnanatttnnnncnnnnnnannanntntntgactattaatatgattgacttctgttttattttctggattgttaatatatgtttgtgctacaagtctatgaactgataacacatctctattctgctcgttattagaatctctcaatccaacttgtttataccctttttcagtattcc

SEQ ID NO: 716 - DNA, 4000 bp, Escherichia coli
  misc_feature (9)..(9): n is a, c, g, or t
  misc_feature (12)..(12): n is a, c, g, or t
  misc_feature (19)..(19): n is a, c, g, or t
  misc_feature (25)..(25): n is a, c, g, or t
  misc_feature (29)..(29): n is a, c, g, or t
  misc_feature (32)..(32): n is a, c, g, or t
  misc_feature (41)..(41): n is a, c, g, or t
  misc_feature (43)..(43): n is a, c, g, or t
  misc_feature (57)..(57): n is a, c, g, or t
  misc_feature (1755)..(1755): n is a, c, g, or t
  misc_feature (1991)..(1991): n is a, c, g, or t
  misc_feature (3677)..(3677): n is a, c, g, or t
attaagttnaanttcaatnttaganatangangaacatagntntaaatcaaaatatngtagcctcggtaagaatcgaacttgcatctaaagtttaggaaacttctaatctgtccattgaactacgtggccagttttggaagtaggttatgaagattaaatataaaccatatatgtgcaaatcaaccctactgaacctatagttctatcttacttaactttaatcattaaagactaaatttgctctgcaatgtacaacaacattatctcagaaaaccaaggcgtagtgcaaatcatcacaataaaccgtgaagagaagctaaacgcactcaacgtagaactcatacaagaaataggtcaagaagtagctcgtctgaataaggagatgactgtacgcggtatcatccttaccgggaaaggccaaaaagcctttgctgcgggagctgatatatcagagtttgccaattttggcgaagccgaagcaaaagaaatgagtgccaaaggcggaaaagtatttacaagcttggaagaaagtgagatacctataatagcagcagtaaacggatacgccctaggtggcggatgtgaactcacaatggcctgtcacgtgcgtatagcgagcgataatgctctctttggtcagccagaagtaaacctgggagtgcctccaggatatggcggtacgcaacgattagcacagataataggcagaggacgagcactcgatatgctcattacggccaagtctattaatgcggagacggccctcaattacggactagtaacacaagtcgtatcacaagaagaattgctgccaacctgtatcaaatacatagagaaactggtgggcaaatcgccactggccatagccgaggtgataaaatgcaccaatgagttgtacgaaaatataaacggtctacaatacgaaatagacagttttgctagaagcttccaaaccgccgattttaaggaaggcacaacagcgttcctagagaaacgtaagcccgactatacataatatgacattgtggggtgccttttattttggcattctatttgttcttaatgaagcgaacactaattttgaaacaattattaaacaatagaaaaatgaaaaatttaatcttactaactgctttcgtatttggattttctgccataagctttgctcaaactgaagatgctaaagctaacgtaacactatcttctgaggctcaagctaaacttaccttagaaaaaaaatcacacgattttggcacgatagaggaaggtgtacaagcaaccattacctttacattcaaaaacacaggaaacgctccattagtacttaacagtgtgaaagcttcttgcggatgtactactcctaaatggacaaaagagccaatagcaccaggagaggaaggtgtgattactgcaatatataattcaaaaggaagaccaggtaactttaccaaaaccattactgtaaagcacaatggcgaaggtggtactgaattccttactataagaggtgtggtaaatagagctgctccagtagttcaacctactgtggtctctccagagcaataagcacgtattaactaaaataatttcaaaaccctttgcaacgcaaggggtttttagtttacagaaaaaatatacttctctcgtttttgctactcatagctggattagcttgtgcacaaacagattctgtctctttatccgatgcgttgcaaaattttaaagcatcggcaacacagtcactgaacgtaatnccagattctatggaaattatagtcttgaccactgacaccataactgcaatgcctgatagcacgccggctgaacccattatcgcttttgacacggcggtgtaccaattgggaagtatctcacagggcgatattgtaaagcagcgattcacttttagaaatacaggaaacgcagatctagagataattagtgtagtgcccgactgtagttgtactagtccagaatggacattgtagcncataaaaccctgataatcaagctattttatcgcaacttacgattctaaggaagatatgggtaaatttatgaaaaccttaactgtactacacaatgctggtgagggctatggctttgtggagattcaaggtttcgtagcacctaaactataggtctagctcctcccatttcccaaaccaccctgttaatccgcctgtatgtatagctaggacgcgttctcctcgagcaatcgttccattttcacaacacttttggatagttagcagcagcttgcctgtataaatcggatcaagtaatactcctgtttctcggttaaaatcttttataaagtgaactaattcagtattcattttggcataacctccacaatgaaaatcatctaacacattaacgccttgaattccgtaggtgttctccacctcgtgttttatataatccttacctttcagcacttgtacgcctacaagcttagagagttgatgcaatgcctgcaagtgttccgccattccggctagtgtagttcctgttccacaagccaccattattttatcatacttggcggtaactaactcagtgattatgtttttacatcccaccgttcctgcttgacaggcaccaccttctggcacatacaatttcttatccttgataccataggttctgtttacctctttgtattccgttctcgttacaaactggagatgcatcccgtatagtttgcagagtttcaatacggcattttgaaccttaggctcttcgccacggataattccagtagattttttacctagaatagcacaacttgcggctgtggctactaagtgattgctaaatgcaccaccataagtcactacttcgctatagctttcttctgcgaactcacggaatatgcccgacaacttacgccatttatttcctgaaataatggggtgaataaggtcatcccgttttatgcttaaggtgatgccatagacgtcggtccaagaggtgctcacagtgtgaataggactcggtatgtttaactgttgctctatgctcatagtctatgttgccgtaaaatgctctttaataatggaccacgctaggtctgactcataccctttggtcatgacaaattgtacagctttgtaatttttttggtagccttttatggccttaagcgaagctatttttttacgaagcagctctgtaagtacgtccatatactgctcttcctgtatctcttgcaagccttttttaatgcagtagtcagaaatttttcgtcgttttagctcttgtactattttgtttcttccccacttcttgtacctaaactttcctcttacaaaagccaatgcaaaccgctgctcattcaaaaaatcttgcttaatgagctcataaataatttcctctacgtccaccttagctagtccaaaagagtacagcttgtctctcacctcctggtgacaacgctcctgataggcacagtatttggctattttctgttttgcctctttaggtgtatagttctttttagtaggttcaaacacaatgaggctgctaatttaccctacttttgtatttagcttgtacaccttagcacaaatagcagatatcgtaaacggaaaactacaaggcaatgcatcattggagattaccaatatgtatgctgatacccgtaagagcttaaaacaagcagccttatttntagctctaaaaacatcaaaaaccaatggtaattcctttgtaggaactgccatacatcaaggagcttctgctgttttagtgtctgaagtgcccaaggttgaatgtgattacattttggtagatgatacgctcaaggcattgcaatacttagcacaataccatcgtactcagcacactattcccgtagtagccataacaggaagtaacggcaaaaccattgtaaaggaatggcttagcacactgctcaatgatactgagatcgtatgcaaaagcccgaagagttacaactcacaaataggcgttccactttccttatggcaatta

SEQ ID NO: 717 - DNA, 4000 bp, Escherichia coli
  misc_feature (2058)..(2062): n is a, c, g, or t
  misc_feature (2142)..(2142): n is a, c, g, or t
  misc_feature (2229)..(2229): n is a, c, g, or t
  misc_feature (2307)..(2307): n is a, c, g, or t
  misc_feature (2364)..(2364): n is a, c, g, or t
  misc_feature (2456)..(2456): n is a, c, g, or t
  misc_feature (2493)..(2493): n is a, c, g, or t
  misc_feature (2517)..(2518): n is a, c, g, or t
  misc_feature (2526)..(2526): n is a, c, g, or t
  misc_feature (2562)..(2562): n is a, c, g, or t
  misc_feature (2589)..(2589): n is a, c, g, or t
  misc_feature (2712)..(2712): n is a, c, g, or t
  misc_feature (2715)..(2715): n is a, c, g, or t
  misc_feature (2727)..(2727): n is a, c, g, or t
  misc_feature (2754)..(2754): n is a, c, g, or t
  misc_feature (2775)..(2775): n is a, c, g, or t
  misc_feature (2790)..(2790): n is a, c, g, or t
  misc_feature (2799)..(2799): n is a, c, g, or t
  misc_feature (2820)..(2820): n is a, c, g, or t
  misc_feature (2847)..(2847): n is a, c, g, or t
  misc_feature (2872)..(2872): n is a, c, g, or t
  misc_feature (2907)..(2907): n is a, c, g, or t
  misc_feature (2910)..(2910): n is a, c, g, or t
  misc_feature (2970)..(2970): n is a, c, g, or t
  misc_feature (3020)..(3020): n is a, c, g, or t
  misc_feature (3022)..(3023): n is a, c, g, or t
  misc_feature (3025)..(3025): n is a, c, g, or t
  misc_feature (3028)..(3029): n is a, c, g, or t
  misc_feature (3032)..(3033): n is a, c, g, or t
  misc_feature (3037)..(3039): n is a, c, g, or t
  misc_feature (3043)..(3044): n is a, c, g, or t
  misc_feature (3047)..(3047): n is a, c, g, or t
  misc_feature (3093)..(3093): n is a, c, g, or t
  misc_feature (3102)..(3102): n is a, c, g, or t
  misc_feature (3114)..(3114): n is a, c, g, or t
  misc_feature (3174)..(3174): n is a, c, g, or t
  misc_feature (3588)..(3588): n is a, c, g, or t
  misc_feature (3618)..(3618): n is a, c, g, or t
  misc_feature (3645)..(3645): n is a, c, g, or t
  misc_feature (3737)..(3740): n is a, c, g, or t
  misc_feature (3747)..(3747): n is a, c, g, or t
  misc_feature (3752)..(3752): n is a, c, g, or t
  misc_feature (3873)..(3873): n is a, c, g, or t
gggcaatcaaagtgttggaagcctgtcagatagaggaagaagattttttctgccatgtgacgcacaaaacatgggacgtcattctccatgatatacgcaaggcgcacgaaaatgacagcgaaagtgcgccggataccacgcctgccgatgaacttatacgggaagtacaaaaggccatgcaatctccgggggacagggttcagcaattcacggagatattctgcaaggcgttccggctcaaatacaagcggctctcacaagaggaacgaagccttttgaaaaagctgttcaagaaatccccgctgataaaacagtctggtatgaacttccggcgcaggccgtggaaataaaaacagccgttgtaggattttgttcctacagcggctgtttttatttatgaatcttctccaacaaaagacaggatattttcatcagtttgtaatgtaattgttgcgctttctgaatcatcagaataaactcttgttccatatacgcctgtaacaggctcctctaaattttcaaaagttaatccgagtttcgaagaagaattgtcaatcttttcaagcgaatatgtacctgtccattcttgtttatgagtgttatctgttaagataaaacttttttcttcaaaactcaatgtcaaatccaatactggtatgtcatcatgcactgaacctgagaataacatattaccatctaaatcagtaataaattctaaagaccagttatatgatgataccgaccgagtttgggaagaatcacacgaacataagcctacacacataaaaaaacatacgcatattgccaataaccgtttcattttacctattaccaaccttaattcacaactgttttgcatttaattagggaagtgtcacagggtaagaaatagcgaaagctccaccgcctgccaaggcattattagcggtagcaacaccagaaacagaaaccgttcccttatctccgctattacctgttcttccagtatccacatcagtttcgattgtttcttcaccgtcggctaattctgcaaatgccgtattggtggattttttgttcataagcacattaactgtaccagtcataccagtgaactccggttttggagattcataccacggtacatacaacttcacatgaacttgaatcccatcatcctcatcataagttgcataagagttaatacgaacattagcgactgctcttttggtgacaccatcggaaatcataacatcggttaagtatccgtcatattctccaatgactaccggctgttgagtatccgttatttccgttgttgtttccgctgcaaaagcaggaaccgcactcacagaaaaaagcatacaaaacgctaccaacgaggtaaacaatcttttactaaattttttcataaacaatgctcctttctaaaatgaccagaacctacattttttgtattcagttattggcaatatgctactaacctgcaagcacactctcaaatcataaaatgtttcaaatgtacttgttttattttatgatagcacttatttacattgggtacaatagaaaatatacaccattaaaatttaattttttgtgcaaatcgaatcaaatataaaattatatcgctttagatattgtcctgttctaatttaatcacattcataataccacaattcaaggcttcacaaatgcgaaccagcgtttccatgctgatattctttcccttgcccatgttggcaatcatatttgtggtaagaccggcggcaagccgcaaatcctctttcctcatgccacgctctttcagtgtgttccatagtggctgataactaatgtgcataggcttcccgcctttctttccatcgtcaagtgttttatacccattatagcagaaatcttgcgtttccacaatatttcttgactacaccgccggttccgtctggattgtgcttttcctttctccgcttttattacatctaattagccatgagctgcttcatgccctgggactttactgatgtgcgataaagaagtaatagaagtgtaaaaaattttgccgttcctatccggcacttnnnnnttgtgtcggataggtcgggcggttattcgggcaagtccaccttgccaacaaaagaataataaatctcaatgtcctgtctncgggtcttgttctcgtcatagctgcactcatgcacaacgattttctctacaaactcccgcaacagagtaggggtaagttcttcaaanctggtatgccgccggacaacattcataaacttttctgcgttcacggtggcttcctgtgctttggaaagctccgcttgnatagcagcggctctttctttcagctcccgttgctctgcttcatagtctgccgacagntctgtgaaacgctcgtctgatatgcgcccggtcacgctgtcctcatacagccgcttgaagatagcggataactcggctatgcgtttctcggnggcttccagttcctttttcttggcggcgttcctgcgnttgcccccgtcctcgttctgctcnntcaagagnttcataaaccgggcttcatgctttgccgcatagctngtcactttccgcagattggagagtacnccagcggtcaagaggtcggtgcggataaagtgcgccgtacagtcatgggtgcgtttcttgtagttgccgcagatataacagtcctgcttgcgcttgtccgtctggtatcgctgctgatacatnacnctgccgcagtcngcacagaacagtatgccggagaacaancccacttcatcatagcggttngggcgtttgcgctgnttgcgaagntcctgcacccgttcccatgtntgggtgtctatgataggctcgtggtgnttctcgaaaatcacttgcttttccnggggattttctacactgtgcttgactttgtaaganagnttttctgtcttgaagtttaccagacagcctgtgtattcccggttttcaaggatatgcacnacggtattggtcgcccacttgcactcatagccggggtggtagcggcgggngnngnccnnccnncggnnntccnncgnccccggcgtggggatttgctgctctgtgagcatacgggctatcttngtcggaccnttcccggcaagncagaggttgtatatctgcttgactacgggtgcagcttcctcgtcaataatgaaattttcntcctcgtccatgaggtagccatacacaggcttgcttgtgatgggcttgccactcatgccttttgagcgttttactgctttgattttcttgctcgtatctctcaccagccattcgttaaagatattccgcagcggggcaaagtcattgtcgccctgtgcgctgtccactccgtcattgatagcgatgaagcggacacctttctgtgggaaaatcatttccgtgtacattcccacttgcaggtagtttcgccctaacctcgacatatcctttacgataactgtcccgacttttccggcttcaatgtccgcaagcatggcttgaaaaccgggtctttgaaagttcgcaccagaataaccgtcgtccgtgtaccagcgcagattggaaaagccgttctgctttgcataggtttcaagnatacgcttctgattggaaatggaattgctntcgccttgcagctcgtcctcatggganagtcttgggtaaagggcggtaattggttgttggttggtctgtcttaacataaaatcctccgtttccgacagccagccccactattccgtacnnnnattgtancacanggggcggctgtctgtatagcggcaaaagcgtcaaatctgcttctttatggtcggtcaaatcgccgttttttgtgtagcagcttccgcttccagcactttcatcatcttgtcggctgcggtntcggttgcgccctgcttgaagaagccggaaacggtaaggacggagttgcccatgcggatttccgtcacacagtccgggcggcggtctgttttggtggtgcttgtctgtttcgtttctgtcataggct

SEQ ID NO: 718 - DNA, 4000 bp, Escherichia coli
  misc_feature (1)..(934): n is a, c, g, or t
  misc_feature (1965)..(1965): n is a, c, g, or t
  misc_feature (1970)..(1971): n is a, c, g, or t
  misc_feature (1991)..(1992): n is a, c, g, or t
  misc_feature (2004)..(2004): n is a, c, g, or t
  misc_feature (2031)..(2031): n is a, c, g, or t
  misc_feature (2037)..(2037): n is a, c, g, or t
nnnnnnnnnnnnnnnnnnnnnnnnnnnnnnnnnnnnnnnnnnnnnnnnnnnnnnnnnnnnnnnnnnnnnnnnnnnnnnnnnnnnnnnnnnnnnnnnnnnnnnnnnnnnnnnnnnnnnnnnnnnnnnnnnnnnnnnnnnnnnnnnnnnnnnnnnnnnnnnnnnnnnnnnnnnnnnnnnnnnnnnnnnnnnnnnnnnnnnnnnnnnnnnnnnnnnnnnnnnnnnnnnnnnnnnnnnnnnnnnnnnnnnnnnnnnnnnnnnnnnnnnnnnnnnnnnnnnnnnnnnnnnnnnnnnnnnnnnnnnnnnnnnnnnnnnnnnnnnnnnnnnnnnnnnnnnnnnnnnnnnnnnnnnnnnnnnnnnnnnnnnnnnnnnnnnnnnnnnnnnnnnnnnnnnnnnnnnnnnnnnnnnnnnnnnnnnnnnnnnnnnnnnnnnnnnnnnnnnnnnnnnnnnnnnnnnnnnnnnnnnnnnnnnnnnnnnnnnnnnnnnnnnnnnnnnnnnnnnnnnnnnnnnnnnnnnnnnnnnnnnnnnnnnnnnnnnnnnnnnnnnnnnnnnnnnnnnnnnnnnnnnnnnnnnnnnnnnnnnnnnnnnnnnnnnnnnnnnnnnnnnnnnnnnnnnnnnnnnnnnnnnnnnnnnnnnnnnnnnnnnnnnnnnnnnnnnnnnnnnnnnnnnnnnnnnnnnnnnnnnnnnnnnnnnnnnnnnnnnnnnnnnnnnnnnnnnnnnnnnnnnnnnnnnnnnnnnnnnnnnnnnnnnnnnnnnnnnnnnnnnnnnnnnnnnnnnnnnnnnnnnnnnnnnnnnnnnnnnnnnnnnnnnnnnnnnnnnnnnnnnnnnnnnnnnnnnnnnnnnnnnnnnnnnnnnnnnnnnnnnnnnnnnnnnnnnnnnnnnnnnnnnnnnnnnnnnnnnnnnnnnnnnnnnnnnnnnnnnnnnnnnnnnnnnnnnngccacaaatgggcacggatttctgtaataaatattaatttatttcacttcgataaacataaattggtgttccttctgcaactggagattttgtcacttcatgaatttcattatgtttatcattaattatcttttctatgtctatatttccaaatattttcttttctgactctccaattatgttgtaaatataatattgattattggcgttggagtcgcttacaggataagacattttcttcattttctcggtatcccaaatatgatggttgtcactcaatatgtatatgcgataatcgctcatatttttcatattgtacaagacaagatatgaagctgatataatttgtttatttctttttacagcaccagtacgattgcctaaacgcacattgtatttcttgttctcaacgatccatttcaaatggtcttcacttctataagttccaaataagacagattcgtcacttgttttgtattgcttgtatttactaggtgattttttgtattcaacttcactttccgctgctatctgtatttctgcatcaaaatattgatattgaatgtgacgcttaatttcatttgggttagttcctaaatgataatcataaatgtaaaaatcatcctctatcagtgaaataagagttaaattttcaaattgaaacttcttgtccttatcgagagctagaatcacaagttcatcggtgtcttcaggcttgtaaatctttccatttaattttttgaaatgcttgtcaacagcgtctttatataatccacaaaacgaaatgttagaaaaaaataaaacgaaacgattgtttttataaaacgaaatgtatcattgggtgtccccctccctactaaaaaaatcgaccggcgaagccggtaatataaatggcgttagaacattattctaacgccattcgtttttgtcgcttcgctcccgctttacgctaccgccgtcgctgctttataggcagcgacgctcgtcgctttaacgattttgccgcggaaagccagacgcgacccgatgtncgtgnncgagtacgaagcatcgttanncgcattcgcatncgacacgccgccattcgcatacgcgtngttgtngccacgataaaccacacggcttttagagcctgtataataatagtagtcacaataataagttgaggaactgcctgccgtacttcctgctgggattacgtcgcaacatttaccatgaactatacctttaatataataactacttgatgttgaccccttgaccaaccgttcgacaccatcattagttgttatcacccatttgccattaacagcatccttgttcacttcaataccatccatcatatcatacttatgaccatatatattctcatatcccaaacagttggtgctgtttattcgggtaaatgtaacagaaccgtcagcatttacagttttataaaatgcaagtccattttcagcaattcctccaactgtaattccatctgtatttacagtatcctgcatacctaatattgccgtagttcctgttgttcttccattactatgagaacctgcaccacactgagcctgtgagtttctgcgtccatacttagcgaaaaataaattagctatatcgcggtgcatctcgtaatctatttgttgcattcctctttgaacgctataataatggaaatccgtccaaggcatactcgccactgtcgtacctcccgttatacagctgcacaacttcgttccaacaacagaactgccaaaaacagccgtcagacactctttatgttcgacccattcaggctccatatcttcgattctgctgctattggaaagcacaacaacatctggctctgcatttttatgtatggtaaaattcagatattttgcacctgcagggacatcacgaatgacatacataccattttcaaagttagcagaaagtgatggaactacgactgtttcaacgatagcaccttcttcatcagaaaaaagagagcagataaggttagttccgagtactgtagggaaacgtaccttctgatgttgcgaaacatcaacttgacataccgcataattgctgtcactgctatatgaattagacaatgttactttgtcactcattaatttatatccgttcttataattgcctgatgattgtatatcttccattgtaacgacatccacatcaggcatgtctggtttctccacattggagctataacaagtgtattgcttaccgttcaagtaatcattgatacctttaaaccaataatgaggttcaaacatcatcacatcgccttcagttccgtctaatttagctgaagaacaatttgacagattggctgattccgcataataatttgaattatcatcatgcaacggatatatggtgacgattccgtcattattatttaccgtcgtctcaacaccagcaaataccacgttcttagatgaaggttttgtcgtaaccttagcgttacaacggaatctttgtttcaatatggcatttatatgaccgctcggcacataatcattaccatatttataccccgtcttattatctaaattacttacattggcatcgtcgctgacagtattatcatactcaatcattgtatattgaggcaacttgatattaagttctggataatgttcaacgtatgaattataaacgtcttcgtctatatactgtgttaatctgtatgttccgaccaacgcacacgtatctgtcgcattgccgtctgcatcgacacctccttttgtcatatattgctcgagcaaagaaccgtctccttccatatcaataccggtaactcttatacgtttgacattgccgcaacgagacaatagtgtctcccagtcaaggttagggcagccgccgaatacgaatgtctcaatattgctgtaaccctgaacggatagattacccattgtcagtttaggcagatattcaagtcgcagagaagtcaaagttgaaggcaacttgacactctccaatggtgcgccatgagcaaaaacaacactttttacggttgtattgttggcgttaaatgtcttcagcttggtctggttg

SEQ ID NO: 719 - DNA, 4000 bp, Escherichia coli
  misc_feature (1)..(2): n is a, c, g, or t
  misc_feature (6)..(7): n is a, c, g, or t
  misc_feature (9)..(10): n is a, c, g, or t
  misc_feature (14)..(18): n is a, c, g, or t
  misc_feature (22)..(24): n is a, c, g, or t
  misc_feature (27)..(30): n is a, c, g, or t
  misc_feature (35)..(38): n is a, c, g, or t
  misc_feature (40)..(40): n is a, c, g, or t
  misc_feature (42)..(42): n is a, c, g, or t
  misc_feature (48)..(50): n is a, c, g, or t
  misc_feature (53)..(57): n is a, c, g, or t
  misc_feature (59)..(59): n is a, c, g, or t
  misc_feature (61)..(61): n is a, c, g, or t
  misc_feature (64)..(71): n is a, c, g, or t
  misc_feature (73)..(78): n is a, c, g, or t
  misc_feature (81)..(82): n is a, c, g, or t
  misc_feature (84)..(84): n is a, c, g, or t
  misc_feature (86)..(87): n is a, c, g, or t
  misc_feature (89)..(89): n is a, c, g, or t
  misc_feature (93)..(94): n is a, c, g, or t
  misc_feature (97)..(97): n is a, c, g, or t
  misc_feature (100)..(101): n is a, c, g, or t
  misc_feature (103)..(103): n is a, c, g, or t
  misc_feature (107)..(107): n is a, c, g, or t
  misc_feature (109)..(109): n is a, c, g, or t
  misc_feature (111)..(113): n is a, c, g, or t
  misc_feature (117)..(117): n is a, c, g, or t
  misc_feature (120)..(124): n is a, c, g, or t
  misc_feature (126)..(126): n is a, c, g, or t
  misc_feature (129)..(129): n is a, c, g, or t
  misc_feature (133)..(133): n is a, c, g, or t
  misc_feature (135)..(137): n is a, c, g, or t
  misc_feature (140)..(144): n is a, c, g, or t
  misc_feature (149)..(151): n is a, c, g, or t
  misc_feature (153)..(153): n is a, c, g, or t
  misc_feature (155)..(156): n is a, c, g, or t
  misc_feature (159)..(160): n is a, c, g, or t
  misc_feature (163)..(166): n is a, c, g, or t
  misc_feature (168)..(171): n is a, c, g, or t
  misc_feature (173)..(174): n is a, c, g, or t
  misc_feature (178)..(178): n is a, c, g, or t
  misc_feature (187)..(191): n is a, c, g, or t
  misc_feature (193)..(197): n is a, c, g, or t
  misc_feature (200)..(203): n is a, c, g, or t
  misc_feature (205)..(205): n is a, c, g, or t
  misc_feature (210)..(210): n is a, c, g, or t
  misc_feature (212)..(216): n is a, c, g, or t
  misc_feature (219)..(219): n is a, c, g, or t
  misc_feature (223)..(223): n is a, c, g, or t
  misc_feature (225)..(229): n is a, c, g, or t
  misc_feature (231)..(232): n is a, c, g, or t
  misc_feature (236)..(237): n is a, c, g, or t
  misc_feature (239)..(239): n is a, c, g, or t
  misc_feature (242)..(244): n is a, c, g, or t
  misc_feature (247)..(249): n is a, c, g, or t
  misc_feature (252)..(253): n is a, c, g, or t
  misc_feature (256)..(256): n is a, c, g, or t
  misc_feature (260)..(260): n is a, c, g, or t
  misc_feature (263)..(265): n is a, c, g, or t
  misc_feature (268)..(271): n is a, c, g, or t
  misc_feature (275)..(280): n is a, c, g, or t
  misc_feature (284)..(284): n is a, c, g, or t
  misc_feature (286)..(286): n is a, c, g, or t
  misc_feature (289)..(292): n is a, c, g, or t
  misc_feature (294)..(294): n is a, c, g, or t
  misc_feature (297)..(298): n is a, c, g, or t
  misc_feature (300)..(300): n is a, c, g, or t
  misc_feature (303)..(303): n is a, c, g, or t
  misc_feature (305)..(305): n is a, c, g, or t
  misc_feature (308)..(312): n is a, c, g, or t
  misc_feature (314)..(314): n is a, c, g, or t
  misc_feature (316)..(318): n is a, c, g, or t
  misc_feature (321)..(321): n is a, c, g, or t
  misc_feature (323)..(323): n is a, c, g, or t
  misc_feature (325)..(325): n is a, c, g, or t
  misc_feature (330)..(333): n is a, c, g, or t
  misc_feature (335)..(336): n is a, c, g, or t
  misc_feature (339)..(341): n is a, c, g, or t
  misc_feature (346)..(346): n is a, c, g, or t
  misc_feature (349)..(349): n is a, c, g, or t
  misc_feature (351)..(355): n is a, c, g, or t
  misc_feature (360)..(361): n is a, c, g, or t
  misc_feature (363)..(363): n is a, c, g, or t
  misc_feature (365)..(368): n is a, c, g, or t
  misc_feature (370)..(371): n is a, c, g, or t
  misc_feature (373)..(374): n is a, c, g, or t
  misc_feature (377)..(377): n is a, c, g, or t
  misc_feature (382)..(383): n is a, c, g, or t
  misc_feature (386)..(387): n is a, c, g, or t
  misc_feature (389)..(389): n is a, c, g, or t
  misc_feature (391)..(394): n is a, c, g, or t
  misc_feature (396)..(396): n is a, c, g, or t
  misc_feature (399)..(399): n is a, c, g, or t
  misc_feature (401)..(409): n is a, c, g, or t
  misc_feature (411)..(412): n is a, c, g, or t
  misc_feature (415)..(415): n is a, c, g, or t
  misc_feature (418)..(421): n is a, c, g, or t
  misc_feature (424)..(424): n is a, c, g, or t
  misc_feature (426)..(428): n is a, c, g, or t
  misc_feature (430)..(430): n is a, c, g, or t
  misc_feature (433)..(436): n is a, c, g, or t
  misc_feature (439)..(439): n is a, c, g, or t
  misc_feature (441)..(443): n is a, c, g, or t
  misc_feature (446)..(446): n is a, c, g, or t
  misc_feature (448)..(448): n is a, c, g, or t
  misc_feature (451)..(451): n is a, c, g, or t
  misc_feature (453)..(456): n is a, c, g, or t
  misc_feature (458)..(459): n is a, c, g, or t
  misc_feature (463)..(465): n is a, c, g, or t
  misc_feature (467)..(469): n is a, c, g, or t
  misc_feature (472)..(474): n is a, c, g, or t
  misc_feature (476)..(477): n is a, c, g, or t
  misc_feature (483)..(485): n is a, c, g, or t
  misc_feature (487)..(490): n is a, c, g, or t
  misc_feature (494)..(495): n is a, c, g, or t
  misc_feature (497)..(503): n is a, c, g, or t
  misc_feature (505)..(511): n is a, c, g, or t
  misc_feature (516)..(517): n is a, c, g, or t
  misc_feature (521)..(522): n is a, c, g, or t
  misc_feature (529)..(530): n is a, c, g, or t
  misc_feature (536)..(536): n is a, c, g, or t
  misc_feature (539)..(539): n is a, c, g, or t
  misc_feature (541)..(541): n is a, c, g, or t
  misc_feature (546)..(546): n is a, c, g, or t
  misc_feature (552)..(556): n is a, c, g, or t
  misc_feature (558)..(560): n is a, c, g, or t
  misc_feature (562)..(563): n is a, c, g, or t
  misc_feature (565)..(565): n is a, c, g, or t
  misc_feature (567)..(569): n is a, c, g, or t
  misc_feature (571)..(572): n is a, c, g, or t
  misc_feature (577)..(577): n is a, c, g, or t
  misc_feature (579)..(581): n is a, c, g, or t
  misc_feature (584)..(585): n is a, c, g, or t
  misc_feature (587)..(587): n is a, c, g, or t
  misc_feature (589)..(590): n is a, c, g, or t
  misc_feature (594)..(596): n is a, c, g, or t
  misc_feature (599)..(599): n is a, c, g, or t
  misc_feature (602)..(602): n is a, c, g, or t
  misc_feature (605)..(612): n is a, c, g, or t
  misc_feature (1153)..(1153): n is a, c, g, or t
  misc_feature (1991)..(1991): n is a, c, g, or t
nnaaanngnnaaannnnntatnnncannnngggannnnangncattgnnnttnnnnntntngtnnnnnnnncnnnnnngcnnantnntnacannaanggnntnattngncnnnaaanttnnnnncnttnccantnnncgnnnnnccccnnnancnnacnnaannnngnnnngnnaaanaaatattgnnnnnannnnnatnnnnanctcantnnnnnagnttangnnnnntnntttnntnatnnnaannntcnnccngggnaannnttnnnngatnnnnnnttantnggnnnncngcnncnaanantgnnnnntnannnagncntnaaaannnntnnggnnnaggtnaantnnnnnggtgnnangnnnngnnannatnttagnnccnntnannnntncgntnnnnnnnnnannatnttnnnntangnnngnccnnnngcnannnttnanttnannnngnnaaannntnnnggnnntnntttttnnnannnnttcnnannnnnnnannnnnnnaattnntaannaattttnnattggnttncnatttnttttannnnnannntnngntnnnannatttngnnnttnngntnnggannnttnttnaannnnnnnnttaaaactcacaaaataaaaatataaataagttcaaataataatttcattatcaggagtaagatatgaagacgagagtaatggtactggcaagtgcactagttgcaatgctagggatgagcagcattgtcagtgcggaagagacaatgtatgttccaattccaagttaccgcgtaggcccatatgcagcgggtggcacaggttactttgggggcattctagattactacaacctactcaattcgcgtggcggtattggtggagtcaagctaatctggtcagagtgtgaaactgagtactcagtagagcgtggtgtagagtgttacaagcgtttgaaagaccgtgaaggcggcgcagtattctttgatccactttcagtaggtatttcaaccgcattgatcgaaaccggtcgtgcagacaagatgccaattattgcggtcaaccatggtaagacagctggccaacgtggcgacatcttcccatactacttcatgcctggaatcaacacatacgatgagcactcaattatggtgcattacatnggtggactagaaggcggcatggaaaacctacagggcaagaagattgctatgttattccacggatcaccatatggtcgtgaagcaattgcattcatggacagcatgtgtgagaagcacggatgttcacacgaagcgatcgaagtacctcacccaggtaacgagcagcagtcacagtggttaaagattcgtaaaatgaagccagattacgttttactacgtggttggggtgtaatgaatccagtcgctatgcagacagcgaagcgtatgggtttcccagtaagtcgtttgatcggaaacatctggtctaactcagacgaagacgtaattccagccggtggcgcagcagacggctaccaagcgattacaactcacccagcgggcacagacttcaaagtggtacaagatatcatttctgacgtatatggtgcaggtaaaggtgatcttcaagacaagtcacgtttaggctcagtatactggaacctaggtgtattagcgggtgttgttcacacagaagcactacgcattgcacaagagcgttttggtaatcgtgcgttgacaagttctgagacacgttggggctttgagaaccttgtgttaacagcagagcgaattgaagagttaggcgcaacaggtctagtaccagagttgaacctaaactgtatggatcacgtgggcggtcacttagcgaagttccagcaatgggatgctaatgcacgtcagtggaacatcgtatctgactggattgaaggtgatgtagcattatcacagtcaatcatcgacgcaggtgctgagaagtacgcagcagacaatggcatcgagccacgtccttgcagcgctnacagcaacgacgacgacttcgatctttaagatcagagttagttagctacacaaaaaccgggctcattgagcccggttttttttcgtccaggcttttatctactatttaaacgaaagaatgaacatacttcgcatccgctcggacaacttttatgcgctagaatgcgctatcgttgtcagacccattacgcgcaatcaccatgaacgtctctaaatctgcacaattacctatacttattaccggctgttcttctggtattggttaccaagtagctaaagatttacatcaaaataatcgttaccaagtaattgcaagcgtacgaaaaactcatgatatgaaacgacttcaagacgaaggattgaactgtattctgctcgatttgcagaactctgagagtattagacaagcttttagacaaaccttggagctgactgatggcaagctgtatggcttgtttaataatggcgcctacggccaaccgggtgcagttgaggatttaagccgagaaataattacctcacaatttgaaaccaatgtatttggaacgatcgagctaaccaatctagcaattaagcagatgcgccttcagaatcaaggacgtattattttcaacagctccatactcggctttatatcactcaccttaagaggagcttataacgctagcaaatatgctattgaagggttcgcagatacgctccgactggaattaaaaaattctggcattcatgtttcattgatagagccaggtccggtgaccagtcaatttcgacaaaatagtcatcgcatgtatatcgacactctgaaaaacaagcccagtattttcactcgcagttatgaaaaaaatgaagcccgattggctaatcctgaacccacggcaccattcaccttaccagcatcatccatcacacccaaggtgatccacgcactcactcattcacaacccaaagcacgttattatgtcacctttccaacttacctattggcgtacctaaagcgcatattaccccataaggtgcttgataaaatttgcttcaaaatttcacccatcgaataactcatgcgatggtgagtaatatttatatgattactttatccaagccaaagtcgcttgacgcccagtaacaccatcacgtcgataagaaaaaaacttttgcgcatctgagactgtgcataaatcaccaccatatgtctgtttgatgccatattgagatagaataaaacgagcggctgcatagatgtcaaaattccaagcatgttgagagtaagcttcgaaacatgaggcaaaactcttatctcttgccagataagcctgataaacatccgcttttacttgaaaagcccgtgcacccattgctggacccaaccatgctatatctggagtatgatgaaccctcattgcagcaatggtattttctattattccccccaccaaaccacgccacccagcatgcaccacagcaaggcattggccatcctgatctgataatactatcggcaaacaatctgcagtcataatcgcgcaaaccaccctcggttgtaacgtaaacaaagcatcggcctcctcagccgtatttgtactaattgacgcttcaattaccttggtactatgtgtttgtttcaaccaaacgggggcattaggaagatttagatgttgatttaatcgacttcgattggccattacagcttgaggatcatcgccgacatgctcagctaggttaaaactatcaaaaggtggctgactgataccaccgacacgggtagttgcgactacagtgactttattcactagtggccactgtgctgaaattatttcgggatgtgtcattgtaaagcagaatgtgttcgcagcgctttaagaagctgttgcatgtctgcaggtaggtctgatgtccattgcaacgcttcaccactgacgggatgttcaaatgctagatgatatgaatgcaacgcttgacgagaaaaggcacatatcgcttcattcagctcattggggacattagccacgc

SEQ ID NO: 720 - DNA, 4000 bp, Escherichia coli
  misc_feature (1983)..(1990): n is a, c, g, or t
  misc_feature (1992)..(1992): n is a, c, g, or t
  misc_feature (1994)..(1999): n is a, c, g, or t
  misc_feature (2001)..(2003): n is a, c, g, or t
  misc_feature (2005)..(2008): n is a, c, g, or t
  misc_feature (2010)..(2012): n is a, c, g, or t
  misc_feature (2049)..(2049): n is a, c, g, or t
  misc_feature (2051)..(2066): n is a, c, g, or t
  misc_feature (2068)..(2078): n is a, c, g, or t
  misc_feature (2115)..(2135): n is a, c, g, or t
  misc_feature (2137)..(2144): n is a, c, g, or t
  misc_feature (2181)..(2210): n is a, c, g, or t
  misc_feature (2247)..(2276): n is a, c, g, or t
  misc_feature (2313)..(2317): n is a, c, g, or t
  misc_feature (2319)..(2342): n is a, c, g, or t
  misc_feature (2379)..(2408): n is a, c, g, or t
  misc_feature (2445)..(2452): n is a, c, g, or t
  misc_feature (2454)..(2456): n is a, c, g, or t
  misc_feature (2458)..(2474): n is a, c, g, or t
  misc_feature (2511)..(2516): n is a, c, g, or t
  misc_feature (2518)..(2520): n is a, c, g, or t
  misc_feature (2522)..(2540): n is a, c, g, or t
  misc_feature (2577)..(2578): n is a, c, g, or t
  misc_feature (2580)..(2590): n is a, c, g, or t
  misc_feature (2592)..(2598): n is a, c, g, or t
  misc_feature (2600)..(2603): n is a, c, g, or t
  misc_feature (2605)..(2606): n is a, c, g, or t
  misc_feature (2643)..(2645): n is a, c, g, or t
  misc_feature (2647)..(2668): n is a, c, g, or t
  misc_feature (2670)..(2672): n is a, c, g, or t
  misc_feature (2709)..(2710): n is a, c, g, or t
  misc_feature (2713)..(2738): n is a, c, g, or t
  misc_feature (2775)..(2776): n is a, c, g, or t
  misc_feature (2779)..(2783): n is a, c, g, or t
  misc_feature (2785)..(2792): n is a, c, g, or t
  misc_feature (2794)..(2799): n is a, c, g, or t
  misc_feature (2801)..(2804): n is a, c, g, or t
  misc_feature (2841)..(2841): n is a, c, g, or t
  misc_feature (2843)..(2843): n is a, c, g, or t
  misc_feature (2845)..(2845): n is a, c, g, or t
  misc_feature (2849)..(2850): n is a, c, g, or t
  misc_feature (2852)..(2852): n is a, c, g, or t
  misc_feature (2854)..(2857): n is a, c, g, or t
  misc_feature (2859)..(2871): n is a, c, g, or t
  misc_feature (2873)..(2873): n is a, c, g, or t
  misc_feature (2877)..(2877): n is a, c, g, or t
  misc_feature (2880)..(2880): n is a, c, g, or t
  misc_feature (2886)..(2886): n is a, c, g, or t
  misc_feature (2888)..(2888): n is a, c, g, or t
  misc_feature (2891)..(2891): n is a, c, g, or t
  misc_feature (2893)..(2893): n is a, c, g, or t
  misc_feature (2902)..(2902): n is a, c, g, or t
  misc_feature (2904)..(2904): n is a, c, g, or t
  misc_feature (2907)..(2907): n is a, c, g, or t
  misc_feature (2909)..(2912): n is a, c, g, or t
  misc_feature (2914)..(2916): n is a, c, g, or t
  misc_feature (2919)..(2919): n is a, c, g, or t
  misc_feature (2921)..(2922): n is a, c, g, or t
  misc_feature (2924)..(2924): n is a, c, g, or t
  misc_feature (2926)..(2930): n is a, c, g, or t
  misc_feature (2932)..(2936): n is a, c, g, or t
  misc_feature (2939)..(2939): n is a, c, g, or t
  misc_feature (2943)..(2943): n is a, c, g, or t
  misc_feature (2946)..(2946): n is a, c, g, or t
  misc_feature (2950)..(2950): n is a, c, g, or t
  misc_feature (2952)..(2952): n is a, c, g, or t
  misc_feature (2956)..(2957): n is a, c, g, or t
  misc_feature (2966)..(2966): n is a, c, g, or t
  misc_feature (2968)..(2968): n is a, c, g, or t
  misc_feature (2974)..(2974): n is a, c, g, or t
  misc_feature (2976)..(2976): n is a, c, g, or t
  misc_feature (2978)..(2981): n is a, c, g, or t
  misc_feature (2983)..(2984): n is a, c, g, or t
  misc_feature (2986)..(2993): n is a, c, g, or t
  misc_feature (2995)..(2999): n is a, c, g, or t
  misc_feature (3003)..(3003): n is a, c, g, or t
  misc_feature (3005)..(3005): n is a, c, g, or t
  misc_feature (3009)..(3009): n is a, c, g, or t
  misc_feature (3012)..(3012): n is a, c, g, or t
  misc_feature (3017)..(3018): n is a, c, g, or t
  misc_feature (3024)..(3024): n is a, c, g, or t
  misc_feature (3026)..(3027): n is a, c, g, or t
  misc_feature (3029)..(3029): n is a, c, g, or t
  misc_feature (3034)..(3034): n is a, c, g, or t
  misc_feature (3036)..(3036): n is a, c, g, or t
  misc_feature (3039)..(3040): n is a, c, g, or t
  misc_feature (3043)..(3044): n is a, c, g, or t
  misc_feature (3046)..(3052): n is a, c, g, or t
  misc_feature (3055)..(3062): n is a, c, g, or t
  misc_feature (3064)..(3064): n is a, c, g, or t
  misc_feature (3066)..(3068): n is a, c, g, or t
  misc_feature (3071)..(3071): n is a, c, g, or t
  misc_feature (3073)..(3073): n is a, c, g, or t
  misc_feature (3075)..(3075): n is a, c, g, or t
  misc_feature (3078)..(3080): n is a, c, g, or t
  misc_feature (3083)..(3084): n is a, c, g, or t
  misc_feature (3089)..(3089): n is a, c, g, or t
  misc_feature (3091)..(3091): n is a, c, g, or t
  misc_feature (3096)..(3096): n is a, c, g, or t
  misc_feature (3099)..(3100): n is a, c, g, or t
  misc_feature (3106)..(3107): n is a, c, g, or t
  misc_feature (3109)..(3113): n is a, c, g, or t
  misc_feature (3115)..(3128): n is a, c, g, or t
  misc_feature (3130)..(3134): n is a, c, g, or t
  misc_feature (3137)..(3137): n is a, c, g, or t
  misc_feature (3141)..(3142): n is a, c, g, or t
  misc_feature (3144)..(3145): n is a, c, g, or t
  misc_feature (3149)..(3149): n is a, c, g, or t
  misc_feature (3154)..(3154): n is a, c, g, or t
  misc_feature (3162)..(3162): n is a, c, g, or t
  misc_feature (3164)..(3164): n is a, c, g, or t
  misc_feature (3166)..(3166): n is a, c, g, or t
  misc_feature (3170)..(3172): n is a, c, g, or t
  misc_feature (3176)..(3180): n is a, c, g, or t
  misc_feature (3182)..(3182): n is a, c, g, or t
  misc_feature (3184)..(3185): n is a, c, g, or t
  misc_feature (3188)..(3194): n is a, c, g, or t
  misc_feature (3196)..(3201): n is a, c, g, or t
  misc_feature (3203)..(3203): n is a, c, g, or t
  misc_feature (3206)..(3207): n is a, c, g, or t
  misc_feature (3210)..(3210): n is a, c, g, or t
  misc_feature (3216)..(3216): n is a, c, g, or t
  misc_feature (3220)..(3220): n is a, c, g, or t
  misc_feature (3223)..(3223): n is a, c, g, or t
  misc_feature (3227)..(3227): n is a, c, g, or t
  misc_feature (3230)..(3232): n is a, c, g, or t
  misc_feature (3234)..(3234): n is a, c, g, or t
  misc_feature (3236)..(3236): n is a, c, g, or t
  misc_feature (3238)..(3239): n is a, c, g, or t
  misc_feature (3241)..(3241): n is a, c, g, or t
  misc_feature (3245)..(3246): n is a, c, g, or t
  misc_feature (3248)..(3248): n is a, c, g, or t
  misc_feature (3252)..(3254): n is a, c, g, or t
  misc_feature (3256)..(3256): n is a, c, g, or t
  misc_feature (3258)..(3258): n is a, c, g, or t
  misc_feature (3260)..(3260): n is a, c, g, or t
  misc_feature (3262)..(3262): n is a, c, g, or t
  misc_feature (3264)..(3267): n is a, c, g, or t
  misc_feature (3271)..(3273): n is a, c, g, or t
  misc_feature (3277)..(3277): n is a, c, g, or t
  misc_feature (3286)..(3286): n is a, c, g, or t
  misc_feature (3292)..(3293): n is a, c, g, or t
  misc_feature (3295)..(3296): n is a, c, g, or t
  misc_feature (3298)..(3298): n is a, c, g, or t
  misc_feature (3300)..(3300): n is a, c, g, or t
  misc_feature (3302)..(3311): n is a, c, g, or t
  misc_feature (3313)..(3318): n is a, c, g, or t
  misc_feature (3322)..(3326): n is a, c, g, or t
  misc_feature (3328)..(3335): n is a, c, g, or t
  misc_feature (3337)..(3339): n is a, c, g, or t
  misc_feature (3342)..(3342): n is a, c, g, or t
  misc_feature (3352)..(3353): n is a, c, g, or t
  misc_feature (3358)..(3359): n is a, c, g, or t
  misc_feature (3362)..(3362): n is a, c, g, or t
  misc_feature (3364)..(3364): n is a, c, g, or t
  misc_feature (3366)..(3366): n is a, c, g, or t
  misc_feature (3368)..(3369): n is a, c, g, or t
  misc_feature (3371)..(3371): n is a, c, g, or t
  misc_feature (3373)..(3377): n is a, c, g, or t
  misc_feature (3379)..(3384): n is a, c, g, or t
  misc_feature (3386)..(3394): n is a, c, g, or t
  misc_feature (3396)..(3396): n is a, c, g, or t
  misc_feature (3398)..(3399): n is a, c, g, or t
  misc_feature (3403)..(3403): n is a, c, g, or t
  misc_feature (3405)..(3405): n is a, c, g, or t
  misc_feature (3412)..(3412): n is a, c, g, or t
  misc_feature (3414)..(3414): n is a, c, g, or t
  misc_feature (3418)..(3418): n is a, c, g, or t
  misc_feature (3422)..(3422): n is a, c, g, or t
  misc_feature (3424)..(3425): n is a, c, g, or t
  misc_feature (3428)..(3428): n is a, c, g, or t
  misc_feature (3431)..(3431): n is a, c, g, or t
  misc_feature (3434)..(3434): n is a, c, g, or t
  misc_feature (3436)..(3437): n is a, c, g, or t
  misc_feature (3439)..(3456): n is a, c, g, or t
  misc_feature (3458)..(3458): n is a, c, g, or t
  misc_feature (3461)..(3465): n is a, c, g, or t
  misc_feature (3469)..(3469): n is a, c, g, or t
  misc_feature (3471)..(3471): n is a, c, g, or t
  misc_feature (3475)..(3476): n is a, c, g, or t
  misc_feature (3478)..(3478): n is a, c, g, or t
  misc_feature (3480)..(3480): n is a, c, g, or t
  misc_feature (3483)..(3483): n is a, c, g, or t
  misc_feature (3487)..(3487): n is a, c, g, or t
  misc_feature (3491)..(3491): n is a, c, g, or t
  misc_feature (3493)..(3494): n is a, c, g, or t
  misc_feature (3496)..(3498): n is a, c, g, or t
  misc_feature (3500)..(3501): n is a, c, g, or t
  misc_feature (3503)..(3503): n is a, c, g, or t
  misc_feature (3505)..(3507): n is a, c, g, or t
  misc_feature (3509)..(3516): n is a, c, g, or t
  misc_feature (3518)..(3518): n is a, c, g, or t
  misc_feature (3520)..(3520): n is a, c, g, or t
  misc_feature (3523)..(3523): n is a, c, g, or t
  misc_feature (3525)..(3531): n is a, c, g, or t
  misc_feature (3533)..(3533): n is a, c, g, or t
  misc_feature (3537)..(3537): n is a, c, g, or t
  misc_feature (3539)..(3541): n is a, c, g, or t
  misc_feature (3544)..(3546): n is a, c, g, or t
  misc_feature (3550)..(3551): n is a, c, g, or t
  misc_feature (3553)..(3553): n is a, c, g, or t
  misc_feature (3557)..(3557): n is a, c, g, or t
  misc_feature (3559)..(3560): n is a, c, g, or t
  misc_feature (3563)..(3564): n is a, c, g, or t
  misc_feature (3566)..(3566): n is a, c, g, or t
  misc_feature (3568)..(3579): n is a, c, g, or t
  misc_feature (3581)..(3590): n is a, c, g, or t
  misc_feature (3592)..(3597): n is a, c, g, or t
  misc_feature (3603)..(3603): n is a, c, g, or t
  misc_feature (3606)..(3613): n is a, c, g, or t
  misc_feature (3615)..(3626): n is a, c, g, or t
  misc_feature (3628)..(3634): n is a, c, g, or t
  misc_feature (3636)..(3639): n is a, c, g, or t
  misc_feature (3641)..(3641): n is a, c, g, or t
  misc_feature (3643)..(3649): n is a, c, g, or t
  misc_feature (3651)..(3651): n is a, c, g, or t
  misc_feature (3653)..(3654): n is a, c, g, or t
  misc_feature (3657)..(3663): n is a, c, g, or t
  misc_feature (3667)..(3667): n is a, c, g, or t
  misc_feature (3669)..(3669): n is a, c, g, or t
  misc_feature (3671)..(3674): n is a, c, g, or t
  misc_feature (3676)..(3676): n is a, c, g, or t
  misc_feature (3678)..(3678): n is a, c, g, or t
  misc_feature (3681)..(3687): n is a, c, g, or t
  misc_feature (3689)..(3689): n is a, c, g, or t
  misc_feature (3692)..(3692): n is a, c, g, or t
  misc_feature (3694)..(3694): n is a, c, g, or t
  misc_feature (3696)..(3700): n is a, c, g, or t
  misc_feature (3702)..(3708): n is a, c, g, or t
  misc_feature (3710)..(3710): n is a, c, g, or t
  misc_feature (3712)..(3724): n is a, c, g, or t
  misc_feature (3726)..(3730): n is a, c, g, or t
  misc_feature (3738)..(3744): n is a, c, g, or t
  misc_feature (3747)..(3753): n is a, c, g, or t
  misc_feature (3755)..(3756): n is a, c, g, or t
  misc_feature (3758)..(3759): n is a, c, g, or t
  misc_feature (3762)..(3766): n is a, c, g, or t
  misc_feature (3768)..(3777): n is a, c, g, or t
  misc_feature (3779)..(3800): n is a, c, g, or t
  misc_feature (3805)..(3806): n is a, c, g, or t
  misc_feature (3808)..(3808): n is a, c, g, or t
  misc_feature (3810)..(3810): n is a, c, g, or t
  misc_feature (3813)..(3822): n is a, c, g, or t
  misc_feature (3824)..(3827): n is a, c, g, or t
  misc_feature (3829)..(3833): n is a, c, g, or t
  misc_feature (3836)..(3845): n is a, c, g, or t
  misc_feature (3847)..(3849): n is a, c, g, or t
  misc_feature (3851)..(3852): n is a, c, g, or t
  misc_feature (3854)..(3854): n is a, c, g, or t
  misc_feature (3857)..(3858): n is a, c, g, or t
  misc_feature (3861)..(3863): n is a, c, g, or t
  misc_feature (3866)..(3866): n is a, c, g, or t
  misc_feature (3869)..(3872): n is a, c, g, or t
  misc_feature (3874)..(3874): n is a, c, g, or t
  misc_feature (3876)..(3877): n is a, c, g, or t
  misc_feature (3879)..(3885): n is a, c, g, or t
  misc_feature (3887)..(3889): n is a, c, g, or t
  misc_feature (3891)..(3894): n is a, c, g, or t
  misc_feature (3896)..(3898): n is a, c, g, or t
  misc_feature (3900)..(3903): n is a, c, g, or t
  misc_feature (3905)..(3908): n is a, c, g, or t
  misc_feature (3910)..(3910): n is a, c, g, or t
  misc_feature (3913)..(3914): n is a, c, g, or t
  misc_feature (3917)..(3918): n is a, c, g, or t
  misc_feature (3920)..(3922): n is a, c, g, or t
  misc_feature (3925)..(3925): n is a, c, g, or t
  misc_feature (3927)..(3929): n is a, c, g, or t
  misc_feature (3931)..(3933): n is a, c, g, or t
  misc_feature (3935)..(3939): n is a, c, g, or t
  misc_feature (3942)..(3943): n is a, c, g, or t
  misc_feature (3945)..(3945): n is a, c, g, or t
  misc_feature (3947)..(3947): n is a, c, g, or t
  misc_feature (3949)..(3949): n is a, c, g, or t
  misc_feature (3953)..(3956): n is a, c, g, or t
  misc_feature (3958)..(3959): n is a, c, g, or t
  misc_feature (3961)..(3964): n is a, c, g, or t
  misc_feature (3970)..(3975): n is a, c, g, or t
  misc_feature (3977)..(3978): n is a, c, g, or t
  misc_feature (3981)..(3984): n is a, c, g, or t
  misc_feature (3987)..(3987): n is a, c, g, or t
  misc_feature (3989)..(3989): n is a, c, g, or t
  misc_feature (3991)..(3999): n is a, c, g, or t
aaatcaacaactaaataataacattttcagatttagttaacaaggggtgaaaattaatggcttggagaaacgtaattataacgcaacatgcaaaactatcttattcatcaaatatgatgcaagttcaaactagtaaaggaattacgcaaattccactttctgatattgcattactattagttgaaagtactcaagcagttattacttcacagttaattagtaaacttgctgaacagggatgtaaggtgatttttgttgataataaatataatccgattacggagactgtaaattattatgcacctaaatgtaattatcaaaacttgttagctcaattacattgggatgaaaccttaaagcaaagactatggaccgaagtagtatggctaaaaatgaataatcaacttaatgtcttgaagaattatcacttaccaacagaaaaagtagagcaagaaatcaataaattagagtttaatgatgtaagtaaccgcgaagctgttgtagctagagaatatttccaagaactttttggaaagagttttgtcagacaagatgaaggagatactattaatgcagctttgaattatggttattccatattgttatcatcttttaatcgtcgcattgttcaaaatggttatgaaacatatttaggaattcatcattcttctatcgccaatcaatttaacttagcatcagatttaatggaaccatttagaccttttgtagattattgggtagcaggacaaaaattaaaagattttactccagatgtgcgatatggattggttgaattgcttagtttacagattaaatataatgggaaagccatcctcctagctaacgcaatagatttatttaccaaggagtgtttaggctatttaagcaatgatgtggataaagtagaaagcgtgatggattttgtcaatgaggtaccgaaccatgcgattgctgataatgtttgatttgcctacagaaacggctcaagatagaaagaattatcgcatatttagaaaagaactgattaatgaaggctttgtaatgattcaattttcagtttatgtgagagtttgcgtaaatcgaaaaatggctatttttttagaaaatagggtgagaaactttttaccagaagaaggattagtgcagtcattaatgttaacggaaaaacaatataacgatatgcattttttaattggtgaagcagtagatgatgtacgtaacacttcagacaggacggtgattatatgattattagttatgaaggacatcatccgattaaagtatcagatggtaaaataacttttataaaagtagctaattctgcagtttatcgtgatttcattctttcttttcaagggaaaagtgaaaaagtaaaattttttgatgaacattacaatcaacttgaaaagaataaatctattgactgggttggagatgttttaattacacaggattatcttaattcttatcagaataagattatttcaaatctgtttgatactttaaatgaaaatcagagaaataaaatatttaatacgtggcgtcagctgagtactgatattcaagatataatatttatgactgatttaccaattgaagttggtgaaaatctagatttaaagaagctattcaaatttgatggaattcattttgatgattctgtattaagtgatccttatgctataattgaaacagttgttaaaattcatattgaatgtaaattgaattcggttgttacttttgcaaacgtaagtcattatcttacaaaagaacaattgaataacttaattacctttataaacgaagtaaatatgcctttgatattaatagaattttcatcttcagattttaaggttgttagtggggatgcaagagtctgttatattgatgaggattttgtcgactggtactgattttaaatctgagaagctgatgataaaatgtcggttttagaaggttgttaaatcagtaagttgaaaaacnnnnnnnntntnnnnnncnnnannnnannngttttagaaggttgttaaatcagtaagttgaaaaacnannnnnnnnnnnnnnnntnnnnnnnnnnngttttagaaggttgttaaatcagtaagttgaaaaacnnnnnnnnnnnnnnnnnnnnntnnnnnnnngttttagaaggttgttaaatcagtaagttgaaaaacnnnnnnnnnnnnnnnnnnnnnnnnnnnnnngttttagaaggttgttaaatcagtaagttgaaaaacnnnnnnnnnnnnnnnnnnnnnnnnnnnnnngttttagaaggttgttaaatcagtaagttgaaaaacnnnnntnnnnnnnnnnnnnnnnnnnnnnnngttttagaaggttgttaaatcagtaagttgaaaaacnnnnnnnnnnnnnnnnnnnnnnnnnnnnnngttttagaaggttgttaaatcagtaagttgaaaaacnnnnnnnnannncnnnnnnnnnnnnnnnnngttttagaaggttgttaaatcagtaagttgaaaaacnnnnnntnnngnnnnnnnnnnnnnnnnnnngttttagaaggttgttaaatcagtaagttgaaaaacnntnnnnnnnnnnnannnnnnnannnntnngttttagaaggttgttaaatcagtaagttgaaaaacnnnannnnnnnnnnnnnnnnnnnnnntnnngttttagaaggttgttaaatcagtaagttgaaaaacnnttnnnnnnnnnnnnnnnnnnnnnnnnnngttttagaaggttgttaaatcagtaagttgaaaaacnnaannnnncnnnnnnnnannnnnntnnnngttttagaaggttgttaaatcagtaagttgaaaaacntntnaaanntntnnnnannnnnnnnnnnnntnttanaangttgtnanatnantaagttgananacntnnnntnnngantnnanannnnncnnnnngtnttanaangttntnaaannagtaagttnanaaactntngnnnncnncnnnnnnnntnnnnntatntnttanaangttgnnaaatcngnnanttgananacnntanntnnnnnnnttnnnnnnnnantnnngtntnanaannntgnnaaatnantaagntgnnaaactnntnnnnntnnnnnnnnnnnnnnannnnngtnttannannttgntaaancagtaagntnanaaannnatannnnnangnnatnnnnnnntnnnnnntnttnnaangttgtnaaancantaanttnnnanantnntnaaannantaannntnangntngnnnntttnnnaagnttgttaaancagtanntnnananannnnnnnnnnannnnnnatannnnnannnnnnnntnnnaangttgttaaannagtannttnananannanannnnnannnnnnannnnnnnnnananntttnanaaggttntnaaancagnannttnaanaanannannnnnnnnnnnnnnnnnnanatnnnnntttnanaagnntntnaantcantaantnnannnanntnannnannnnnnnnananttntnnnnnnntnttanannnttnnnaaannantaantnnaannanannnnnnnnnnnntnnnnnnnnnnannnnnnttttanaannnnnnnnannnnnnnnnnnnannnnnnnannnntntnnnnnnntnannatnnnnnnntttnanannnntntnaannnnnnnanttnanannnnntnnnnnnnantnnnnnnnnnnnnntnnnnntttagaannnnnnnaannnnnnnanntnnaannnnntnnnnnnnnnntnnnnnnnnnnnnnnnnnnnnnngaagnntntnaannnnnnnnnntnnnnannnnnaannnnnnnnnnannntnnanatnnaannnttngannnntntnnannnnnnnannnannnnannnannnnannnntntannttnnannntantnnntnnnannnnngtnnantnantaannnnannannnnaataannnnnnannaannnnatntnannnnnnnnna

SEQ ID NO: 721 - DNA, 4000 bp, Escherichia coli
  misc_feature (63)..(63): n is a, c, g, or t
  misc_feature (474)..(474): n is a, c, g, or t
  misc_feature (492)..(492): n is a, c, g, or t
  misc_feature (588)..(588): n is a, c, g, or t
atcgcaaacgaattagttaaattacaagataaagttccgcctttttcagtgactgaggcacgncaattaattgaagctcaattgggctcagccattgacgatgttttttcagaatttgataatgaagtattggcttcagcatcggttgctcaggtacatgcggcgacattaaaaacgggtgaagatgttgttgttaaagttctaagaccggatatcgagcaacgcatacgtatagatattggtttgctttatgaggttgctcaattagcagagaagttttggcctgaagcaaaacggttgcgaccggtagaagtggttgctgagtttgaaaaaaccatactggatgagttggatttaatcagagaagcagggaatgcggcgaaattacgtcgtaatttcgagaaatcagatattttatatattcccaaaatttattggccctatacgcggaccaaagtattagtaatggagcgngtttatggaattccgatnggtgatcttgagagcatggaagaggccggagttgattttaaagtactggctgagcggggcgttgagatattttttacgcaggttttcagggataanttttttcatgcagacatgcacccgggaaatatttttgtctcgccaccggctaaatataccgctatagattttggtattgtggggaccttgactatatctgatcaacgttatttggctgaaaactttttagctttttttaatcgagattattaccgtgttgctgaaatgcatgtggcttcggggtgggttccgagtaccacacggatagaggaatttgaatcagccattcgaacggtttgtgagcctatttttgagaaaccgcttaaagaaatatcatttggattgtttcttttgcggttatttgagacggcgcgccggtttgatatgcaagttcagccgcaattggtcttgttgcaaaagacactgttaaatattgagggtttaggacgagagttatacccagaactggatttatggcaaacggctaaaccttttttagaggactggtttaaggagcgcttaagtccaaaagcaaaattaaagaaggtgattgataacatacccttaatggccgagcagttacctgaaatgcctgctttggcttttcgggttttagatgatgcaggaaaaggaaaattacaagttaatttgacagcaaaagatttagcaagtattcgtaaccacttgatagataatcagcgtcgaattgtctcttcggttatgggggcaacctttattttggttgcgacaatgataggccttaccgattatgctctattggtaagcggtgatgatgcgtcagtatggccctgggtttttggcgcgattggtggaatcttttttattagagcccatcaaaacagttaagtagttttttagtagagaacaagtagttttaattatattttgaggaaagtaatgtcaattcaaagaatgatcgatttagatttatccggtaaacgtgtcttaataagacaagatttaaatgtacctatcaaggatggcgtggttaccagcgacatccgtattcgcgcaagtttacctacgattgaaactgcactggaagcgggtgctgccgtcattcttttatcgcatctgggacgcccggtagaaggtgaatatgatgaacaattctcattaggacctgttgcaacacacatgtcggagttattgggtcgaccggtacgattaagaaaggactggttagacggtgtggacgtagagccaggtgaagtgattctttgtgagaacgtaaggtttaatgttggtgagaaaagtaatgcgattagcttaggtcagaaaatggctgctttatgtgatgtttttgtcatggatgcctttggaacggctcatcgggcacaggcatcgacgcatcgcgtcgctgagtttgcaccaattgcttgttctggccctttattagcgaatgaattagaggcgttgggaaccgcattagaacaccccgaaaagcccttaattgcaatcgttggagggtcaaaggtttcttctaaattaacggttcttgagtcattatcacaaaaagtagatcaattaattgtagggggtgggatagccaatacttttattgcagcggctggttttgcggttggaaaatcgttgtatgaagaagatcttatttcagaagcaaagaaactgatggagcaggctaaagaaaaaggcattgaaataccggttcctgtcgatgtggtttgtgccaaggaattttcagaagatgcagaagcttttgttcgtaaagtagccgatgtggaagccgatgacttgattttagatattggtcctgaaacggcagcgcactatgctgagttattaaagacagcagggacaattgtctggaatggcccggttggtgtttttgaaattgaacagtttggtaaaggcactgaaactttggcctatgcaattgcagcaggagatgccttttcaattgcgggcggcggcgatacactggcagccattgataagtacggtattgccgatcaggtttcctatacctctaccggtgggggcgcttttcttgaatttttggaagggaaggtattgccggctgttgagatattagaaaagagaagttaaacgttagttttaagtattaagtagacgttttagaatttagagtaattattatttaaggtgggaatatggctagagtaaccgttgaagattgtttagaaaaagtaggtaaccgatttgatttggtgttactttcaagtaaaagagcacgtcaacttatggaaaatgcggatcctttagtttctagagggcgtgataaagatacggtggtcgctcttcgtgaaatctcagaaggattggttaacgaagaaaatgttgatagttttgaagctaaaaatattgattatagtatcgctgaaggtgatacggaaacaacagtataaggggcgcttttaggtgtttcgatgaatattttagcgactgatttggcagtagacacagcgttgccagaaaataaactggttgctgaattatgcgtgaaccttcgccattatctagaacaaagtcagatagacgacgttataagggcttttgaatacggccgtaaggcacatcaagagcaattcagaaaaagtggcgaggcttatatttgtcacccgctttcagttgcattgacgctctctgaaatgcgtatggatgttaatggcattatcgcggcaatattgcatgatgtcattgaggattcgccatcgacaaaggaagatttagccgcagcgtttaatgaagaagttgctgaattagtcgacggcgtaagtaaattagggaagattgaaaataagagtaagcaggagtctaaagccgaaagtgtacgtaaaatgatccttgctatggctaaggatttacgcgtaattatggttaaattagcggatcgcttacataatatgaaaactttaggggctatggagcgtcgtaagcaacgtcttattgcccgtgagacacttgatatttatgtcccgcttgcggatcggttagggatgaatgatattcggcatcatttggaaatgctgagcttctccgcattataccccatgcgtaatcggattcttgctgaagcagtcagaaaatcgagaggtaatagaacgcagattttacaaacaattgagaagtcaattagccatcggttgagtgaatgttctttagatgcggaagttaatggccgtgaaaaacatctctacagcatttataaaaaaatgcagaaaaagaagatctctttttcagatgtttttgacgtttatgcttttagaatttattgtcatgatgcggatgcctgttatcgaacactgggtataattcatagtttgtttcgtccgatcccgggtcggtttaaagattatattgccctaccgaaggctaatggctatcagtcacttcatagtattatggtcggaccttatgggattccgctcgagatacaaattcgtacttttgaaatgcaccaattatc

SEQ ID NO: 722 - DNA, 4000 bp, Escherichia coli
  misc_feature (29)..(29): n is a, c, g, or t
  misc_feature (45)..(45): n is a, c, g, or t
  misc_feature (50)..(50): n is a, c, g, or t
  misc_feature (575)..(575): n is a, c, g, or t
  misc_feature (866)..(866): n is a, c, g, or t
  misc_feature (884)..(884): n is a, c, g, or t
  misc_feature (899)..(899): n is a, c, g, or t
  misc_feature (953)..(953): n is a, c, g, or t
  misc_feature (1022)..(1022): n is a, c, g, or t
  misc_feature (1058)..(1058): n is a, c, g, or t
  misc_feature (1117)..(1117): n is a, c, g, or t
  misc_feature (1173)..(1173): n is a, c, g, or t
  misc_feature (1191)..(1191): n is a, c, g, or t
  misc_feature (1214)..(1214): n is a, c, g, or t
  misc_feature (1281)..(1281): n is a, c, g, or t
  misc_feature (1415)..(1415): n is a, c, g, or t
  misc_feature (1514)..(1514): n is a, c, g, or t
  misc_feature (1577)..(1577): n is a, c, g, or t
  misc_feature (1813)..(1813): n is a, c, g, or t
  misc_feature (1989)..(1989): n is a, c, g, or t
  misc_feature (1991)..(1991): n is a, c, g, or t
  misc_feature (2670)..(2670): n is a, c, g, or t
ctgatttgtctttatggcttggtggactngaaaggctttattctncgaanattaaaaaacttggtgttattcatagaggtttttcaacttatgaaaaatcaaagtaccgtaataatcctgagtggcagttaccaatagaacttcaaaatagatttccagatattcctttaatttgtgacccatctcatattgcaggcagacgggatattcttcaagatatttctcaaacggctttagatttaaattttgacggtcttatgattgaaacacatattgatccagataatgcttggagtgatgctgctcaacaaattacacctgaagttttagtccaaatgatggaggatttaaaaattagaacacttactaatgatgaagctgattacaaaaatcaactaaatacactcagaactcaaattgatgttattgaccatggtattttagaaactttaggtaaaagaatgaatgttgctatttctataggagagttgaaaaagaaaaaaaatgttgcagttcttcagacaaaaagatggaatgaaatccttggaaatatgattttggaaggtgagaaaaanggtttaagtgaagaattcgttttaaaaatgttcaaagcaattcatcaagaatctattaataatcaagagaaagtcataaatagttaaataatgaatggtctagtttataaatctacaggaaattggtataatgttcatactgattctagaaaggtttataaatgtaatattaaaggtaagtttagatctctaggaattaaaagtactaatccagtagcggtaggagatagagtagtttttgaaattactgatgaacaagatttgaagggtttaattatcaaaattgagganagagaaaattatataatnagaaaatcggtaaanctctctaaacaaactcacattatagcatcaaatatagattgctgttttttattngttacaccatcaaatccgcagacttcaagtctttttatagacagagttttggtttcaactaaatcttanggcattgaaactgtcattttgtttaataaaacaganatttacactgatgaagatcatgaattaataaataatttaaatgatatttataccaatgnaggttataaaactttaagaatttctgtaaaaaaaggaactaatattgatttagttnagaggtctatgaaaaatnaagtttctgtttttaccggacanagtggtgtagggaaatctagtcttttaaataaattagatcccaatttgaacttgagaacatccaatntctcactacaaaatgaacagggacaacatactacaacatttgctgaaatgtttgatttagttgatggagcaaaaataattgatagtccaggtataaaagggtttgggttgattgatattgataaaaatgaaatnggtggatattttaatgaaattgctaaactaagtcaaaattgtaaattcaataattgccttcaccataatgaaccaaattgtgctataaaaatagcagtngagaacaatgaaatctctaaatctagatataataactatttaagtttattaaatagtgatganaataattatagaagtgataattataattgatgagagtaataattcaaagagttaagaaaggaagcgtaagtgtaaatggaagtaaaatatcttctattgaaaagggaatagttttgtttttaggaatcgaaaataacgatactattactgatattgaatggatgtgtactaaagtttctcaattgaggatttttgatgatgaaaataaaattatgaataagtcattaattgatatngatggagatatacttattattagtcaatttactcttcatgcctcaacaaaaaaaggaaataggccatcttacataaaagctgctaaaagtgaatttgcattaaaaatatataatgagtttttagatttaattaaacaaaaaattaaaaagaatccttgttctggagtttttggtgnanacatgcttgttaaaattgaaaatgatgggccagtaactatatttatagattctaaaaataaagaataaccttatggaatttaaatcattacaaaaaaaagtagacaattggataaatgaacatggtgttcgttattttgatccgctaacaaacatggctcaattaacagaagaagtaggtgaagtagctagagttatatctcgaagatttggtgaacaatcagaaaaagaatctgacaaaaaaattgatttaggagaagagctttctgatgttctttttgttgttttgtgtttagctaatcaaacaggaattgatttggacaattcatttaataaaaaaatagaattaaaatctaaaagagatcatttaagacataagagtaatcctaagctaaaataatttatgagttatttgattaatcataataataatagtttttcaaattcatttgaaatttcaggttctaagagtgaatcaaataggctgttaattttaaattcaatttatggaaatttaaaaatagataatttatctaactcagatgatacagtaattttagataaatacataaccaatttagaaagtcatattgatgttcatcatgctggtacagctatgcggtttttaacagctttgttagcaataaaaacaaataaaaagtttgttattacgggctcanaaagaatgaaggaaagaccaattaagattctagttcaggctcttaataaattaggtgccaatatttcttattttgataaaaagggatttcctcctttaataataaaaggacaagagatatttgggggagaaataagtttaagctctaatataagtagtcaatatatttccgctttaatgctaattgcacctattttgaaaaatgggttattaattaatcttgagggtaaaataacttctaaaccttatttagaaatgacattagcaattctcaaaaaaattggaattaactgttattttaaaaataatattatttcaattgaacactgttcaaaaattaataattcagcaatttctatcgagtctgattggagttcagtatcatatttttatagtattgtagctctttccaatgctgctgagttgaatataggaacattttataaatcatcaattcaaggtgatgttaaactatatgaaatctacgcaaaacttggtgttgaaacaaaatttataaaatcttcctctagaattttaataaaaaaaatcaatgattttattaagccagatcatattgatcttgatttaacagaaaatccagacattgctcaaactattgcagttacgtgttttggattaggtattagttgtgatctttttggattacatactttaaaaattaaagaaacagatagattagaagctttaaaaattgaattgtctaaactaggtgctaatgttaaggttactaataatagtttccatttagcgcctactttttctataaataacggaatttcaattgaaacttacaatgatcatagaatggcaatggcgtttgcacctttagctttaatgactccaataatcattaataatccagatgtagttacaaagtcatataaggatttttggaaagatttgaagagtttaaattttaacctatccaaaatttaatttaattaattgccaatatacttgacataggggtatgcagaaatgtatatttgcaaactttaaataaacttatgaaattatcacaatttaattttgagcttccagaagaacgcttagctgaatatccagcagatcaccgagatgagtctagactaatggtcttagatagaaaaaaagaaactatcgagcataaaacttttaaggatgtagttagttattttgatgaaggagatgcttttgtctttaataatactaaggtattccctgctagattgataggaaataaagaaaaaactggcgcaagaattgaagtgtttttgttgagagagttaagtgacgatcaaagactttgggatgttttagttgatccagca

SEQ ID NO: 723 - DNA, 4000 bp, Escherichia coli
  misc_feature (1787)..(1787): n is a, c, g, or t
  misc_feature (1794)..(1794): n is a, c, g, or t
  misc_feature (1803)..(1803): n is a, c, g, or t
  misc_feature (1998)..(1998): n is a, c, g, or t
  misc_feature (3680)..(3680): n is a, c, g, or t
ttaaacaaaccgggcatggagggttcaaagtttatttgctcaccgcccttgcgagacgcgcctactcagaaagtgctttggcaacatgtgcaggcagggtcactatctttggtctcctctgaccatgcgccttatcgttacgataatacgggtaaatttaatgctggatacgatgtcaatttccgccaaattgccaatggcatgccaggtattgaaatgcgcttacctctccttttctcggaaggtgtgaataaaggcaggattagtttaaacaaatttgtcgctctttcatcaactaatgcggcgcgcatctacggaatgttgccacgtaaagggaccctttctattggtgctgatgcagatatcgcaatttgggatcctgacgagaaacgcgttgctggagaaatgcacgatgctatggactacaatccgtttgcaggaattgaagttaccggctggccagttaccgttttaggtcgaggccaacgcatcgtcgaaaaaggaaaattgatcgcaaaacccggggcgggccaatttattaaaaggtcaaaaactgatttgactggacgtccgggacagtccatcccagagctagaaccagatcagaattttggagcaaatttaggatgattggtccaattcttgtcattaatcctaattcaaatccaactgtgactcaaggtcttgatgccgcaatgatgtcttttcggattaatgggttcccccctatcgaatgcttaaccgtatcggagggaccctatggaatcgaaagtcaggctgatagcgatgcggcggtggcaccattgataaatttgattcgggcccgcaccgatgcgtctgctgtcatcatagcttgctattctgatcctggaattgatgcggcgcgcgaggcaactaaaatacccgttttcggcatgcaagagagtggttttttgactgctatggcgcgtggtgatcggatcggggtggttgccatatccgaaggttcaatcctgcgtcatcgcaaatacctgcgccgcatcggtgtacttgaccgtatggtagccgaacggccattgaacatgtccgtagcacaaaccgcttctggcaaagatacatttgaaagacttgaggcagtttcaaataccttagtacagcaagatagtgcagatgtgatcgttttgggctgtgcagggctttcagtttaccgatcacgcttggagacgatattggactgtccagtggtggatcccactcaatccgctgttgcaatggcacttggagctgtactggcttaacccattaattaatgcacgcttaatgcgtcataattttgcttattaacaaagatttggcgttaatttcgggcagttaaaatctttttattacgcgagcctgatagactctagctacccaatagcacgagcaacggtaccagcaataaccaagtcgttaacagcaaccaaaataaactgccttttcttctgatagcaagatgagaggaacgcaatcctattgcttatctttaaaatagtgcattacgttggggcatcatttcattaagcaatgttctaattatctgatggaaaactttaaataggtagacttggttttcactcgcgatctaatcttcactctcctactgaccactgcggcacgtagacagcggcgctccggatttttcggcccagtacggggccacatgagaaacgccgaaaaacggcacaaatttgacgcgcatgcgctgatgcaactaacccaaattatgtcgacaaaaaaacatgatgaaaattatttttgcatgcatnttttgtnttatattanaaacgtttagtcttttaagcccttctaaactagatttaacacagaattgcctaaaatttggctttatgtgtttacaaaattggtcgatttcggcggaagcttacggattttgtatgcgaaatgcgagaatttagaccatttaaaagatgctgccgttgacaaccgttcaccaagcgctaccgtataatgattggnatgttctgcaactttttctatggagacaccgctattatacatcgtggtagtgcaacgattccaataaataacactcgccaaaaagcgagctgcataacacacattccactgcctccaaggggtaattggaaacaataaaccaaacgctcggatgggcggcaattcaatcaggagatgtaaatgttcaatcgtatttccagcatcgtcttagcagcggttttcgcagctggcgctgcgagcgcagacaacgtgacacttcgttggggccactacctaggtgattcacccttcgttcaaccagaaaaagactttgcgtcttcagtaacagaacgcacagaaggccgagttaacgttgaaataacttttgctggcggtcttggtggtggaggcgaagtaatgacccttgcaggccgaggagctattgacatggcttccgttgtccccggctattacacagatcaattattgttctggcgagcctatcaaatccctttcgtgtttgactcgccacggcaggctatggatatttctggtgcggcttttaaggatatcccatattttcgtgacgaattgtccaaatttggccttaaatttttgttccaccaaccgcttgggtcctactacatgacgggtaaggatgactcttgcctcacagttgaaggtctatcaggcaagaaaatccgctctttcggcgcagatattccaaaagcccatgaagctgttggcgcagtgcccgtgtcggttggtgtaggtgacgtctatgaggctctgcaacgtggatcattagattattctttccttaaccgtggcaacattctctctaatcggttgtatgagccgggtcccgttagctgtggtccagtcatgtctatttcaggccacttagttgttattaacgaagaagtttggaatagtatttcgacaggagaccaagcgatcatgttagaggaagctgcgatagcgggcaaaaactacatggataacatcgagaaagcggaagaagctgccggcgaagcgatcatcaaagcaggtggtcagatcctagagtttccagcggctgaattagctaaatggaaagctgcagcgcctgaccttttgggtgattgggttgcgaacatggatggacgtggcatgggcgatcaagctaaagaggttcaggcctattggttaaatattatcaacaactaaaccgtggaggcgcgcggatgtcgcgcgcctcacttttactgccttaaggtgcacattgaaactgctctctcacattttagaacgtctcgcactagctgtacttctcgttggcggcttaggcatgttgatgtcgatgttcttaggcgttgcggatattgttggtacccaaatattactaatccctgtaccgggcccgcgagaacttacagaaagcacaatggttttgatcgtatttggtgccctcgcttatgcacagattaggcgtgctcacattcgtgttgaattgttctactttcagatgccgccacgaatacgcgcaacaatggatgtcattactgatctagcagccatagctttctttggcttaattttgagtgaagcattttctgaagcgcgatattctttacaaatcggtgaggctaccgatggccttattcgttttcccctctggcccgcacgttttgtgcttgcagcggggtgcgccctcgttatcntacaactgctgttgcacctttttcaagattttatacgcatcaaaactggtgaaggtcttaaaaatgacccgctaggcgttttgcagaaagttgagtagagcgccatgtttgatccagccatctccggtgtcattgtggcagggcttcttgtcttttttcttaccaccggcgttcacattggtgtcgcattaggcctaagtggttttctaggtatttttattacgattggtgaacgggcagccgtagcacagcttgccacagtgcctttttcaacaacaaactcgtttactctggcagttatccctctctttattcttatg

SEQ ID NO: 724 - DNA, 4000 bp, Escherichia coli
  misc_feature (3991)..(3991): n is a, c, g, or t
tgcttctgaaacttcgacaatttcaaaagtacgtcaagagtaaagtgtgaacgctcacgcaccagcgtgggctttactcatttatttgacgtacaggtagtcgaagacctcagaagcaaataataagttctgtcccacgcttttttatatttctatttcaacctgtaaataaaccatgccgaggggacacggaattatttatgctaaacaatgaaaccgtttattacattgatttgcgtcgggttgttgatgagttcttgtgcctctattttctgtggttcgaaagccaaagttacttttgacggagagatttccgaagaggctactctgacaatcgatgggcttaaacacaccaatgtcacttttccctatacgacaaaaatacgaagaggtttcgacgaaacagtcgtaaagatcgaatcaccgaactatacggcctccccgatcattataaacaaaaactttaacgccgtatcggttataaatctgctcgatgttctcggctggggtatcgacgctgcgacgggcgctatcactaagcccgaattcaaattctatcagatcgattttcaacccaaagaggcgaagacgaaagcatcgtcggtggattagacgtaacttttcgcccatttttccataagtcattttcagaccgcagccaccataggctgcggtctgaaaactttagggcggtcggtgctatctccggctgaaaaaacgtttctgtcggggggctcggtgaagacagttatgtccgggaagcgatttcattggtatttttccggctatcgttatcgctccgctgcggtcgtccgaattggaaacgaatccggagcaggaagggggataaagattcaggcgggaacggtctttcgatcgttacccgcctgatttgcggtcggagaagtcccggatcgctccgcggatttcgacaactgcatggccttcgtaacgtcggcatcgatgccgacggacggcgcctgctattttactgcattaactattgcttcgaatgccttcggctcgttcattgccagatcggccagaaccttgcggttgaggacgatgcccttggcgttgagtttgccgataaattgcgaataggtcattccctgcgcgcggacggctgcattgatacgcatgatccacaggctgcggaatgttctcttcttgagctggcggtgtgcgtaagcatactgcaaacccttctcgaccgtgtttttggctacggtccatacgtttccccttgaaccaaagttacccttggcaagtttcaaaactttttttctccttgcgcgtgacgcaacagcgttgactgaacgtggcatagtaaataagtttttgacggactgtcagcgacgtgattctctcacgttcttcggggctgatttgtcccttgattaataaaattgcgaatccggcccgatgaattatttcaccagcagattcttgatctttgcctcatcggcagcggaaacggtgcccgaatagcacaggttacgcttttgtttagtcgattttttggtcaggatgtgactgtgataagcgtgtttgcgcttgatctttcctgtgccggtgaaagaaaaacgcttctttgcagcggcattggttttcattttaggcatgtcggtaatagttagtttagttatacatagcccacaaagatacgaaaagttttttattctgtcattctgccggggcgaaaaagttatctgtatggcgttatgggtaaaaatcgggattcataagaagaaggggaggagccgtacgaatatcccggggatctgtggggttgccggcgaagggcatcggatatatgccggtccgtatcgtgtgccgcctggaaggtattcgttcccggttttatcggcgggagaacccgtgtgcaggggggtattctggcagatattttcgtatgcctggcggtgacgacgaggattttgccggtcttttttcttggctgcggattcaaatttcgtatatttgcattttaataatatattttgatgtaccgatcggcacaggttcgaaacctaccgatatttcgacttttcttcgaactcccttgtgaggtgaggtgtggtggggccgtattgaaaaacggccgcagagttgtgaccgatcgccgaaatcggcaggaaagcggtcgtggtacagggatgaatagttgcctatcgaaattgaacgatgacggggatggaaaatacgatgatatgggattttgtctggcgcctggtactggctgcgctattcggaacgataatcggtctggaccgggagtaccgggagaaagaggcgggtttcagaacccattttctcgtttcgttggggagtgcgctcatgatgatcgtttcgcagtacggcttttcggagattttgacgcatgacggcgtgtcgctcgatccgagccgtatcgcggcgcaggtggtgagcggtatcggtttcatcggggccggtacgatcatcttcaaccaccagatcgtgcggggactgacgacggctgcgagtctgtgggctacggccggtatcggtttgaccgcaggcgccggaatgtcgtggctggctcttgccgcaacgatcctgacgctcgtcgcgctggaggggttgagtttggttttccgttcgctcggatcgcgccggatggtggtcgtattttcggcatcggaccggaccggtgtagcggacacgctggaccggatacggacggacggttatatggtcgtgtcgtacgaagtcgtgccgcaggtcgtgggcggcgatggaataacctaccgggttacgatggtggtcaaggccaaacccggcagtgacaacaatcaattgttggctctgttgcgggaaaacacggacataatagtagaaagaatcgcgtaataattttgtatatatatgggacgaaactctcgggggtttttaacgggtataacaacctggtggcgtaaaaagataatcgcggtgaggcattcgttttaccgcaaacggctggtgcggcgattgaccaatctcgccccgtcgatcctttcgctggattgtgtgggcggtgttatggcgcacgacctgcggctgcgtttcaattccccgacggtcaatctgtttttcgaatcctgcggggattttatcgactatgtggcggatttgcgctattattcgcaggcggaactgtgcgaatgtccctatgcgtacgagggggcgcgtcgctatcccgtcggcatgctgaaaggaaacggcacgctacccgatataaagatccattttctgcattaccgctctttcgaagaggccagggaaaaatggctcgagcgcagcggtcgtcttgatttcgacaatctgtgcgtagtcatgcaggcggcggagctcgacgagggtcttttggaacgtttcgaacggctgccgatatcgcgcaaagtgatcctgggctacgaaacgctgccgttgcaaagcccgtcgattttcaagatgcgttcgctggattctttcgtgccgggccggatcttggattataacggtctgtcgggtcggcgttatctcgacgatttcgattacgtcgcatttctcaacgacggaaccattcgagcgcaaaattgccccaccccgcagaaattccgcgactgattccggggtatgattttgctggtaattctttcggtaaggaggctgtcgtaatgagtttttgtctgttctgaaacagcgcgaaaattcacggcttttccggagaacaggtcgaagaaatgcaattttccccatctgttctttttcagttgtttacttgctgcgcccgcttcatacgatgattcgatcgtctataatgaatgattcaaaatggggattggagtgaagaaccagtaccgattggttgctgaaatataacgacaaagaatctcttgcactggaaatgttcgcatctgttatttgttgctgcaacagacataataatcccggatcttcggtgacgggataaatctcttcgtacacatgggttctcccgttgcgngagaatgaa

SEQ ID NO: 725 - DNA, 4000 bp, Escherichia coli
  misc_feature (41)..(41): n is a, c, g, or t
  misc_feature (43)..(45): n is a, c, g, or t
  misc_feature (47)..(48): n is a, c, g, or t
  misc_feature (50)..(51): n is a, c, g, or t
  misc_feature (54)..(54): n is a, c, g, or t
  misc_feature (56)..(57): n is a, c, g, or t
  misc_feature (59)..(64): n is a, c, g, or t
  misc_feature (66)..(68): n is a, c, g, or t
  misc_feature (70)..(72): n is a, c, g, or t
  misc_feature (75)..(77): n is a, c, g, or t
  misc_feature (79)..(80): n is a, c, g, or t
  misc_feature (82)..(88): n is a, c, g, or t
  misc_feature (90)..(91): n is a, c, g, or t
  misc_feature (94)..(96): n is a, c, g, or t
  misc_feature (98)..(100): n is a, c, g, or t
  misc_feature (102)..(106): n is a, c, g, or t
  misc_feature (109)..(111): n is a, c, g, or t
  misc_feature (113)..(125): n is a, c, g, or t
  misc_feature (127)..(128): n is a, c, g, or t
  misc_feature (130)..(137): n is a, c, g, or t
  misc_feature (140)..(141): n is a, c, g, or t
  misc_feature (143)..(144): n is a, c, g, or t
  misc_feature (146)..(147): n is a, c, g, or t
  misc_feature (149)..(149): n is a, c, g, or t
  misc_feature (151)..(153): n is a, c, g, or t
  misc_feature (155)..(164): n is a, c, g, or t
  misc_feature (168)..(170): n is a, c, g, or t
  misc_feature (172)..(173): n is a, c, g, or t
  misc_feature (175)..(178): n is a, c, g, or t
  misc_feature (180)..(181): n is a, c, g, or t
  misc_feature (183)..(188): n is a, c, g, or t
  misc_feature (190)..(191): n is a, c, g, or t
  misc_feature (193)..(194): n is a, c, g, or t
  misc_feature (196)..(199): n is a, c, g, or t
  misc_feature (201)..(203): n is a, c, g, or t
  misc_feature (206)..(209): n is a, c, g, or t
  misc_feature (211)..(212): n is a, c, g, or t
  misc_feature (214)..(214): n is a, c, g, or t
  misc_feature (216)..(216): n is a, c, g, or t
  misc_feature (218)..(219): n is a, c, g, or t
  misc_feature (221)..(223): n is a, c, g, or t
  misc_feature (228)..(228): n is a, c, g, or t
  misc_feature (231)..(231): n is a, c, g, or t
  misc_feature (234)..(237): n is a, c, g, or t
  misc_feature (240)..(242): n is a, c, g, or t
  misc_feature (244)..(244): n is a, c, g, or t
  misc_feature (249)..(254): n is a, c, g, or t
  misc_feature (256)..(257): n is a, c, g, or t
  misc_feature (261)..(261): n is a, c, g, or t
  misc_feature (264)..(265): n is a, c, g, or t
  misc_feature (269)..(273): n is a, c, g, or t
  misc_feature (276)..(276): n is a, c, g, or t
  misc_feature (278)..(278): n is a, c, g, or t
  misc_feature (281)..(283): n is a, c, g, or t
  misc_feature (285)..(286): n is a, c, g, or t
  misc_feature (290)..(291): n is a, c, g, or t
  misc_feature (295)..(296): n is a, c, g, or t
  misc_feature (298)..(301): n is a, c, g, or t
  misc_feature (306)..(306): n is a, c, g, or t
  misc_feature (308)..(313): n is a, c, g, or t
  misc_feature (316)..(317): n is a, c, g, or t
  misc_feature (319)..(319): n is a, c, g, or t
  misc_feature (321)..(324): n is a, c, g, or t
  misc_feature (327)..(331): n is a, c, g, or t
  misc_feature (334)..(338): n is a, c, g, or t
  misc_feature (340)..(343): n is a, c, g, or t
  misc_feature (345)..(346): n is a, c, g, or t
  misc_feature (348)..(349): n is a, c, g, or t
  misc_feature (351)..(352): n is a, c, g, or t
  misc_feature (354)..(355): n is a, c, g, or t
  misc_feature (357)..(358): n is a, c, g, or t
  misc_feature (361)..(361): n is a, c, g, or t
  misc_feature (367)..(367): n is a, c, g, or t
  misc_feature (370)..(370): n is a, c, g, or t
  misc_feature (442)..(442): n is a, c, g, or t
  misc_feature (472)..(472): n is a, c, g, or t
  misc_feature (524)..(524): n is a, c, g, or t
  misc_feature (566)..(567): n is a, c, g, or t
  misc_feature (572)..(572): n is a, c, g, or t
  misc_feature (1015)..(1015): n is a, c, g, or t
  misc_feature (1024)..(1024): n is a, c, g, or t
  misc_feature (1114)..(1114): n is a, c, g, or t
  misc_feature (1174)..(1174): n is a, c, g, or t
  misc_feature (1534)..(1534): n is a, c, g, or t
  misc_feature (1621)..(1621): n is a, c, g, or t
  misc_feature (2037)..(2037): n is a, c, g, or t
  misc_feature (2593)..(2593): n is a, c, g, or t
  misc_feature (2837)..(2837): n is a, c, g, or t
  misc_feature (3082)..(3082): n is a, c, g, or t
  misc_feature (3343)..(3343): n is a, c, g, or t
  misc_feature (3488)..(3488): n is a, c, g, or t
  misc_feature (3509)..(3509): n is a, c, g, or t
  misc_feature (3977)..(3977): n is a, c, g, or t
ctattgttgaagcagccaagtttggtcatactcgatgaggncnnngnncnnttngnntnnnnnnannnannnttnnntnnannnnnnntnnaannngnnntnnnnnggnnnannnnnnnnnnnnntnncnnnnnnnnttnnannannantnnngnnnnnnnnnntttnnntnntnnnnanngnnnnnntnntnnannnngnnnccnnnnannantngnnannnaaaanggnttnnnntannnantttannnnnnannaaanttnnaatnnnnnttnanttnnncnntttnntttnngnnnnaaaantnnnnnnttnntnannnnttnnnnnccnnnnntnnnngnnannanngnnanntanggaagngtnactgctccaaataatgcgatccagcgataagggctaggaagtaaaacagtcaaaataaagcatgcagttctnatcatcattgaaatgaagtatctacgttgncgagcagattgatccaaagttaatcctgattgggcagtagtgattgattggntcaccactttagttttcttcatgtatggatattaggtctttnnttgcnaattagcgagtaaaaaaatgaggtgactcacttgatgtgagccacctcattacttttgttgagtttagtttgcagtaccgcgggctttggcaattcggctaagaatttgataaccaaaaacagccattacggtcgcattgatgattccactaaatgtgtaatcgccacgagtccatgccatatcggaaataccgatgattaatgatgaagcagcaatatatagattaattgggtttgcgaaattaacgcgagcatcaatccagatccttgctcctagaacaccaatcattccgaatagtgcaactgttacaccgccctttacgccagctggtgtagcagaaagtactgcaccaaactttggagataaggcaagcaaaattgcgccaacacctgcaaagatataagcaagagttgagtaaacgcgactagatgccattacgccnatgttttcngcgtaggtagttgtaccagaaccgccaccaagtccagctagcgtggttgccgcaccatcagcgattaaggcattaccaatctgatcatcnagattcttaccagtcatagctgctactgctttaacatgtccaacattttcagcaatgagnactaataccactggcaggaatagcaacattgcgctgctatcaaaagttggtgatgtgaatgaaggcattgctacccacttggctgcttcaacgccagcaaaatcaacatctcccataagtgctgctactacgtaaccaatgactaatcctgcaaagatgctaattcttcctaaaaatccgcggaagaatgctgagattaatccaatagatagcagagtgattaaaccaaggcgctgaccttgcatgaaatcattctttgcagcgccagctaggtttaatccgatcaccataacaatagttccggttacaaccggaggcagcaacatgtcaatccatgctgttcctgcggcctttgcaatnaatccaactactgcaagtaaaacaccggcagcaacgatgccacctaaagcagcaggtatgccacctgaagtttttgcagcagcaacnggagctaagaaggcaaatgatgaacccaaataacttggaagcttattttgagtgataacaatgaaaagtaatgtaccgataccagaaaagaacagagtggtagttggtgagaagccagtgataatcggtactaagaatgttgcaccgaacatcgcagctatatgttggattcccataccaaaagtacgaggccaagataatctttcatcgattgaaacaacctctccaggttgaatctgcttaccatttccgtgaagtttccaactaagcattaacgctccttaattgatttaccaccttcatttttgaggatggttactttccggcccaaagggggtaggcgctaaataaaaataatagaactgattgagatatataccggtaggtattacatgattttgcgtagtttttacatnttttttgcggtccttacgctcaatttccccacctgctcatccttaggtaagatttgcctatcaagtggatgcatacgctcccacctacttcgctacggcgaactggttgcttctttagaagcgcggctgttgttcgcttgtgtaatgccttaacaatttagcgaaacagcaaggagaaattatcagcacagaaccacgtatcaatgatcgaattcgcgttcctgaagttcggttgattggctatgacggtgaacagttaggcgtaacggcaatagataaagcgcttaaactttcagaagagatcggtctagatctcgtagaaatttcaccagatgcaaatccaccggtctgcaaaattatggatttcggaaaatataagtacgagatcgcgcagaaagctagggaagcaagacaaaatcagacacacattgttgtgaaagaaatgcgtcttcgaccaaatatcgagcctcatgattacgaaacaaagcgaaatcatattgaacgatttttgttaggtggggataaagtgaaggtaactattcagtttcgtggccgngagcaatctcgtccagaattgggataccggttattacaaaagcttgctgaagagttagccgaagtatcacttgttgagtttgcgccaaagcaagaaggccgcaacatgacaatggttcttggaccagctaagaagccaggttctgcaaagaaagcagcaccgaaggcgccagcagtacaaaaatagttttattagcaattcaacaggaggtaagtaaatgccaaagatgaagacacatagtggngcgaagaaacgttttcgcgtcactggttccggaaagatcatgcacgagcgtgctggcaagcgccacctgcttgaacgcaaatcatcgagagtaactcgtcgcctaactggtgatgtgaccgctaaagcgcctaatgcatttgcagcaaagcgcatgctcggtttgaagtaagggagagataaatggctagagtaaaacgtggtgtgcatgcggcgaaaaaacgccgtacaactttagagcgtgcngctggttatcgcgggcaacgttcacgtcttttttctaaggcaaaagagcaggtaactcactctcttgtttatgcatttaatgatcgcaaagataaaaaaggtgattttcgtcgtctttggattcagcgcattaatgcagcagcccgagcaaacggtatgacttacaaccgtttaatccaaggtttaaagacagccggcattgaagtagatcgccgtgtcttatctgaacttgcaacaaatgatcctgcagcattctctaanttagtagagattgctcgcaagaatgttgtaactgcttaatttatctctaattaattaaatagagatggaaaacattacgagccttaattcgcctcatatcgagcgagttaaggctcttattggttctagaggcaaaaagaatcgngagttagaaaatgcttttatngccgaaggtattcaggcggtccgagaagcgctcaatcctaaattagttgaaggcttggccgtaaaaagagtttacgtaactgaatctggaatgagcaagatagcttcatctgtcgatagtgcagttttagacaaacacgaagtaattttggtttcagatcaggttatgagtgcaatggccgactctgaatctccccaaggaattattgccttgtgttccaccaaaaccttaaagcttcaggatctttggcaatcaaagcctaaaaaaatagctttcttttggcagattcaagacccaggaaatgccggaactgtgattcgaagtgctgacgcagctggatttgatgccgttgtattttcaaatgaaagtgtggatgtctttaatccaaagactgtaagagcaactgttggttcactttggcatattccagtcgtcagtgatgtagatataaatgaatttattacaggngctatagaaaatggagtatcact

SEQ ID NO: 726 - DNA, 4000 bp, Escherichia coli
  misc_feature (40)..(40): n is a, c, g, or t
  misc_feature (42)..(44): n is a, c, g, or t
  misc_feature (48)..(50): n is a, c, g, or t
  misc_feature (61)..(63): n is a, c, g, or t
  misc_feature (65)..(65): n is a, c, g, or t
  misc_feature (68)..(69): n is a, c, g, or t
  misc_feature (72)..(75): n is a, c, g, or t
  misc_feature (81)..(84): n is a, c, g, or t
  misc_feature (87)..(87): n is a, c, g, or t
  misc_feature (91)..(92): n is a, c, g, or t
  misc_feature (94)..(95): n is a, c, g, or t
  misc_feature (97)..(99): n is a, c, g, or t
  misc_feature (107)..(107): n is a, c, g, or t
  misc_feature (114)..(114): n is a, c, g, or t
  misc_feature (118)..(124): n is a, c, g, or t
  misc_feature (126)..(130): n is a, c, g, or t
  misc_feature (132)..(132): n is a, c, g, or t
  misc_feature (135)..(137): n is a, c, g, or t
  misc_feature (140)..(141): n is a, c, g, or t
  misc_feature (144)..(145): n is a, c, g, or t
  misc_feature (149)..(149): n is a, c, g, or t
  misc_feature (151)..(152): n is a, c, g, or t
  misc_feature (155)..(155): n is a, c, g, or t
  misc_feature (160)..(160): n is a, c, g, or t
  misc_feature (163)..(164): n is a, c, g, or t
  misc_feature (166)..(166): n is a, c, g, or t
  misc_feature (169)..(170): n is a, c, g, or t
  misc_feature (173)..(173): n is a, c, g, or t
  misc_feature (175)..(177): n is a, c, g, or t
  misc_feature (180)..(181): n is a, c, g, or t
  misc_feature (183)..(184): n is a, c, g, or t
  misc_feature (187)..(189): n is a, c, g, or t
  misc_feature (191)..(194): n is a, c, g, or t
  misc_feature (197)..(198): n is a, c, g, or t
  misc_feature (201)..(201): n is a, c, g, or t
  misc_feature (206)..(206): n is a, c, g, or t
  misc_feature (208)..(208): n is a, c, g, or t
  misc_feature (210)..(210): n is a, c, g, or t
  misc_feature (212)..(212): n is a, c, g, or t
  misc_feature (214)..(214): n is a, c, g, or t
  misc_feature (217)..(219): n is a, c, g, or t
  misc_feature (224)..(225): n is a, c, g, or t
  misc_feature (227)..(227): n is a, c, g, or t
  misc_feature (232)..(233): n is a, c, g, or t
  misc_feature (237)..(238): n is a, c, g, or t
  misc_feature (240)..(240): n is a, c, g, or t
  misc_feature (243)..(243): n is a, c, g, or t
  misc_feature (252)..(252): n is a, c, g, or t
  misc_feature (257)..(257): n is a, c, g, or t
  misc_feature (259)..(261): n is a, c, g, or t
  misc_feature (263)..(265): n is a, c, g, or t
  misc_feature (267)..(267): n is a, c, g, or t
  misc_feature (269)..(274): n is a, c, g, or t
  misc_feature (276)..(276): n is a, c, g, or t
  misc_feature (283)..(284): n is a, c, g, or t
  misc_feature (286)..(286): n is a, c, g, or t
  misc_feature (294)..(295): n is a, c, g, or t
  misc_feature (298)..(298): n is a, c, g, or t
  misc_feature (301)..(302): n is a, c, g, or t
  misc_feature (304)..(304): n is a, c, g, or t
  misc_feature (306)..(308): n is a, c, g, or t
  misc_feature (316)..(316): n is a, c, g, or t
  misc_feature (318)..(319): n is a, c, g, or t
  misc_feature (321)..(322): n is a, c, g, or t
  misc_feature (325)..(325): n is a, c, g, or t
  misc_feature (334)..(337): n is a, c, g, or t
  misc_feature (340)..(340): n is a, c, g, or t
  misc_feature (343)..(343): n is a, c, g, or t
  misc_feature (346)..(348): n is a, c, g, or t
  misc_feature (351)..(352): n is a, c, g, or t
  misc_feature (357)..(357): n is a, c, g, or t
  misc_feature (359)..(359): n is a, c, g, or t
  misc_feature (364)..(365): n is a, c, g, or t
  misc_feature (368)..(368): n is a, c, g, or t
  misc_feature (375)..(375): n is a, c, g, or t
  misc_feature (378)..(379): n is a, c, g, or t
  misc_feature (381)..(382): n is a, c, g, or t
  misc_feature (385)..(385): n is a, c, g, or t
  misc_feature (388)..(388): n is a, c, g, or t
  misc_feature (390)..(390): n is a, c, g, or t
  misc_feature (393)..(398): n is a, c, g, or t
  misc_feature (401)..(402): n is a, c, g, or t
  misc_feature (407)..(408): n is a, c, g, or t
  misc_feature (1985)..(1985): n is a, c, g, or t
  misc_feature (1991)..(1991): n is a, c, g, or t
  misc_feature (2457)..(2457): n is a, c, g, or t
  misc_feature (2532)..(2532): n is a, c, g, or t
  misc_feature (2558)..(2558): n is a, c, g, or t
  misc_feature (2562)..(2562): n is a, c, g, or t
  misc_feature (2570)..(2570): n is a, c, g, or t
  misc_feature (2573)..(2573): n is a, c, g, or t
  misc_feature (2583)..(2583): n is a, c, g, or t
  misc_feature (2634)..(2634): n is a, c, g, or t
  misc_feature (2655)..(2656): n is a, c, g, or t
  misc_feature (2662)..(2662): n is a, c, g, or t
  misc_feature (2665)..(2665): n is a, c, g, or t
  misc_feature (2667)..(2667): n is a, c, g, or t
  misc_feature (2671)..(2671): n is a, c, g, or t
  misc_feature (2673)..(2676): n is a, c, g, or t
  misc_feature (2680)..(2680): n is a, c, g, or t
  misc_feature (2682)..(2683): n is a, c, g, or t
  misc_feature (2685)..(2686): n is a, c, g, or t
  misc_feature (2689)..(2689): n is a, c, g, or t
  misc_feature (2692)..(2693): n is a, c, g, or t
  misc_feature (2695)..(2698): n is a, c, g, or t
  misc_feature (2700)..(2700): n is a, c, g, or t
  misc_feature (2704)..(2722): n is a, c, g, or t
  misc_feature (2724)..(2728): n is a, c, g, or t
  misc_feature (2731)..(2731): n is a, c, g, or t
  misc_feature (2733)..(2737): n is a, c, g, or t
  misc_feature (2740)..(2746): n is a, c, g, or t
  misc_feature (2748)..(2749): n is a, c, g, or t
  misc_feature (2751)..(2754): n is a, c, g, or t
  misc_feature (2756)..(2759): n is a, c, g, or t
  misc_feature (2762)..(2766): n is a, c, g, or t
  misc_feature (2769)..(2770): n is a, c, g, or t
  misc_feature (2772)..(2776): n is a, c, g, or t
  misc_feature (2778)..(2778): n is a, c, g, or t
  misc_feature (2780)..(2783): n is a, c, g, or t
  misc_feature (2788)..(2788): n is a, c, g, or t
  misc_feature (2792)..(2794): n is a, c, g, or t
  misc_feature (2796)..(2796): n is a, c, g, or t
  misc_feature (2798)..(2798): n is a, c, g, or t
  misc_feature (2800)..(2801): n is a, c, g, or t
  misc_feature (2804)..(2806): n is a, c, g, or t
  misc_feature (2808)..(2814): n is a, c, g, or t
  misc_feature (2816)..(2816): n is a, c, g, or t
  misc_feature (2819)..(2826): n is a, c, g, or t
  misc_feature (2828)..(2836): n is a, c, g, or t
  misc_feature (2838)..(2838): n is a, c, g, or t
  misc_feature (2840)..(2840): n is a, c, g, or t
  misc_feature (2842)..(2842): n is a, c, g, or t
  misc_feature (2844)..(2850): n is a, c, g, or t
  misc_feature (2852)..(2855): n is a, c, g, or t
  misc_feature (2857)..(2862): n is a, c, g, or t
  misc_feature (2865)..(2865): n is a, c, g, or t
  misc_feature (2868)..(2868): n is a, c, g, or t
  misc_feature (2871)..(2872): n is a, c, g, or t
  misc_feature (2876)..(2885): n is a, c, g, or t
  misc_feature (2887)..(2891): n is a, c, g, or t
  misc_feature (2893)..(2897): n is a, c, g, or t
  misc_feature (2900)..(2902): n is a, c, g, or t
  misc_feature (2904)..(2904): n is a, c, g, or t
  misc_feature (2906)..(2906): n is a, c, g, or t
  misc_feature (2908)..(2919): n is a, c, g, or t
  misc_feature (2921)..(2925): n is a, c, g, or t
  misc_feature (2928)..(2932): n is a, c, g, or t
  misc_feature (2935)..(2937): n is a, c, g, or t
  misc_feature (2940)..(2942): n is a, c, g, or t
  misc_feature (2946)..(2951): n is a, c, g, or t
  misc_feature (2955)..(2961): n is a, c, g, or t
  misc_feature (2965)..(2967): n is a, c, g, or t
  misc_feature (2970)..(2970): n is a, c, g, or t
  misc_feature (2974)..(2976): n is a, c, g, or t
  misc_feature (2978)..(2979): n is a, c, g, or t
  misc_feature (2982)..(2984): n is a, c, g, or t
  misc_feature (2986)..(2987): n is a, c, g, or t
  misc_feature (2989)..(2991): n is a, c, g, or t
  misc_feature (2993)..(2993): n is a, c, g, or t
  misc_feature (2997)..(2997): n is a, c, g, or t
  misc_feature (2999)..(3001): n is a, c, g, or t
  misc_feature (3004)..(3004): n is a, c, g, or t
  misc_feature (3007)..(3007): n is a, c, g, or t
  misc_feature (3009)..(3010): n is a, c, g, or t
  misc_feature (3017)..(3017): n is a, c, g, or t
  misc_feature (3019)..(3020): n is a, c, g, or t
  misc_feature (3022)..(3024): n is a, c, g, or t
  misc_feature (3027)..(3027): n is a, c, g, or t
  misc_feature (3030)..(3030): n is a, c, g, or t
  misc_feature (3033)..(3033): n is a, c, g, or t
  misc_feature (3035)..(3038): n is a, c, g, or t
  misc_feature (3042)..(3043): n is a, c, g, or t
  misc_feature (3045)..(3052): n is a, c, g, or t
  misc_feature (3055)..(3055): n is a, c, g, or t
  misc_feature (3057)..(3057): n is a, c, g, or t
  misc_feature (3060)..(3061): n is a, c, g, or t
  misc_feature (3063)..(3064): n is a, c, g, or t
  misc_feature (3068)..(3068): n is a, c, g, or t
  misc_feature (3071)..(3071): n is a, c, g, or t
  misc_feature (3074)..(3074): n is a, c, g, or t
  misc_feature (3078)..(3081): n is a, c, g, or t
  misc_feature (3083)..(3083): n is a, c, g, or t
  misc_feature (3085)..(3086): n is a, c, g, or t
  misc_feature (3090)..(3091): n is a, c, g, or t
  misc_feature (3095)..(3095): n is a, c, g, or t
  misc_feature (3097)..(3097): n is a, c, g, or t
  misc_feature (3102)..(3102): n is a, c, g, or t
  misc_feature (3104)..(3104): n is a, c, g, or t
  misc_feature (3107)..(3108): n is a, c, g, or t
  misc_feature (3111)..(3112): n is a, c, g, or t
  misc_feature (3115)..(3116): n is a, c, g, or t
  misc_feature (3118)..(3118): n is a, c, g, or t
  misc_feature (3121)..(3123): n is a, c, g, or t
  misc_feature (3126)..(3127): n is a, c, g, or t
  misc_feature (3130)..(3134): n is a, c, g, or t
  misc_feature (3136)..(3136): n is a, c, g, or t
  misc_feature (3139)..(3139): n is a, c, g, or t
  misc_feature (3141)..(3141): n is a, c, g, or t
  misc_feature (3143)..(3144): n is a, c, g, or t
  misc_feature (3147)..(3147): n is a, c, g, or t
  misc_feature (3149)..(3149): n is a, c, g, or t
  misc_feature (3151)..(3151): n is a, c, g, or t
  misc_feature (3153)..(3153): n is a, c, g, or t
  misc_feature (3155)..(3158): n is a, c, g, or t
  misc_feature (3163)..(3164): n is a, c, g, or t
  misc_feature (3166)..(3166): n is a, c, g, or t
  misc_feature (3168)..(3169): n is a, c, g, or t
  misc_feature (3171)..(3174): n is a, c, g, or t
  misc_feature (3176)..(3178): n is a, c, g, or t
  misc_feature (3180)..(3180): n is a, c, g, or t
  misc_feature (3182)..(3183): n is a, c, g, or t
  misc_feature (3191)..(3195): n is a, c, g, or t
  misc_feature (3197)..(3197): n is a, c, g, or t
  misc_feature (3201)..(3201): n is a, c, g, or t
  misc_feature (3203)..(3209): n is a, c, g, or t
  misc_feature (3212)..(3212): n is a, c, g, or t
  misc_feature (3247)..(3247): n is a, c, g, or t
  misc_feature (3300)..(3300): n is a, c, g, or t
  misc_feature (3304)..(3304): n is a, c, g, or t
  misc_feature (3308)..(3308): n is a, c, g, or t
  misc_feature (3310)..(3311): n is a, c, g, or t
  misc_feature (3313)..(3313): n is a, c, g, or t
  misc_feature (3317)..(3317): n is a, c, g, or t
  misc_feature (3319)..(3319): n is a, c, g, or t
  misc_feature (3321)..(3322): n is a, c, g, or t
  misc_feature (3325)..(3325): n is a, c, g, or t
  misc_feature (3340)..(3340): n is a, c, g, or t
  misc_feature (3343)..(3343): n is a, c, g, or t
  misc_feature (3346)..(3347): n is a, c, g, or t
  misc_feature (3350)..(3351): n is a, c, g, or t
  misc_feature (3358)..(3358): n is a, c, g, or t
  misc_feature (3360)..(3360): n is a, c, g, or t
  misc_feature (3364)..(3364): n is a, c, g, or t
  misc_feature (3366)..(3366): n is a, c, g, or t
  misc_feature (3369)..(3369): n is a, c, g, or t
  misc_feature (3372)..(3372): n is a, c, g, or t
  misc_feature (3374)..(3374): n is a, c, g, or t
  misc_feature (3376)..(3377): n is a, c, g, or t
  misc_feature (3379)..(3379): n is a, c, g, or t
  misc_feature (3382)..(3382): n is a, c, g, or t
  misc_feature (3384)..(3385): n is a, c, g, or t
  misc_feature (3392)..(3392): n is a, c, g, or t
  misc_feature (3396)..(3396): n is a, c, g, or t
  misc_feature (3398)..(3400): n is a, c, g, or t
  misc_feature (3403)..(3405): n is a, c, g, or t
  misc_feature (3407)..(3407): n is a, c, g, or t
  misc_feature (3428)..(3428): n is a, c, g, or t
  misc_feature (3434)..(3434): n is a, c, g, or t
  misc_feature (3438)..(3438): n is a, c, g, or t
  misc_feature (3444)..(3444): n is a, c, g, or t
  misc_feature (3446)..(3446): n is a, c, g, or t
  misc_feature (3451)..(3451): n is a, c, g, or t
  misc_feature (3453)..(3456): n is a, c, g, or t
  misc_feature (3458)..(3458): n is a, c, g, or t
  misc_feature (3462)..(3462): n is a, c, g, or t
  misc_feature (3464)..(3465): n is a, c, g, or t
  misc_feature (3469)..(3473): n is a, c, g, or t
  misc_feature (3475)..(3475): n is a, c, g, or t
  misc_feature (3478)..(3478): n is a, c, g, or t
  misc_feature (3487)..(3487): n is a, c, g, or t
  misc_feature (3492)..(3492): n is a, c, g, or t
  misc_feature (3501)..(3501): n is a, c, g, or t
  misc_feature (3503)..(3503): n is a, c, g, or t
  misc_feature (3508)..(3508): n is a, c, g, or t
  misc_feature (3510)..(3510): n is a, c, g, or t
  misc_feature (3514)..(3514): n is a, c, g, or t
  misc_feature (3516)..(3517): n is a, c, g, or t
  misc_feature (3519)..(3519): n is a, c, g, or t
  misc_feature (3521)..(3521): n is a, c, g, or t
  misc_feature (3524)..(3524): n is a, c, g, or t
  misc_feature (3527)..(3528): n is a, c, g, or t
  misc_feature (3535)..(3535): n is a, c, g, or t
  misc_feature (3537)..(3541): n is a, c, g, or t
  misc_feature (3543)..(3543): n is a, c, g, or t
  misc_feature (3545)..(3545): n is a, c, g, or t
  misc_feature (3548)..(3549): n is a, c, g, or t
  misc_feature (3556)..(3556): n is a, c, g, or t
  misc_feature (3558)..(3560): n is a, c, g, or t
  misc_feature (3563)..(3563): n is a, c, g, or t
  misc_feature (3566)..(3567): n is a, c, g, or t
  misc_feature (3570)..(3570): n is a, c, g, or t
  misc_feature (3572)..(3576): n is a, c, g, or t
  misc_feature (3583)..(3585): n is a, c, g, or t
  misc_feature (3590)..(3593): n is a, c, g, or t
  misc_feature (3596)..(3599): n is a, c, g, or t
  misc_feature (3603)..(3603): n is a, c, g, or t
  misc_feature (3605)..(3608): n is a, c, g, or t
  misc_feature (3610)..(3610): n is a, c, g, or t
  misc_feature (3612)..(3614): n is a, c, g, or t
  misc_feature (3616)..(3619): n is a, c, g, or t
  misc_feature (3622)..(3623): n is a, c, g, or t
  misc_feature (3625)..(3627): n is a, c, g, or t
  misc_feature (3630)..(3635): n is a, c, g, or t
  misc_feature (3637)..(3639): n is a, c, g, or t
  misc_feature (3641)..(3642): n is a, c, g, or t
  misc_feature (3646)..(3646): n is a, c, g, or t
  misc_feature (3648)..(3651): n is a, c, g, or t
  misc_feature (3654)..(3654): n is a, c, g, or t
  misc_feature (3658)..(3658): n is a, c, g, or t
  misc_feature (3660)..(3669): n is a, c, g, or t
  misc_feature (3674)..(3675): n is a, c, g, or t
  misc_feature (3678)..(3678): n is a, c, g, or t
  misc_feature (3686)..(3686): n is a, c, g, or t
  misc_feature (3691)..(3691): n is a, c, g, or t
  misc_feature (3699)..(3699): n is a, c, g, or t
  misc_feature (3702)..(3702): n is a, c, g, or t
  misc_feature (3704)..(3704): n is a, c, g, or t
  misc_feature (3708)..(3708): n is a, c, g, or t
  misc_feature (3711)..(3711): n is a, c, g, or t
  misc_feature (3713)..(3713): n is a, c, g, or t
  misc_feature (3715)..(3716): n is a, c, g, or t
  misc_feature (3718)..(3723): n is a, c, g, or t
  misc_feature (3726)..(3726): n is a, c, g, or t
  misc_feature (3728)..(3729): n is a, c, g, or t
  misc_feature (3731)..(3732): n is a, c, g, or t
  misc_feature (3734)..(3738): n is a, c, g, or t
  misc_feature (3740)..(3741): n is a, c, g, or t
  misc_feature (3743)..(3744): n is a, c, g, or t
  misc_feature (3746)..(3746): n is a, c, g, or t
  misc_feature (3748)..(3753): n is a, c, g, or t
  misc_feature (3755)..(3758): n is a, c, g, or t
  misc_feature (3761)..(3761): n is a, c, g, or t
  misc_feature (3763)..(3766): n is a, c, g, or t
  misc_feature (3768)..(3768): n is a, c, g, or t
  misc_feature (3770)..(3771): n is a, c, g, or t
  misc_feature (3778)..(3779): n is a, c, g, or t
  misc_feature (3784)..(3784): n is a, c, g, or t
  misc_feature (3787)..(3792): n is a, c, g, or t
  misc_feature (3796)..(3796): n is a, c, g, or t
  misc_feature (3800)..(3801): n is a, c, g, or t
  misc_feature (3804)..(3804): n is a, c, g, or t
  misc_feature (3807)..(3809): n is a, c, g, or t
  misc_feature (3812)..(3812): n is a, c, g, or t
  misc_feature (3814)..(3816): n is a, c, g, or t
  misc_feature (3818)..(3818): n is a, c, g, or t
  misc_feature (3820)..(3821): n is a, c, g, or t
  misc_feature (3824)..(3824): n is a, c, g, or t
  misc_feature (3828)..(3828): n is a, c, g, or t
  misc_feature (3830)..(3831): n is a, c, g, or t
  misc_feature (3834)..(3846): n is a, c, g, or t
  misc_feature (3849)..(3850): n is a, c, g, or t
  misc_feature (3853)..(3855): n is a, c, g, or t
  misc_feature (3857)..(3857): n is a, c, g, or t
  misc_feature (3859)..(3862): n is a, c, g, or t
  misc_feature (3864)..(3867): n is a, c, g, or t
  misc_feature (3872)..(3872): n is a, c, g, or t
  misc_feature (3874)..(3875): n is a, c, g, or t
  misc_feature (3877)..(3877): n is a, c, g, or t
  misc_feature (3879)..(3881): n is a, c, g, or t
  misc_feature (3884)..(3884): n is a, c, g, or t
  misc_feature (3886)..(3886): n is a, c, g, or t
  misc_feature (3888)..(3888): n is a, c, g, or t
  misc_feature (3892)..(3892): n is a, c, g, or t
  misc_feature (3894)..(3894): n is a, c, g, or t
  misc_feature (3896)..(3899): n is a, c, g, or t
  misc_feature (3901)..(3912): n is a, c, g, or t
  misc_feature (3914)..(3920): n is a, c, g, or t
  misc_feature (3923)..(3937): n is a, c, g, or t
  misc_feature (3941)..(3948): n is a, c, g, or t
  misc_feature (3950)..(3956): n is a, c, g, or t
  misc_feature (3958)..(3962): n is a, c, g, or t
  misc_feature (3967)..(3973): n is a, c, g, or t
  misc_feature (3977)..(3978): n is a, c, g, or t
  misc_feature (3981)..(3989): n is a, c, g, or t
  misc_feature (3996)..(4000): n is a, c, g, or t
gcgacggggtcggcgcgtccacggactcctcttgttacancnnncgcnnnggtttgtctcnnntnttnngcnnnntcctcnnnnccnaccnnannannncaaaccantgcagcncaannnnnnncnnnnncngcnnnggnntgnncgtngnntancccanacnntncgnnacngnnnatnntnncannnannnncgnngcnacacngngngngnccnnnctctnncnctctnngacnngncgngccgcgcanagtanannncnnncnannnnnngncgtgcgnngncagcacanntcntgnngngnnntgtggcgncnntnncgncgcgtgtcnnnncgnctnccnnntcnncgccnanccgtnncgngcgcgcnggnncnnttntcncnttnnnnnnaanngtacnntactgaatatttcattacaccgtaggatagacgaaatgaaaagcgcaatcgagatctttgcgcgtgtgaaaattgtgcgtcacaacgctatgagtggcagccctgcgcgcgggcggtgtcgcatgccgaacacgacgacgtgacaaagtcgccgtcgccgtcagccggcgccgcgcacgttttgctggttaaagtagccatctgtgcgtccgagagccaagactcgcgggcggagtattcgtagagcgagacgggactgacacaatccttgtcaccgagcacgacggtggtgaaggcaacgttaacatcgggtttggggatttcgacgtattgaccggcggcgttgatgctgccgcgttggcgcagtcggcactcgccgctgttttcgtcgtaatacccggtgaaggtgtcggcgaacatggctttgaattccgtcgcgccattgaaacattcctcatccgtcgtagccgatagactgtccgcgccagcgctgacactttggaagaactgcgcctcgatgccagagcaaatgatgtcgccaaagcacacggaaaccttgaaatcactcgcacgaagagtagtcgataccttaaacgataccgagctttgcccagtgccagacggcgtgatagtcacctgcgggttgtcgttaagtctcagcacgccgctaccttcgtcggagccgaactcgacccagaaatcgttcgacgccacgttgtaggcaaagttaccggcactttctgcgatgaagtagtaaggcatcttaacatcaagccgaccggtgatggcgatggtgaaccccagaccgatcgggatgctttgatcgatcatcatcgtgtacccttcaccgttgttcaagagatcgtcgaaacgataggcagtcgcatcggtgttgaactcgacgttcaaatccaagaccagtgtcgagcgagcaatcatcttcatgttcttcatgtcttggaaggcgagcttcatcgcgttcacgagtccgtcgctcgcgtcactgagaaaattaccaccaagattggccgttgcgtgatttgccgcgcccttgtgcgtcggatgagcgtgcgaaaagtgcggaagcgcttggagcctcgctcggagctcatccaaggagagcctgacgtctgcttcggttttttcacgaagcctgttttgctgagccatcagacgaccgagcgcgaacgagacgtcgatgagatcttggtctgacggcgtggcatcggcgagtaaccgacgtcgacctaccagattgttgagcttatccgggatcccttggacaaatccagccatgtcgtttgcgccgtcttcgacggcgacggctgcgtttttcatgccttttgcggcgttcttcccccactgtttgacttcatcgacgccagcgagtaggattggtttgatttgatcaaccagagcattgacgattgattcggcggcggtcgtagggatgctgaattccgtcatcttgacgcatactgagacggggttcgccgccacgttgacgatcaccgcgtccggcttatatttgaccaaatggatagaatccggaaagggcataccgtgatcaggcgttncgtatntcattgccggtattgtcgtgggcagacacatcccagcgccgcaatgagccacacactgtccgactccgagcgaagacgtatcatcagaccgccattcttggatgggagaaactccgctacgggatttgccaaaaatatcaccaagcttttcctcaagcacgtgtgaattcgccggatcgagcaatccaagggacgttgcttcatgtgcgctgattttggtggagccgagcgcggattgagcgttgtcacacgaaaggagggcgctctcgattgcttgcaagaaagtcgccggcttgatgaagatgacactggaaaccacttcatcggcgagatccgtcactttctgcgcgatttgatcggcgagctctgtcagtttcgtaaccgccgtattcgcttgcgtcttgacgttcgtgaacatgttcttaatgttgtcaattgtgttcgggatggcatttttgatgtattngatcccttgcttcacggcgttgatgccgtcgactatggcttgaatccatccgtaaagttgacattgtccattgcntgttacgccgtagccgggcgagcaantatngcatttanttngccgataatntctatccttgcggcacctcggtcgatacgttggtaaatgccagcacctacngcaccatctcgtgtggcagcnncagcgncancnccancnnnngcgncnncnncgncanntnnnncngcannnnnnnnnnnnnnnnnnntnnnnncancnnnnncannnnnnncnncnnnngnnnnaannnnnggnntnnnnncngnnnntgcanccgnnncngnanncgnnncnnnnnnngnagnnnnnnnngnnnnnnnnntngncnannnnnnngnnnncnnnnnngcngtngcnncctnnnnnnnnnncnnnnncnnnnncannngngntnnnnnnnnnnnnannnnngtnnnnntcnnngtnnntgtnnnnnnacgnnnnnnnagannnaangacnnngnnaannngnncnnngncctngnnntcntcnanngcgtcancnnannngtngangtngnnnnggtnnannnnnnnnaangnaanntnnttcncanccncatnnnngncnnaaanntagngnaaagntncgnntanngcnncngcnnnctnncannnnnanttntngnncangnantngnnnncgttnncntnngnnnnannngnanngcagccgnnnnngncgangnnnnnnncgncgtcggcgtcgtcggcgcactgttgtacacatgtntgattcccaaactgtgccgcaaacaccgcatccggcgacgaggtaatcaccgnatcnacgntnntntcgntntnntcntcagcgtcgtaattntcngcnngannatcttcngnttgntnttntgntncnncntcngnntcctccnccgngnnntcnnncnccgtctgcgcgcccttggtcngcgcgntcgngaacgncncatcngnnnncncgtncnncgcnnnnncntcntccgtcaanacctncgtgatccngngcttngncaancnntncnacntcnncgacttngnnnnngngnacnncgtctcngnnngcncgnngcngnnnnncgccgcnnngcgcnnnncgnnnngcgncnnnncngnnngnnnntcnncnnncgnnnnnncnnncnncgcntnnnncancgcntnnnnnnnnnncgccnncancggcgcgngtccntccttcgnccncntcgncgngngnncnnnnnncgncnncnncnnnnngnncnncncnnnnnncnnnnccncnnnngncnncgccacnntcgcngcnnnnnncgcnacgnncancgnnncgncnnncncnncgncgcncnncgnnnnnnnnnnnnngcnngannncntnnnngnnnncgtcntnncncnnntcncncncgcntncnnnntnnnnnnnnnnnntnnnnnnncgnnnnnnnnnnnnnnncgtnnnnnnnngnnnnnnntnnnnncgcgnnnnnnncggnncgnnnnnnnnncgcgcgnnnnn

SEQ ID NO: 727 - DNA, 4000 bp, Escherichia coli
  misc_feature (725)..(725): n is a, c, g, or t
  misc_feature (842)..(842): n is a, c, g, or t
gattgttttgaccaataatgttatttaagttatcagtagtcgcttgttctattttgttggctttggtatattcctcccattgttctttatgctcataaaaatcattgtaggcagagttgaatagaatgaatatctgtttggtttgattgacgatttcattgggtatcccagttataggaaatagagacacgtcatcagagtaatctagatcagatagtaaatcagagagttcatttaaagcagtatcaaccttctcaatataattattggaagatttggattttgagattttaataatttgatctatagcactatggcattgtcgaatcgaggtcttcataaattcagtacttccaccttctgaaaaatgagatagagctttttgcgataaatggtgtgcctcatcaaatacaaagagacaatcttcgacatctggaagaacattattgccattgatgatatcagcgaggacaagatcatgatttgcaataattacatcagactgggatgccttttttctagctttaaaaaaagagcaatcattataaaattcacaattctttgaattgcatgtgaacctattgcaagcaattttttgccaaaggctattatctggagggctctccaaatcatcgatctctccactccatctggttgatgaataactatcagccatctctgaaagttcgtctaaatcacttttagttggtttttcgtcccaaagnagcgcatcctcaaacgcatcaggagagtttgaattttcttctgtaagattgattaaatttctgatgcagacatatctagatctgccttttgccaaagcatattcgaaatctacagangagtatttttttgcctcaacaatgtctttgttaagtatttgttcttgaagagcaacatttgctgacgcaataattagtgtctttttaagcgttttggcaatcggtaaacagctgacaagataagccatcgtttttccagttccagttggcgcttcaacgcagataattggattcatattggggtattcacccatcaaggtttttgaaatttcagcaatcattttattctgagatgatcgattactataattactcaattgagttttagccccatcaaaagaggttcgaatctgctgtttaagttttggagtcagcattaattgagctatgaattcctttcaagagagagttcacaaagcaaccttaaagcagatttatattctgaacttggtattaggtctagggattctattgctttagctgactgctctctggctatatttcgactgtaattaaatgcgtccacatttaaaagaatctcaacaatgctttcaatattagatgagtcagcttgttttattgcattggagagcattttatttttagaaccgctagttttctctaaagcgtaaatcatgggcaatgtcaccttgccttcggataagtcatccccaatttcttttccaatgattagtgcgttagattcgtaatctaacgtgtcatcaataacttgaaaagcattaccaagatgcattccaaaacttccaagtgcctcaatgatattttgatttgaaccggataaaatcccagctatctggcaagcagccttgaataagcacgctgtctttctttcaatgacttgaaagtattcagattgagtaacttttgcattttttatatttaataattgtaaaacctctccctcagaaatctgattggtggcttttgataagattttcataattgccattgagtttggttcaaccattatttcaaaggctcttgaataaagaaagtctcctacaagaacgctgggtgcatttccccataactcatttgcagtctcttgaccacgacgcgttgatgattggtcaactacatcgtcatggagaagagttgcagtatgaataagctcaatcaccactgccatcgagtaatgataatctccatcataatctgtggctttagcacacaaaagaagtagcagtggccgtatgcgttttccgcctgaatttattatgtaatgactcatctgactaatgaggtcaacatttgtatctagccgattgactaaaatcttatccattagttcaagttcgctcttcatgagcgcttgtatttcagcgaagttttgcataaagatttattttaactgacttgctaataaatatacttctttagatctaggtcgagaagcttttggtttaattacagagactttcttaaatgcttttttagcattctgaacaaatacatcaaaaccgtcaccttgaaacactttgacaacaaaacttccacctggatttaaggtttttatggccatctcaattgcaagttcagcaaggtacattgacttgggttgatcaactgataattgtccactcatattaggcgccatatctgaaagaactacatctactttagcaccatcagtcatgactaataagtcatcataaactgactgttctgtaaagtccccttgaagaaaatctacaccatcaattaattctatgggcaatatatcgcttgcaataactttgccttgagagccaacaagttttgcagcaacctgagaccagccacccggagcagctccaagatctaagaccttatcaccatttctaataattgcttttttttcaacgatttcaagaagtttataaacagctctagagcgataaccctctttttgtgctttttttacaaactcatcacttaaatgttcatgcatccagcgacgagaactcccttttttggccacagtcaaaataattagtaattattactttattttataagataagtcctttaacttaaattaaattgatttctcatttatgttgggtatggttgatttttacgggataatatgccatcgatttttttgaaaaaatatattatggcagtcaatttaagaaatattgcaatcattgctcacgtagaccatggaaagactacgcttgtagataaattactttcacagtctcaaacctttgatgagcgttttcaggcgactgacaggatgatggattcaaatgatcttgaaaaagaaaggggaattacaattagctctaagaacaccgctattaagtggggtgactatagaattaatattgttgacactcccggacatgctgattttggtggtgaggtggagagagttctctcaatggttgatagcgttctacttttagtggatgctactgacggcccaatgccacaaacaagatttgttacaaaaaaggcttttgagcaaggccttaatcctatagtagtgattaataaaattgatagagatagctcaagaccagactgggttattgatcaagtatttgagctttttgatcagcttggcgctactgaagaacagttagattttccagttatatatgcctcagcacttggcggatatgcttctgaagatgatagtgttagagatggagatatgactccaatgtttgaattaattgttgacaaagcaccagcaccaaaagttgatattaatggcccatttcaaatgcaaataacgtcattagattattcttcatttgttggagctataggtattggaagaattgaaagaggtattgcaaaaaagaatatgcagaatgtcttgattgcgccagatggatccaagcgtaacgtaaaaattgttcaattattaggatttaatggtttagataggcatgaagtcaattctgcgaatgcaggggatattgttggcattgtgggaattgaaaacatatctatttctgatactatttgtgattcatcaagtgttgaggctttgccgcctctaagtgttgatgagccgacagtaagtatggcttttagagtgaatgattcccctttcgcaggcctagatggtaagtatataacctctagaaatatcagagaaaggttagataaagagctgatttataatgttgcgcttagggttgaaaatacgcaggattcttctgaattcttagtatcaggaagaggagagttgcatcttt

SEQ ID NO: 728 - DNA, 4000 bp, Escherichia coli
  misc_feature (825)..(825): n is a, c, g, or t
aataaatattcggaaaaacccataagaattgcaatccaaaaatattttcaaaacaatggtatgaaatttgaattcaatttttaattaattatcttgataaaatatttataataaaaaataacaatattcctaaaattttaattttgatattttttatgatcataattttgattaatatcattttagagtactattatttcataattatatttttcatcggtgtatgatctattcactataatttagattttttttaatttgaattcaatttttttttatcctctaactcctgtttgatatgttgttttcctgattagattggataattttttccaaaattttatctctattgttatttcaaatatctagattaaaatgtctaaattattgtcgtgataatatgagtagtccagctactatcaaaaaggcaaaaaaactagttgagtctggacttgtatctaaaattgaacaagatctattccaaattcggtcatcatcaaaccctgaaaaatcttattttgttacttctgacacttgtgagtgttttggattcaaaaattattataaatttcatcatggaaatggccaaaaagctaattgttctcatttggaggcaattaggattttcaaacaagaaaatactgattaatttattatatttttttaagatctgttttacctactatcgccctatcttttaaaataataattggacgcaatatcaatcctggatgttttaccatcagtttaattatctgtgaatctgtttttttgttttctgataaattcatttctttgtatattttatctctctttctaagtagntctgaaggtttttttccagtcagtttgattattttttttaattctaattctgtaaatggttctttaaaaaaatcccttgattctacatctaatttcattcgttccatttctgaaattgtttttttacatgtgatgcaagatgatttatgatatactttcaattagttagtcatttttatttgcattaaaaattgtttagtatcgtcaattccccgtaccctaaatctattttttattttattttttaaaaaatatttattttatgagtaaaattttatacaaatgatggttctaaattttgatttatctaatagaactactttaaaggtgctaaattgttattaatttttcaatattaaagaaatattcaaatccttctattattatggttaattatgatttgtgcatcttgtgaaactagaaaacattttgaatgtattgattgtatgaatgaacataaaactcatctatgtagttgtgattgtcatgatgagaatactgctgctcatggaattggaactactcattaatttttaaatttattctcaatatcttgagccaaaatttctaattctgttgtatttcctaattttctatatgttaatttttcaattgttttgataatactaattgcggctctatactgtggaatttctggattatttaattctccatacattcccattccttgtattccatatttttttgcaaaccctagaatcaaaccattaaatcctgtaatcaatgatttttgaggagtcatatctacacctaatctttctatttgttttgttaattctattgatgttgtagtgatgtatgttttaggttcattgttaaaaattctatttgtatgaaatcctcctaaagtgtaaataaattttgcagagtatttttttgcaacattaattacatcttgacacaataagtttaattcgtcattgttttgaggttgaccgttcccccctccaaatatgatcaaatcatctgtgtatttgtattcccaactttcatttggtagatcaatatgtcctccattatctatcacatatgttggaaatgataattttgcagttctaaatgattttgattttaatgatttatttataaaattaattacaatgcttccaacatttcccatatcttgcattgcagctataatgattggtttttttatttctggttcttcattttgtataaattccatattgttaattattttttatgaattttaaacgtatgttgtgttgttttatttttgaatttatctcactgtaaaattcttttgaatagatgtatctattttatttgtcccaaaatcaagtttatgggttatattttaactcttgtcgattttcatttttttaatataattttattaaaacctcaagattcataaggcaaaaaaactttaaaacgacaaattatggcaacatcactagaaaattttggtacgttggaatatgttcttgataaatattctaaaatttggtgctggaaagtcactggtgctcgtgcagttgacatgatctctaaattatctcctgaagcttggtatggtgaaaatgagcatgaagtaataattgcagactctcttgaaagtataaaacaattaaaactgctaatggatcgatatccgttagaaattctttcaaaaacaatttggcaaagaaaaattgttaaaacatatgctcccaaacccactttgcctcccattaaacataaactgaagcgtgcaaaaactggtgaacaatttagaggaaaattaatgaattttcaaaaagaagggttggatttcttactaaaatcctctggcaatgcactgcttgcagatgaaatgggacttggaaaaaccgttcaaactttatcgtatgtttctacagaaaaacaaacattccctgttctcattgttgctcctttagttacattgaaaaattgggaacgtgaaatagaaaaatttcttaagaaaaaaagcagaaatggtagaattattgaatctgaatcccctagtgtgaccttgataagaactggtaaatctaaagaattgccaaaaaccgatatttacataattaattatgagttacttttcaaacgtgcagttgatttagacaaagttggaattcgtactatagtgtgtgatgaagttcataacctaagatctaaaacaactcaaaaatacaaagctattaaaaaacttgcagcattaccttcaattcaatatagaattggtctttctggtactccaatttacaatcgcggttctgaaatatggcccataattgatattttaaaacctggattacttggtagctttaaggaattttgtgaatacttttgttatatgaatgataaaggcaaagctatagttttagaaaataaacgagcttctcttagaaatgaattacaaaaacatgttatgcttcgtcgaaaaaaatctgatgttttaaaggagcttaaagataaggttcgctacaaagaagtaattgcatctgatactgatttttatcttgaagaacttgataaaatttggaaaaaacttgaagctgaacaaaaagaagctcagactgaattttcaaaatctgcatcatatcacagggcaattcaaagtgaacgacaaattgctggtgttgcaaaattacctcatgtgattaattttgtaaaaaatattatggaaattgaagaaagtgttgttgttttttgtcatcataaagtaattcataaattattacatgaaagccttcaggaattttcccctgtttctatcattggtggtcaatctgataccctcagacaagaccaaattgataaatttcaaaaaggtgaatccaaattaatgattgcaggtattcgtgcaggaaatgtgggaattaatttaactcgagctaagtatgttatttttgcagaacttgattggagtcctgcaatccatcgtcaagcagaggatcgacttcatagaattggtcaaaaaaatactgtttttgcatattatttgattgggaatggaactttggatgatcatgttgcaagtattttagttgataaaagctatgaaattgatgctatcttggatgaaactgttgatacttatgaaaataaggataaagctgcattgattttagcacaaatacaaaataaaattcattcaaaataattttgttgtaaaaatttaaaattt

SEQ ID NO: 729 - DNA, 4000 bp, Escherichia coli
  misc_feature (373)..(373): n is a, c, g, or t
  misc_feature (408)..(408): n is a, c, g, or t
  misc_feature (866)..(866): n is a, c, g, or t
  misc_feature (919)..(919): n is a, c, g, or t
  misc_feature (1439)..(1439): n is a, c, g, or t
  misc_feature (1444)..(1444): n is a, c, g, or t
  misc_feature (2056)..(2056): n is a, c, g, or t
  misc_feature (3731)..(3731): n is a, c, g, or t
gcgaggcgacgaagttcatccgggatgtcggccatccgccaatgtccagcctggataccaacgcgccgcggtcccgccggcatgactggccgggatacgcgcaccatcgcaccgggatcgacactaccgaccaccgcggtcgaggcggccgtggccggcagatcacccggcggggcagtcccggcatcgggcgataccgacccgtcatcggccaaggccacacggatacctgaaagcgccgttgaaatcccggccatcgcggtggcgaggatcccgcggcgcaggccaaagcgttgcgaaggttcggcgcgacggggcgtggtgtcggtcccgagttcgtgcatctccgccatctccaccccgacgatccttnagcttggcacttccctatacccaaacgctacgggngaaccccccaggatgcaagtgccggttgtggaggatccgcaaggaagggtccggtgtgtccattggcctgcggggaacgggcgcatccggcaccattcccgcatgaccaccaccaccacgccaccaacctctgccatcgcaatccggccgatccaagccggtgactacgaggcatggcttcccctctggaatggttacctggcgttctacgggacggcgatgcccgaggcagatgcgcgccacacctttgatcgcctctgtgctggcgaaagattgcatgggttcgttgcggaagtcggcggaaccgtctccggcattgtccactgcctcttccacccatcgacatggacgcccaccgactattgctacttgcaggacctgtatgttgatccggcgtgtcgcggggcaggtgccgggcgcgcgctgatccgggcagtggtggatttcgcccgtgaccncgatgccaaccgggtcatctggctgaccaacgaggacaatgccacggcgcgcncgctctacgacaccgtcgcgcggaccacgggtctcatccagtaccgcatctcgcccctctgaccggggcattcccgctcacgaatgctccccgacgggcgtgtcacaggcaggtggatgccatacctgactgtatggcacgcatcccggactgtttgccggcatgcaacctgccggggagaaccgcatggcactcatggaccatttcccatccaacatcggcagttttggcaaccacggaacgaactggcccgaccgagacgaggagcccgattacgatgcgctctcgggctttgcccaccttgggcgcgggtgggtggacggccttctggaacggattgcgccggaagtgtgggggcccgacgccaagtggcttgagacctactgtcacgcaaacttcacccttgcgatgaggcaggacctcctgcacgtcgatacgcagatgcgcttcgcgctgtggcgggtgggttcacttgccacggcggatgggcgtccgatctatgggtacttcgtccggaatnccggnatcacgcctccaccgtacttcctggtcgggttcatcaccctggatggcggcatcctgagataccaggtgccgggcgcggtttgtgaactgatcaggatcgactcgcctccggtctcgcctgcgcatttcgtgccgccgttcccaccgttgttgccaagcacgatgtggcaacacgtcctggagacccgacgtgaacgcatcgccgcacgcctgcccaagttgccggactattcattgaggtatctgatcacgggtgcggtgggggcggcgtaccgggcacgaagccgggcagtgcccggcctgcgtcgtgacgggacgtaccagtggttccttccgatccacattacctccgcgagtcccaacgatgccccggacttcatcgcgccggtaaccatcgccgacgatggccaggggcatgtcatccgcacccttctggaaccacacatggcctatccgctggctcgcgccgccgatgccgatgacggccgcatccgcacatggcgtacaagggcgtagggccggcccctcgctggtgacacgtccggcgcctgggtaggcgccgggcgcgatcactacgaccggtagagggttgtcaccgcgccgacccggccntacatccagaacgagatggggatcagcaggatggtcagcaggcacacgtaggccagggccatccagaccccactcaaccaccacccgatcagcaggaaccagattgcgcggccaaggaatgaccgttggggtatcccggtcacttgcccgcgtgcgttcacgtacaggcttgtctcctggggacgcagggtgatgatcgacggcagacggttgatgatccacaggccgaccggcaggccgatgatcgtgcagttcaggacccaggccaggcccgagaccatcgccccggcccaccatccgatcaacaggaaccatatgacccggatgagcaggcccgggccggactggcggtacaccatcggtgcctgactggacatctcttgcctgcccttctagatcatcatgggcgtcgtgtcatacgcacctattccaaaatgatagtccaaggagtttccttgccggggccgtcgccgccggtggcggggagtgccccgggatcattggtaggattgaaaaggatgggttctggttgcggtcccgagggatcgcgctgccacgatatcccagtcgcgcatcccgcagtggtggcgccggcacgatcagcgcaaccaacggactatcaggaagacccagtggcgacaccgacaacccgcatgcgtggcctcccgtccaagggatggggtgccctggctgcccttgaccttcacgaggcaattggccccggtgaaggcgaggtgatgccaccgcgtgtccggaacgcgccggttgtggagagggatgaacatcagccagttgggcggccaatgcccgccaggcggttgttcgatgcattgcgtgtcccgatggccacagatgatccgcttactgagacacttggcaagttcgcgcattttcctgatgactggatccagaaactcgtcgtgcggctggcccctgaaccgtggggtgagcgggatacgtggcttgagtactactgccacgccaacttcggtcatgcactccggcaggaacgcctcctgcacgatccagaggggcgctttgtcctctggcgggtcggttcactcgagacgaccgacggccgggccattcatggctacttcgtgcggaactcgcgccggtacggaccgccctacttcctggttgggtttgtcacgttggacgacggcatcctgcgcttccagaaccacgaccgaacggtcatggggatccggattgccacgccgccgacctcacccaagcatgtgatcccggcgtatccggacctgcacgcgatgccgtcggtgaactggcagcacatccttgagacccggattgaccggatccgtgcacgcgtgccgaacctgccggacaaagccctgcggtggctcatcaccgcggctgtcgccgatgcccacaagtcgtcagaccgccgggccgtccccggatggttcgatggcgagtaccaatggatgcttcccctgcacatcacgcaggagaatgtctcggctgcgccagacttcgtcgcgccggtacgtcttgccgatgacggcgaggggtacaccatcccgacccttctggaaccgtggatggcctacccgcttgcccgcgcgatcgctcccgacaaccggggcattgcgtcgtgggcaacgacaatcggctgacgcatttcgatcattgccagaaccgtgacgatggntgtcggcatggtgatgccgtcgtgtcttgtgtggcgcgttgtttcctgctgcaacgctattgatgccgcgcctcgtgccagatgggagccctttccccgagggatgtccgcacgctattgccgcttctgcatggatggatcacgttaactgctgccgcccgggcaagatgacgaagatgatggtgtctcctctttgggaaagcctgatcccggcggtgcgtgcggcacgcgcacccagtcgggttctggaaatccgtacggacgatggt

SEQ ID NO: 730 - DNA, 4000 bp, Escherichia coli
  misc_feature (2546)..(2546): n is a, c, g, or t
  misc_feature (2554)..(2554): n is a, c, g, or t
  misc_feature (2559)..(2559): n is a, c, g, or t
atggtggcgcgacaaacgccacaatttaaccggatcacgcggcctagagctttcctttttcaagcgaatgtccaaaggtatgactgggcatgcgcggtaagcaatgcgcggcggattttgaaacgaaacgtattgaagggctttattgatgaaacatgaaaacgtgcaagaatattatggcaaaaccttgcagtcttcggccgatcttcaaaccaatgcctgctgcgagccggccgaaatgcccagctggttgaagaaaatcctagcgcagctgcatgatgaggtgctgatgcgctattatggctgcggtttgattgcgcccgaagccctcaagggcgcgcgggtattagatcttggctgcggcgcgggccgggatgtttatgcgctgtcgcaaatggtgggcgaagagggctttgtggtcggtgtggatatgaccgacgcgcagctcgatgtcgcccgaagctttcaagactatcatcgggaggcatttggatatcgtgcatcaaatgttgcgtttcacaaaggttatattgaatcgctcggagatttaccgctggatccggactctttcgacgtgattgtctccaattgcgtggtcaatctcgcgaccgataagcaagcggtgttgcggggggcttatgagctgctcaaacctggtggcgagatgtatttttcggatgtctatgccgatcgccgcgtgccagaggctatggcgcgcgatgaggtgctctacggcgaatgcctgtctggagctctgtattggaatgattttcttaaccatgcgaaagtggcaggcttcacagatccgcgtttggtcacccatcgccccatcaccattgaaaacccggtgctggaagccgcggtagcgccgctaaaatttacctccgccacctatcgcctatggaaattggcgaatttggaaagtgattgcgaggactacgggcaggcggtgatctacaaagggacaattgaaaattgccctcatggtctgccgctggatgggcatcattggatcgaaacggggaaggtcttcccggtctgtgggaatacttggaatatgctggcgcaaacgcgatttgcggcgcatttcgagttcatcggctcatttgatacgcactatggcattttcgaaggctgcggcgctgcgtctccttttgaagctgatgccgcagaggccagctgttgctaaatcaccgcatgccacatacataagcctgagtgtttttgtcagttaggcgcttctgttgtcgaatccgagacttgaaatccgaaacttgtcgcgccgctttgccggtcaattcgcggtggatgatgtcagcctgcggcttgaaccggggcaggtgacgtgcctgctgggcccctcgggatgcgggaaatcgaccacgttgcgcattgtggcaggggttgagcggcaagatagcggcgaggtgttgattgacggcgcattggtctgtgatggcacgcgctcgcaaccgcctgagctgcgcaacatcggcatgatgttccaagattttgcactttttccacatctatctgtttgggaaaatgttgcttttggcctgaaaggcgcaaaatctatccgccgtgcgcgggccgaagagcttttggagcgggtcgatctggccggctatggcgctcagatgccccatgaattatccggcggggagcagcagcgggtggcattggcccgcgcggtggcgccgggacccagaatcatgcttcttgatgagccattttctggcctagatgatcgcttgcgcgatggaatccgtgatgagacgctcgaggttctgcgcgaagcgggcacggcagttttaatggtgacgcatgatcctggcgaggcgatgaaaatggccgatgagattgccctgatgcgagacggcaaaattgtgcaaaaaggcgcgccctatacaatctataattcgccgatcgataaagatgctgcatcattttttagtgatatcaatgtcatggtgggaaaagttaaaggcgccctggccaaaacgcccttcggcgaattcttcgcgcccggtcatgcagatggcacgatattggacatcgtcatccgcccgcaacacattcgcattgattttgaccgtgccggccaaggccccagcccgaccgatgccatgggccatgcggcgcgcgccaaagtgctgcggtcgcgttttttggggcagaattcattggtcgattttaagcttgagcagggcgcggtgctgaccgcttcggtgccctcagtgtttttgccaaagccggacacgctgttttggttgctggcgccacgcaagaattgctacgtctttccccgctctgaatgacgcccaagcgcggttatgaccgatggcgtgtgcggtcgggatgtttgctccacgccaaataatcgaccaaggatttgccgggctcctcaacaaatacggctggcatggcgtcaagccgcgtgatttcatccacccggagggtgacaaacccctgcgtgctttcacaccaagcggctagggtccacagccgcccccaataatccagcgccaaaggtcgcaatcgcngtatttgngagcnaatcgtaatctgcatcaactgtttcgaacgaatggcctgtctgagttttggcatatgctgaaagccgcgggcggcatcggcgaaagggtaggtggcaaaggaccaacccgaggccgcagcgctatcttcgggcaaaaccccgtcaatgcgccgcgacagggcttttgcggcggccgaaagctcggcatcttcactttcccccacggccgccaatcccaaatgcagcgcctccagctcagttttcgtcaaattgagcgccggcagcgtataggcggcggtgatttgatatccgaggccgcgctcaccgcgaatgggcacgccagaagctgccaaagtgtccatgtcgcgataaagcgtgcggagcgacacgccaacaagctctgccaaatcgcaagcccggtagagatttccatcgcgtaggatttgaatcagggaaaaaagacggtctttgcgtgccatactgacagaataatggcagttgagtgtccacacaacggcaaaatgttgcgaacctgctttctgctccggcacaactggcttagaaacagccaacacttcatctaaggatacacgatatgacccctgcatttctcacaaacatccctccgatgggctatttgatcatagcccttgtcgtcttggttctatttggccgcggaaaaatctctgccatgatgggcgaaatgggcaaaggcatcaccgccttcaaaaaaggcgtcaatgatggccagcaagagattgaggaagccgcatccgaaggcgcaaaagatgtgacgcctgacacggaaaaagacaaatcctaatcactattacctctttgacataaggaagggtctcgatgtttggattgggatgggctgagatactggtcgcggctgtcgtggggctgattgtcatcggtcctaaagaattgcccggcgtgtttcgcaaaattggtcaatttgtcggtaaagccaaggccatggcccgtgatttcagccgggcgatgaacgacgctgctgatgatgcgggcgtgaaagacgcgatggactcggtcaactctctcaaagatggggtgcgcagcgtctcggatccgaccaccaagtggaaagatttcgtaccgggatctgaaattggaaaactgtcagaagagcgggctgaaaaagccaagaaaatgcatgatgccatggctgaacgagcgcagcagcgccttgacgcggaaaaagtgacaaaggccgcggcggcccaggagacccagaaacctgcggcagcaaaaaaaaccgcgccggctaagaaacctgcggcagccaagaaaccagcggctgcgaaaaaatcggcgcctgcaaaaaagtcgacgacgcccaagaaacctgcggctaaaaaggctgctccaaaacctggtaaagagacatgagccgcgaagacgaaagcctagacgattcttctgcccctctgatcgaac

SEQ ID NO: 731 - DNA, 4000 bp, Escherichia coli
  misc_feature (1)..(1): n is a, c, g, or t
  misc_feature (3)..(3): n is a, c, g, or t
  misc_feature (5)..(5): n is a, c, g, or t
  misc_feature (7)..(8): n is a, c, g, or t
  misc_feature (10)..(10): n is a, c, g, or t
  misc_feature (12)..(12): n is a, c, g, or t
  misc_feature (16)..(19): n is a, c, g, or t
  misc_feature (23)..(23): n is a, c, g, or t
  misc_feature (25)..(25): n is a, c, g, or t
  misc_feature (28)..(28): n is a, c, g, or t
  misc_feature (34)..(37): n is a, c, g, or t
  misc_feature (44)..(44): n is a, c, g, or t
  misc_feature (47)..(47): n is a, c, g, or t
  misc_feature (49)..(50): n is a, c, g, or t
  misc_feature (53)..(56): n is a, c, g, or t
  misc_feature (59)..(66): n is a, c, g, or t
  misc_feature (68)..(69): n is a, c, g, or t
  misc_feature (72)..(72): n is a, c, g, or t
  misc_feature (76)..(76): n is a, c, g, or t
  misc_feature (79)..(86): n is a, c, g, or t
  misc_feature (88)..(88): n is a, c, g, or t
  misc_feature (91)..(94): n is a, c, g, or t
  misc_feature (97)..(99): n is a, c, g, or t
  misc_feature (101)..(105): n is a, c, g, or t
  misc_feature (109)..(112): n is a, c, g, or t
  misc_feature (115)..(120): n is a, c, g, or t
  misc_feature (123)..(127): n is a, c, g, or t
  misc_feature (129)..(130): n is a, c, g, or t
  misc_feature (132)..(132): n is a, c, g, or t
  misc_feature (137)..(139): n is a, c, g, or t
  misc_feature (141)..(142): n is a, c, g, or t
  misc_feature (147)..(152): n is a, c, g, or t
  misc_feature (156)..(158): n is a, c, g, or t
  misc_feature (160)..(162): n is a, c, g, or t
  misc_feature (164)..(168): n is a, c, g, or t
  misc_feature (170)..(172): n is a, c, g, or t
  misc_feature (176)..(176): n is a, c, g, or t
  misc_feature (179)..(179): n is a, c, g, or t
  misc_feature (181)..(181): n is a, c, g, or t
  misc_feature (184)..(186): n is a, c, g, or t
  misc_feature (191)..(195): n is a, c, g, or t
  misc_feature (199)..(200): n is a, c, g, or t
  misc_feature (205)..(205): n is a, c, g, or t
  misc_feature (207)..(207): n is a, c, g, or t
  misc_feature (213)..(213): n is a, c, g, or t
  misc_feature (216)..(216): n is a, c, g, or t
  misc_feature (220)..(221): n is a, c, g, or t
  misc_feature (224)..(224): n is a, c, g, or t
  misc_feature (227)..(228): n is a, c, g, or t
  misc_feature (230)..(233): n is a, c, g, or t
  misc_feature (239)..(241): n is a, c, g, or t
  misc_feature (261)..(261): n is a, c, g, or t
  misc_feature (332)..(332): n is a, c, g, or t
  misc_feature (1250)..(1250): n is a, c, g, or t
  misc_feature (1346)..(1346): n is a, c, g, or t
  misc_feature (1975)..(1975): n is a, c, g, or t
  misc_feature (1977)..(1977): n is a, c, g, or t
  misc_feature (1991)..(1991): n is a, c, g, or t
  misc_feature (2024)..(2024): n is a, c, g, or t
  misc_feature (2683)..(2683): n is a, c, g, or t
  misc_feature (2702)..(2702): n is a, c, g, or t
  misc_feature (3437)..(3437): n is a, c, g, or t
  misc_feature (3446)..(3446): n is a, c, g, or t
  misc_feature (3683)..(3683): n is a, c, g, or t
nantntnntngnaggnnnngtgntnatnaaaaannnnagaaaanaanannatnnnnttnnnnnnnntnnttntttnaannnnnnnngnccnnnnccnnnannnnnaaannnnaannnnnnaannnnnanntnaaaannngnnccccnnnnnngggnnngnnnannnnnannnaaanaangnttnnnaaaannnnncccnnttttntntagggnggnaaannaanccnnannnntttaannntggatattgaaatatgcctnataaaaaatttaaaacaggaaattctgaaatagaccagcgtattttagaacttgctgaattgtttgctccntctgaaagctatgaggctcttcgactagaaatattgaccacagtcgccaaattttttctcgaacataatgacttgggggagcacaaacttattaacaccaccttaaaagaactacgccacgcatttcgagtttttaactcttaccgagacattcggaaagtcgttatttttggatctaatcgtagcccaacgtcagatccctgctacaaactagcctacgaactatcaaagattatagctaatgaaggaatgatggtaattacaggcgcgggcggtggaataatggaagctgcaaacaagggagcaggaaagataaatagttttggtataaatataaagcttccttgtgagcaaaaacctaacccgtttattgatgatgaccctaaactgatggagtttaaatatttttttactagaaagttgattttcataaaagaatcagatgcaaccgtgcttttacctggcggtttgggtacccttgacgaaggttttgaaaacctgactctgtttcaaactgggaaatcatcacctagacccatcattcttttagaaccaaaaaatggaaactattggaacacatggatggattgggtcaaatcagtacttgttaataataaatttatttcacccgatgatgtacacctttttcaattaaaacattcttcaaaagaggcttaccgcgcaatccatgatttttaccgtgtgtatcattcactacgttattgtaaaggtctcactgttcttcgttttacacagtcaatttcaaaaaaaatcatcgacaggctaaacgttgaatttcaagatattatcacggagggaacaatctattcttcccctcccttgaagggggaagttcaaagtcatgacaagactctaaaaatgcctcgcctgatttttaaattcgacaaacaaagtttnggtcgactgaaccaaatgattcggaatattaacgaatgggttggttagtttttttctttgtgacaggaatgtgaattccttaatagttactcactncgtggatggacttaaggatttcctgaggcccattgagtcggtttacccggaaactcagatccagagctttgcatagtccatagggagtcgttctatttttagggtatcctgactatattaggagggctatttatacaaccaatgctatcgagtcattaaaccgatccttacgcaaggtcacaaaaaatcgaggttcttattccaataatgactcattattaggattttttatctctgggaatattttccactactgaaattaagattctcaggttttatacccattcgcagttggaaagttcctgaaatatttctagctaatctttttgcttcatcagctttcacaccagaaaagttttcatcaacggtcatcttaaagatttccatccatcgagtaaaatgtatggcttgaataggcaaattcaaatgtttttcaaacgggtttcccgtatattcttcaactccaaaaagtagtctttcccaaaactggtacatggttggcaagtgatgtttccaatcatcaatggcctcgtcaaaaatgggacccaatagttcatcttgacgggcattaccataaaaagaatcgactagcaaacaaaccccttctccggactgaatatcatttaagntnttgctttttaatgncttggaagtttttacaggcaacctcttcatctntttacctggtatgggtgaaagttgacttttaatttttatattggtgaactatctaaagataatgtctcatattgttggtctagtcaccactaatctctgcgacaagtaatagattggtttttaaagtaattaaaaattctccaccccctccgaccatttaaaataaggggctacggtttaagccgtagcctattttttttcttgtcgcttgtttatacttccagattggtaattttctctgtaactttaaaatcgtattctggatattcatatatcggcatgcggggttctgtttcaccaagagaatagccccagatactttcgtattctgaaacattttcgcccatctcctcaagatgtttcaaatattcacttatagatttagactcaatgataaccacctttcccattttgttgattacagggctgtgagatcttgttgagtcatgttcaaactctagaatgcggcggccataacgtgtgatgcctattacccggaatgacaaactcttcccaacacccggcaaattcaagatattacgatctgttgacaggaaaggcaaatcagccgactgaagtaactcctcaatattttctaccatcttttcagcttcgagcgggaaacggcgaattcttgaatgatgtttttcgggaaggangccgaaagccttctcttcnatctgttcttggacggcacgggcattggtggcaaaattatgttggttttccatataacctttaatcgagaatgtgtaatagcccagtaccccgatttcatttaaaacttgccgaagtttggcggtgtgacctctgcgtgatgacgctgtcgtcaaaacatgttggttggttacggtccaccctgcggaaatgagttttaaaattccctcacgagcttccggggttacttccatggcggattcaaagtgagtttgcaccagaaattgcttaacaccaatctttgaagccttgagcttaaactccgccaatatcaaagtaagttcatctgtaatcctttgggggatatatacaggaaggcgcgttcccaggcgtacccgtaccaattcggcatatttttcgccgtcttttcttgatttgttggcctctattttacgagcagccatttgataaatagcttctaatacttcttcgagagatttgtccgaactcattaatgcgtcgcccccggtaattaaaatatcccggagttgcgaatcgctttcaaaataatccatcaagcgctttaatttttcaggccaagtctctttgggttgcagtttattcaggttaaaattgagatggccgctttggaaatcgtacatgcgctgacaggattggcacagtccgccacacgcccgtcccaccgtgtccggaattaaaatggccacttcaggatagcgccgatgaacattgttntgagtaggnaagagccatccagcagcattaggtttaccaggttcaactttatcctccttctcccaagcaacgatactgccaaattcgtcgatcagctgtttgctgtaaattacataatccctgatcgccaggtcggccccgatagcaaagtagggaacccgtacgtggagcagtgaaagataatagggatttataaagaagggaatacccgctttttcggcgcgttttaagtttttcattgtatcngggtcgagggaaaaatcgagcatctcattaagcaggtctggggaacggatagcaaagtttagatgaaagtgattggtgtcccaccacttaagagccgtagaatacttattcgctcgtgacatgtccggtttaaacttgaaacttctgctggatacttctcccttgtcaatgcgatcgatgatgatatttaatatccgttttttgttttcctctctcaattgcataatgtgtgggtccagacctgatggccagcgagccatccattcttccatctgatccttgtcaggcaatttgcgttccagttttccgcttaactg

SEQ ID NO: 732 - DNA, 4000 bp, Escherichia coli
  misc_feature (1)..(3): n is a, c, g, or t
  misc_feature (5)..(6): n is a, c, g, or t
  misc_feature (8)..(22): n is a, c, g, or t
  misc_feature (24)..(25): n is a, c, g, or t
  misc_feature (27)..(28): n is a, c, g, or t
  misc_feature (30)..(32): n is a, c, g, or t
  misc_feature (34)..(35): n is a, c, g, or t
  misc_feature (40)..(42): n is a, c, g, or t
  misc_feature (44)..(46): n is a, c, g, or t
  misc_feature (48)..(54): n is a, c, g, or t
  misc_feature (56)..(56): n is a, c, g, or t
  misc_feature (58)..(68): n is a, c, g, or t
  misc_feature (70)..(71): n is a, c, g, or t
  misc_feature (74)..(74): n is a, c, g, or t
  misc_feature (76)..(81): n is a, c, g, or t
  misc_feature (83)..(84): n is a, c, g, or t
  misc_feature (86)..(86): n is a, c, g, or t
  misc_feature (89)..(91): n is a, c, g, or t
  misc_feature (93)..(95): n is a, c, g, or t
  misc_feature (97)..(98): n is a, c, g, or t
  misc_feature (101)..(101): n is a, c, g, or t
  misc_feature (103)..(104): n is a, c, g, or t
  misc_feature (106)..(106): n is a, c, g, or t
  misc_feature (108)..(112): n is a, c, g, or t
  misc_feature (114)..(114): n is a, c, g, or t
  misc_feature (116)..(120): n is a, c, g, or t
  misc_feature (122)..(128): n is a, c, g, or t
  misc_feature (130)..(135): n is a, c, g, or t
  misc_feature (138)..(141): n is a, c, g, or t
  misc_feature (143)..(144): n is a, c, g, or t
  misc_feature (146)..(151): n is a, c, g, or t
  misc_feature (153)..(155): n is a, c, g, or t
  misc_feature (157)..(168): n is a, c, g, or t
  misc_feature (170)..(170): n is a, c, g, or t
  misc_feature (172)..(179): n is a, c, g, or t
  misc_feature (181)..(181): n is a, c, g, or t
  misc_feature (183)..(187): n is a, c, g, or t
  misc_feature (190)..(196): n is a, c, g, or t
  misc_feature (201)..(206): n is a, c, g, or t
  misc_feature (208)..(209): n is a, c, g, or t
  misc_feature (212)..(213): n is a, c, g, or t
  misc_feature (215)..(219): n is a, c, g, or t
  misc_feature (221)..(223): n is a, c, g, or t
  misc_feature (225)..(228): n is a, c, g, or t
  misc_feature (230)..(232): n is a, c, g, or t
  misc_feature (236)..(237): n is a, c, g, or t
  misc_feature (241)..(245): n is a, c, g, or t
  misc_feature (249)..(251): n is a, c, g, or t
  misc_feature (253)..(253): n is a, c, g, or t
  misc_feature (255)..(256): n is a, c, g, or t
  misc_feature (258)..(262): n is a, c, g, or t
  misc_feature (264)..(271): n is a, c, g, or t
  misc_feature (273)..(275): n is a, c, g, or t
  misc_feature (277)..(288): n is a, c, g, or t
  misc_feature (290)..(293): n is a, c, g, or t
  misc_feature (295)..(297): n is a, c, g, or t
  misc_feature (300)..(301): n is a, c, g, or t
  misc_feature (303)..(303): n is a, c, g, or t
  misc_feature (306)..(306): n is a, c, g, or t
  misc_feature (308)..(310): n is a, c, g, or t
  misc_feature (312)..(321): n is a, c, g, or t
  misc_feature (324)..(328): n is a, c, g, or t
  misc_feature (330)..(340): n is a, c, g, or t
  misc_feature (342)..(354): n is a, c, g, or t
  misc_feature (356)..(357): n is a, c, g, or t
  misc_feature (359)..(359): n is a, c, g, or t
  misc_feature (361)..(364): n is a, c, g, or t
  misc_feature (367)..(374): n is a, c, g, or t
  misc_feature (376)..(377): n is a, c, g, or t
  misc_feature (380)..(380): n is a, c, g, or t
  misc_feature (382)..(389): n is a, c, g, or t
  misc_feature (391)..(398): n is a, c, g, or t
  misc_feature (400)..(403): n is a, c, g, or t
  misc_feature (405)..(407): n is a, c, g, or t
  misc_feature (409)..(410): n is a, c, g, or t
  misc_feature (412)..(415): n is a, c, g, or t
  misc_feature (418)..(418): n is a, c, g, or t
  misc_feature (420)..(422): n is a, c, g, or t
  misc_feature (425)..(425): n is a, c, g, or t
  misc_feature (427)..(428): n is a, c, g, or t
  misc_feature (431)..(431): n is a, c, g, or t
  misc_feature (433)..(435): n is a, c, g, or t
  misc_feature (437)..(440): n is a, c, g, or t
  misc_feature (443)..(445): n is a, c, g, or t
  misc_feature (447)..(449): n is a, c, g, or t
  misc_feature (451)..(459): n is a, c, g, or t
  misc_feature (463)..(463): n is a, c, g, or t
  misc_feature (466)..(466): n is a, c, g, or t
  misc_feature (469)..(469): n is a, c, g, or t
  misc_feature (474)..(478): n is a, c, g, or t
  misc_feature (481)..(481): n is a, c, g, or t
  misc_feature (483)..(484): n is a, c, g, or t
  misc_feature (487)..(488): n is a, c, g, or t
  misc_feature (490)..(492): n is a, c, g, or t
  misc_feature (494)..(497): n is a, c, g, or t
  misc_feature (500)..(500): n is a, c, g, or t
  misc_feature (507)..(515): n is a, c, g, or t
  misc_feature (517)..(519): n is a, c, g, or t
  misc_feature (524)..(530): n is a, c, g, or t
  misc_feature (532)..(533): n is a, c, g, or t
  misc_feature (536)..(539): n is a, c, g, or t
  misc_feature (542)..(544): n is a, c, g, or t
  misc_feature (546)..(546): n is a, c, g, or t
  misc_feature (548)..(551): n is a, c, g, or t
  misc_feature (554)..(555): n is a, c, g, or t
  misc_feature (557)..(557): n is a, c, g, or t
  misc_feature (560)..(561): n is a, c, g, or t
  misc_feature (563)..(569): n is a, c, g, or t
  misc_feature (574)..(574): n is a, c, g, or t
  misc_feature (577)..(580): n is a, c, g, or t
  misc_feature (582)..(582): n is a, c, g, or t
  misc_feature (584)..(584): n is a, c, g, or t
  misc_feature (586)..(589): n is a, c, g, or t
  misc_feature (591)..(591): n is a, c, g, or t
  misc_feature (593)..(593): n is a, c, g, or t
  misc_feature (595)..(596): n is a, c, g, or t
  misc_feature (598)..(599): n is a, c, g, or t
  misc_feature (601)..(605): n is a, c, g, or t
  misc_feature (609)..(611): n is a, c, g, or t
  misc_feature (614)..(614): n is a, c, g, or t
  misc_feature (619)..(619): n is a, c, g, or t
  misc_feature (621)..(625): n is a, c, g, or t
  misc_feature (627)..(628): n is a, c, g, or t
  misc_feature (631)..(638): n is a, c, g, or t
  misc_feature (640)..(643): n is a, c, g, or t
  misc_feature (645)..(650): n is a, c, g, or t
  misc_feature (652)..(654): n is a, c, g, or t
  misc_feature (656)..(656): n is a, c, g, or t
  misc_feature (658)..(661): n is a, c, g, or t
  misc_feature (664)..(664): n is a, c, g, or t
  misc_feature (666)..(669): n is a, c, g, or t
  misc_feature (671)..(671): n is a, c, g, or t
  misc_feature (674)..(679): n is a, c, g, or t
  misc_feature (681)..(681): n is a, c, g, or t
  misc_feature (683)..(684): n is a, c, g, or t
  misc_feature (686)..(686): n is a, c, g, or t
  misc_feature (688)..(689): n is a, c, g, or t
  misc_feature (692)..(693): n is a, c, g, or t
  misc_feature (695)..(695): n is a, c, g, or t
  misc_feature (698)..(700): n is a, c, g, or t
  misc_feature (702)..(706): n is a, c, g, or t
  misc_feature (708)..(708): n is a, c, g, or t
  misc_feature (710)..(712): n is a, c, g, or t
  misc_feature (715)..(717): n is a, c, g, or t
  misc_feature (719)..(720): n is a, c, g, or t
  misc_feature (724)..(730): n is a, c, g, or t
  misc_feature (732)..(732): n is a, c, g, or t
  misc_feature (736)..(738): n is a, c, g, or t
  misc_feature (741)..(744): n is a, c, g, or t
  misc_feature (746)..(747): n is a, c, g, or t
  misc_feature (749)..(756): n is a, c, g, or t
  misc_feature (758)..(760): n is a, c, g, or t
  misc_feature (762)..(764): n is a, c, g, or t
  misc_feature (766)..(766): n is a, c, g, or t
  misc_feature (768)..(768): n is a, c, g, or t
  misc_feature (770)..(775): n is a, c, g, or t
  misc_feature (777)..(777): n is a, c, g, or t
  misc_feature (780)..(781): n is a, c, g, or t
  misc_feature (784)..(784): n is a, c, g, or t
  misc_feature (788)..(791): n is a, c, g, or t
  misc_feature (793)..(798): n is a, c, g, or t
  misc_feature (800)..(800): n is a, c, g, or t
  misc_feature (802)..(802): n is a, c, g, or t
  misc_feature (804)..(805): n is a, c, g, or t
  misc_feature (807)..(810): n is a, c, g, or t
  misc_feature (814)..(814): n is a, c, g, or t
  misc_feature (816)..(817): n is a, c, g, or t
  misc_feature (819)..(819): n is a, c, g, or t
  misc_feature (821)..(822): n is a, c, g, or t
  misc_feature (825)..(827): n is a, c, g, or t
  misc_feature (830)..(835): n is a, c, g, or t
  misc_feature (837)..(837): n is a, c, g, or t
  misc_feature (839)..(839): n is a, c, g, or t
  misc_feature (841)..(841): n is a, c, g, or t
  misc_feature (843)..(843): n is a, c, g, or t
  misc_feature (847)..(848): n is a, c, g, or t
  misc_feature (850)..(850): n is a, c, g, or t
  misc_feature (853)..(855): n is a, c, g, or t
  misc_feature (857)..(868): n is a, c, g, or t
  misc_feature (870)..(877): n is a, c, g, or t
  misc_feature (880)..(880): n is a, c, g, or t
  misc_feature (882)..(883): n is a, c, g, or t
  misc_feature (885)..(885): n is a, c, g, or t
  misc_feature (888)..(889): n is a, c, g, or t
  misc_feature (891)..(894): n is a, c, g, or t
  misc_feature (896)..(904): n is a, c, g, or t
  misc_feature (906)..(914): n is a, c, g, or t
  misc_feature (916)..(918): n is a, c, g, or t
  misc_feature (921)..(930): n is a, c, g, or t
  misc_feature (933)..(936): n is a, c, g, or t
  misc_feature (938)..(938): n is a, c, g, or t
  misc_feature (941)..(944): n is a, c, g, or t
  misc_feature (946)..(950): n is a, c, g, or t
  misc_feature (952)..(958): n is a, c, g, or t
  misc_feature (960)..(961): n is a, c, g, or t
  misc_feature (963)..(966): n is a, c, g, or t
  misc_feature (968)..(968): n is a, c, g, or t
  misc_feature (970)..(973): n is a, c, g, or t
  misc_feature (975)..(975): n is a, c, g, or t
  misc_feature (977)..(985): n is a, c, g, or t
  misc_feature (987)..(999): n is a, c, g, or t
  misc_feature (1001)..(1001): n is a, c, g, or t
  misc_feature (1003)..(1009): n is a, c, g, or t
  misc_feature (1011)..(1013): n is a, c, g, or t
  misc_feature (1015)..(1020): n is a, c, g, or t
  misc_feature (1023)..(1029): n is a, c, g, or t
  misc_feature (1035)..(1040): n is a, c, g, or t
  misc_feature (1042)..(1044): n is a, c, g, or t
  misc_feature (1046)..(1046): n is a, c, g, or t
  misc_feature (1051)..(1051): n is a, c, g, or t
  misc_feature (1054)..(1054): n is a, c, g, or t
  misc_feature (1056)..(1057): n is a, c, g, or t
  misc_feature (1060)..(1060): n is a, c, g, or t
  misc_feature (1062)..(1062): n is a, c, g, or t
  misc_feature (1064)..(1065): n is a, c, g, or t
  misc_feature (1067)..(1074): n is a, c, g, or t
  misc_feature (1077)..(1078): n is a, c, g, or t
  misc_feature (1080)..(1085): n is a, c, g, or t
  misc_feature (1087)..(1087): n is a, c, g, or t
  misc_feature (1090)..(1098): n is a, c, g, or t
  misc_feature (1100)..(1100): n is a, c, g, or t
  misc_feature (1102)..(1102): n is a, c, g, or t
  misc_feature (1104)..(1105): n is a, c, g, or t
  misc_feature (1108)..(1109): n is a, c, g, or t
  misc_feature (1111)..(1112): n is a, c, g, or t
  misc_feature (1114)..(1115): n is a, c, g, or t
  misc_feature (1121)..(1123): n is a, c, g, or t
  misc_feature (1126)..(1132): n is a, c, g, or t
  misc_feature (1134)..(1134): n is a, c, g, or t
  misc_feature (1136)..(1141): n is a, c, g, or t
  misc_feature (1144)..(1145): n is a, c, g, or t
  misc_feature (1147)..(1147): n is a, c, g, or t
  misc_feature (1149)..(1149): n is a, c, g, or t
  misc_feature (1153)..(1153): n is a, c, g, or t
  misc_feature (1155)..(1157): n is a, c, g, or t
  misc_feature (1163)..(1167): n is a, c, g, or t
  misc_feature (1170)..(1171): n is a, c, g, or t
  misc_feature (1174)..(1175): n is a, c, g, or t
  misc_feature (1178)..(1178): n is a, c, g, or t
  misc_feature (1180)..(1181): n is a, c, g, or t
  misc_feature (1184)..(1192): n is a, c, g, or t
  misc_feature (1194)..(1194): n is a, c, g, or t
  misc_feature (1198)..(1199): n is a, c, g, or t
  misc_feature (1202)..(1203): n is a, c, g, or t
  misc_feature (1205)..(1208): n is a, c, g, or t
  misc_feature (1213)..(1213): n is a, c, g, or t
  misc_feature (1215)..(1216): n is a, c, g, or t
  misc_feature (1218)..(1220): n is a, c, g, or t
  misc_feature (1224)..(1227): n is a, c, g, or t
  misc_feature (1229)..(1238): n is a, c, g, or t
  misc_feature (1240)..(1244): n is a, c, g, or t
  misc_feature (1246)..(1246): n is a, c, g, or t
  misc_feature (1249)..(1250): n is a, c, g, or t
  misc_feature (1252)..(1255): n is a, c, g, or t
  misc_feature (1257)..(1258): n is a, c, g, or t
  misc_feature (1260)..(1261): n is a, c, g, or t
  misc_feature (1263)..(1263): n is a, c, g, or t
  misc_feature (1266)..(1266): n is a, c, g, or t
  misc_feature (1268)..(1268): n is a, c, g, or t
  misc_feature (1271)..(1272): n is a, c, g, or t
  misc_feature (1274)..(1277): n is a, c, g, or t
  misc_feature (1279)..(1281): n is a, c, g, or t
  misc_feature (1283)..(1284): n is a, c, g, or t
  misc_feature (1286)..(1286): n is a, c, g, or t
  misc_feature (1288)..(1294): n is a, c, g, or t
  misc_feature (1296)..(1296): n is a, c, g, or t
  misc_feature (1298)..(1298): n is a, c, g, or t
  misc_feature (1300)..(1307): n is a, c, g, or t
  misc_feature (1309)..(1311): n is a, c, g, or t
  misc_feature (1313)..(1313): n is a, c, g, or t
  misc_feature (1315)..(1322): n is a, c, g, or t
  misc_feature (1325)..(1325): n is a, c, g, or t
  misc_feature (1331)..(1331): n is a, c, g, or t
  misc_feature (1333)..(1333): n is a, c, g, or t
  misc_feature (1336)..(1336): n is a, c, g, or t
  misc_feature (1340)..(1340): n is a, c, g, or t
  misc_feature (1343)..(1344): n is a, c, g, or t
  misc_feature (1346)..(1355): n is a, c, g, or t
  misc_feature (1358)..(1358): n is a, c, g, or t
  misc_feature (1361)..(1361): n is a, c, g, or t
  misc_feature (1363)..(1365): n is a, c, g, or t
  misc_feature (1367)..(1368): n is a, c, g, or t
  misc_feature (1370)..(1371): n is a, c, g, or t
  misc_feature (1374)..(1374): n is a, c, g, or t
  misc_feature (1376)..(1376): n is a, c, g, or t
  misc_feature (1378)..(1378): n is a, c, g, or t
  misc_feature (1380)..(1380): n is a, c, g, or t
  misc_feature (1383)..(1383): n is a, c, g, or t
  misc_feature (1385)..(1385): n is a, c, g, or t
  misc_feature (1387)..(1391): n is a, c, g, or t
  misc_feature (1393)..(1393): n is a, c, g, or t
  misc_feature (1395)..(1395): n is a, c, g, or t
  misc_feature (1398)..(1398): n is a, c, g, or t
  misc_feature (1401)..(1402): n is a, c, g, or t
  misc_feature (1404)..(1407): n is a, c, g, or t
  misc_feature (1409)..(1410): n is a, c, g, or t
  misc_feature (1413)..(1413): n is a, c, g, or t
  misc_feature (1415)..(1421): n is a, c, g, or t
  misc_feature (1424)..(1426): n is a, c, g, or t
  misc_feature (1429)..(1430): n is a, c, g, or t
  misc_feature (1433)..(1433): n is a, c, g, or t
  misc_feature (1440)..(1441): n is a, c, g, or t
  misc_feature (1444)..(1444): n is a, c, g, or t
  misc_feature (1447)..(1448): n is a, c, g, or t
  misc_feature (1450)..(1450): n is a, c, g, or t
  misc_feature (1453)..(1454): n is a, c, g, or t
  misc_feature (1456)..(1456): n is a, c, g, or t
  misc_feature (1459)..(1459): n is a, c, g, or t
  misc_feature (1462)..(1462): n is a, c, g, or t
  misc_feature (1465)..(1465): n is a, c, g, or t
  misc_feature (1467)..(1467): n is a, c, g, or t
  misc_feature (1469)..(1473): n is a, c, g, or t
  misc_feature (1478)..(1480): n is a, c, g, or t
  misc_feature (1489)..(1489): n is a, c, g, or t
  misc_feature (1491)..(1492): n is a, c, g, or t
  misc_feature (1495)..(1495): n is a, c, g, or t
  misc_feature (1499)..(1499): n is a, c, g, or t
  misc_feature (1502)..(1503): n is a, c, g, or t
  misc_feature (1506)..(1506): n is a, c, g, or t
  misc_feature (1509)..(1509): n is a, c, g, or t
  misc_feature (1511)..(1517): n is a, c, g, or t
  misc_feature (1519)..(1519): n is a, c, g, or t
  misc_feature (1522)..(1522): n is a, c, g, or t
  misc_feature (1524)..(1524): n is a, c, g, or t
  misc_feature (1526)..(1526): n is a, c, g, or t
  misc_feature (1528)..(1528): n is a, c, g, or t
  misc_feature (1532)..(1532): n is a, c, g, or t
  misc_feature (1534)..(1536): n is a, c, g, or t
  misc_feature (1539)..(1541): n is a, c, g, or t
  misc_feature (1544)..(1545): n is a, c, g, or t
  misc_feature (1559)..(1559): n is a, c, g, or t
  misc_feature (1562)..(1562): n is a, c, g, or t
  misc_feature (1602)..(1603): n is a, c, g, or t
  misc_feature (1628)..(1628): n is a, c, g, or t
  misc_feature (1630)..(1630): n is a, c, g, or t
  misc_feature (1633)..(1633): n is a, c, g, or t
  misc_feature (1685)..(1685): n is a, c, g, or t
  misc_feature (1711)..(1711): n is a, c, g, or t
  misc_feature (1950)..(1950): n is a, c, g, or t
  misc_feature (1962)..(1962): n is a, c, g, or t
  misc_feature (1965)..(1965): n is a, c, g, or t
  misc_feature (1986)..(1986): n is a, c, g, or t
  misc_feature (1995)..(1995): n is a, c, g, or t
  misc_feature (2004)..(2004): n is a, c, g, or t
  misc_feature (2203)..(2203): n is a, c, g, or t
  misc_feature (2358)..(2358): n is a, c, g, or t
  misc_feature (3407)..(3407): n is a, c, g, or t
  misc_feature (3410)..(3411): n is a, c, g, or t
  misc_feature (3416)..(3416): n is a, c, g, or t
  misc_feature (3425)..(3425): n is a, c, g, or t
  misc_feature (3431)..(3432): n is a, c, g, or t
  misc_feature (3436)..(3436): n is a, c, g, or t
  misc_feature (3438)..(3438): n is a, c, g, or t
  misc_feature (3440)..(3441): n is a, c, g, or t
  misc_feature (3443)..(3443): n is a, c, g, or t
  misc_feature (3445)..(3445): n is a, c, g, or t
  misc_feature (3448)..(3448): n is a, c, g, or t
  misc_feature (3451)..(3455): n is a, c, g, or t
  misc_feature (3457)..(3463): n is a, c, g, or t
  misc_feature (3466)..(3467): n is a, c, g, or t
  misc_feature (3474)..(3474): n is a, c, g, or t
  misc_feature (3476)..(3476): n is a, c, g, or t
  misc_feature (3544)..(3544): n is a, c, g, or t
  misc_feature (3662)..(3662): n is a, c, g, or t
  misc_feature (3683)..(3683): n is a, c, g, or t
nnntnngnnnnnnnnnnnnnnncnncnntnnngnntggtnnntnnntnnnnnnngnannnnnnnnnnntnngtnannnnnnanngnaannnannnannaantnnantnnnnnanannnnngnnnnnnnannnnnncannnncnngnnnnnnannnannnnnnnnnnnnantnnnnnnnnancnnnnnttnnnnnnncccannnnnnannaannannnnncnnncnnnncnnncccnnccannnnntaannnangnnannnnnannnnnnnnannnannnnnnnnnnnncnnnngnnnggnngnggngnnntnnnnnnnnnnctnnnnntnnnnnnnnnnntnnnnnnnnnnnnntnnangnnnnggnnnnnnnntnngtnannnnnnnncnnnnnnnncnnnncnnntnngnnnngancnnntancnnagngnnngnnnnggnnngnnngnnnnnnnnnttanttnttncaaannnnnggngnnagnnannnannnnagngaggggnnnnnnnnntnnnaagtnnnnnnnannaannnnaannnanannnnacnnanaannannnnnnngaaanaannnngngngnnnntncntnnannannnnntcgnnnatnaaatngnnnnngnntgnnnnnnnnannnntnnnnnnannnanannnnaangnnnncnaannnnnncntnnangnnaannanaannnannnnntngnnnagnnngnntgannnnnnntncatnnnttnnnngnncnnnnnnnnannnannnantncnnnnnnanaannaantaannnnannnnnngntnannannnncccncnnanannaannnacnnnnnncngncngnctanncnaannnannnnnnnnnnnnannnnnnnnctntnncnggnngnnnngnnnnnnnnnannnnnnnnnannnaannnnnnnnnnaannnntngannnnannnnnannnnnnncnntnnnnanannnngngnnnnnnnnncnnnnnnnnnnnnntnannnnnnntnnntnnnnnnggnnnnnnntgaatnnnnnntnnntnatttnttntnnttntnannannnnnnnntannannnnnntnatnnnnnnnnncngnannaannannanntattannntannnnnnnangnnnnnnaanntntnaagntnnntaagcnnnnnaannttnngangnnatnnnnnnnnngnaaannggnnannnngctantnntnnnattnnnntnnnnnnnnnntnnnnnanttnntnnnntnnanncnttntntcnntnnnncnnnanntntnnnnnnntntnannnnnnnnannncntnnnnnnnnttngtatananaanatanggnnannnnnnnnnnttntcncnnngnngnntantnangnaananannnnntntntgnacnntnnnncnntanannnnnnncannncgnnaantgttttnnaanagnnanagnnanttnagnttnantnnnnnacggnnntatttttanannatntttnttnnaanaancnnnnnnntntananananatantnnncannngcnnttttttgtgttacnttnttttacctaacaaattttatgtcgagctcgagccccaagnnttagctcttttggaacccaagtatnanccntcgaactcaacgtaatctatattagttagttatataattggagaataaaaanaatgtctaaagaccaaatagatcaantaaaaaatccattcactatggacctaaaccgtcgtcaatttgtcaccagcagtctagctgcaggtattatcttgccgactgcattggctgcagctggaaacgcttcagctggatctcacaaggccggtggtaaatttagattgggcatgggccacggatcaaccactgattcattagatccaggcacatcagaaaacggcatgtcacaaaatgtcatttttgcttattgtaatcacctnacagaagtgagnaanaaaggacagctaattcctganctcgcatcngaatatggngcttctgcagatgcaaaagtttggacctttaagattcgctcaggcgtcaccttccatgatggcaaagcactgacacccgctgatgtagtggcttcatttcagttccacatgggcgaagataccaagtctgcaggtaaggcattattagcagatgtcactaacatcgccattaatggagatgatgtcgtgttcaccttgnctaatggcagtgctgactttgcctttatcgtaagtgactaccacttccccattctacctgtgcgtgatggtcagctagactgggcttctggtattggcactggtggctatatcatggaaaattatgagccaggcgtgcgggctaagttctatcgnaatccgaactactggaagcaagatgctgctcacttcgatgaagtggaactattggtcatacttgacgtaacagccagacagaatgccatgatgaatggcgacgtagatgcgattggccgagtagaccctaaaacggttcacttgttagcgcgtaatccttctctggagattttagaaaccacgggcaccttgcattacaccttcccaatgcgttgtgatgctgctccctttgataactatgatttccgcatggcctgtaaattgtcagtagaccgcgaagaattagtcactaagattctttcaggccatggggccattggtaacgatacccctatttctacggctaacccgttccacaatagtgaactagctcagcgagcctatgatccagacaaggcggcttttcatctgaaaaaagccggttatgatggttctaatgtgcagttatctgcctccgatgcagcctttgctggtgccgttgacgccgctcttttgattaaagaatcggcggctaagtcgggacttaatattgaagtagtgcgtgagcctaaagatggttattggtctaatgtgtggaataagaagccatggactgcatgctattggggcggccgtccgacggaagattggatgttcaaagccgcctacatggcagacggcaaatggaacgataccgcatggcgcacgggtgcctctgttgaacgctttaacaaactggtacaaatgggaagttcagaattagatttggctaagcgccgtgaaatctattatgaatgccaagccttggttaacgacgacggtggagcgttggtgcctatgttcgctaataacgtgcatgccttgagtaaaaaattagctcatggccctgatgttgcagctaactgggaactagatggtggtaaggcagctgagcgttggtggtttgcttaacgcccactgaccttaacaaacgggcctgcacttttacttaaaagtgcaggcccgttttaacttatgggtctaaatagtcctttggacttgcctttttatgtgcattatttaacgtgccnttnntaccnttgaggggnttaacnncttngncnngntnacnacnnnnntnnnnnnnacnnccttctngnggggccgattactgtgtatgcagtttttttagacgatctgcccgcagcaattgcactctgtgagacgntatgagtttatcgctggttttaattgttttggcctctgcctttttacatgcgttctggaacgctttggtcaaaggctctgccgacaagacgattgtactgggtctgattgccttgggncatgtggtacctggtattatnattgcaacgcaggcgccactgcctggatgggccgccgtaccctatatcattgcctcaaccctcatccactggggatattattattttttaaatctcgcctatcgcattggagacctgagccttgtctaccccatcacccgcggtttagcgccagtcttagtggcattgggggcacaaatatggattggtgagagccttcctggcttggcttggttaggcatcttttcagtctcggctggggtgatggtgctgtcgcaaggtattttcaaaacagaggtgccaaaattatcaatggttgcagcagtcattgtggcggc

SEQ ID NO: 733 - DNA, 4000 bp, Escherichia coli
  misc_feature (28)..(28): n is a, c, g, or t
  misc_feature (61)..(61): n is a, c, g, or t
  misc_feature (328)..(328): n is a, c, g, or t
  misc_feature (448)..(448): n is a, c, g, or t
  misc_feature (582)..(582): n is a, c, g, or t
  misc_feature (886)..(886): n is a, c, g, or t
  misc_feature (1991)..(1991): n is a, c, g, or t
  misc_feature (3015)..(3015): n is a, c, g, or t
  misc_feature (3082)..(3082): n is a, c, g, or t
  misc_feature (3209)..(3209): n is a, c, g, or t
  misc_feature (3306)..(3306): n is a, c, g, or t
  misc_feature (3452)..(3452): n is a, c, g, or t
  misc_feature (3506)..(3506): n is a, c, g, or t
  misc_feature (3623)..(3623): n is a, c, g, or t
  misc_feature (3642)..(3642): n is a, c, g, or t
  misc_feature (3845)..(3845): n is a, c, g, or t
  misc_feature (3929)..(3929): n is a, c, g, or t
ccggccacccaggttgctatccgacaantgcacctggccgaacacaccctggctctggctntagcccaggccgcccgaaagggcaccggtggattgctcggtgatgcccagcacgatggtcaccgtgccgggggactcgggcaggggcttgagggtcaccttgacatcgccgaacaggccggtgccgtagaggcgtttgatgtcttcttcgaggcggcggcggttgaagctgtcaccgggcttggtggccagttcccggttcaccacccagagcctggttttgcccttgattggctggcccttggcgttggtgggggagccctccttntcgacaaactggatctcgacgccagccacggtgccttcccgcaccgtgagttgcaccactccctggggggtcaccttcgagggacccgtcacccgggccagggaatagccctggtcgctntaccacttctgcaggtcctgaaggcgcccctgcagggtgttgaggttgagggtcttgccgtagtcggaagcgaaggtatcgggaatcagggtggcgggcagcttggccttgcctccctccagttccaccttggngagcaccggattgggctcgaccgttactagaagccgcacccccaggggcccgtcctggggctggatgcgcacatcggagaaccagccgctggcgtagatggcggaaaggtcgttgcgcagctcactgcgggtcacctgggtgccgggccgggtcgccatggcgtcgtaaacggccagctccagccgctcccgttccgggtgctgctggagccccttgacgaccacctcactgatcaaaaccttgggttcgctgggggccccggcctcgggggcctggctggcggtgggggcagccgaccctggngccggggcggcagcgggtttggcaagcccaggcttgccgactcctggctttggcgctcctggttggagcgtgggcgcagcagcagaggggctggacgccgctgccggggaactggctggggcggactgggtttgggacgccgcacccgtggccgcctggcccggagtcaccaggctcgctgccagcaaaggcaggctcgcggcgagtcccagggggccgccgaagcggttgggacggttcctgccgtgaaggaggcctgccatgggagtggggagagtgcggctgaaccgcaaagttccgccgaccttacctgtaggtgcggggttctgggcaggccccttggacccgtttgcagacctccccgtaggcctcgaccacaccgccgaggtcctggcggaagcgatccttgtccaaaatccgttcgctggcatcggccacctgggtgttccagagccggcaggtgtcggggctgatttcatcggccagcagcaattcaccgctcgcgctgaagcccagctcgatcttgaaatcgaccaactccagctccaggccggcaaaaaacggacgcagcaccccattcacttggcgggccagctcttcgaggcgctggcgctgctctggcgtgagcaggccgagccgctccaagcgcgcctcgctcaagaagggatcgccgaaggaatcatccttgtaatacaagtccaacaggggcggctccaatgctgcacctgcggcgatcggcagctgcttgcagagggagcccgccgccacatttcggatcaccacctccaccggcacaatctgcacgggccttaccagcatccagttactgccatcgatgcccaggtaatgggtaggcaccccctggcgctcgagcagctcaaacaacagggccgagatcctgcaattgagcgcccccttaccggccaattgggccttcttaagggcattgaaggcggtggcgtcgtccttgaactccaccgccaccagatcgctctggtcggtctggaagacccgtttggccttgccctcatggagcaggggcccgaggctgtagctggtcatagttggcggatcaaggatgggggacggggctgggggggtcggngaagcaggtatccctgacgggccagggccgttcaaggccgggaagcggcatggccgccgctctggcggggggagcgcaactgctgttccaggtgctgctggcgggccagccccagggaatcctgccgccctaaagcctggcgtcccacctgccattcaccgtaggcatcgtcaatgcgccggctgaggcggaggaagcgctcactgggccgctcagcgttggcgccggcgacgagcaacagggcccgttgatcgcgcagtagctccgccgccagcccccaggccccggcggcggcggcctggtctagggcggtttcgattagctggttgcgctcctgcaaaggcaggcccaccaataaggccgctgcccgctgcaaccgctcggcgccgttctggccctcctggcgagccgccaggagggccgccgccgcctgtaggtcctcacccagcaccaccaggtggtcggcgagcacatcgagggcgggccggctgacccggctgccatcacggcgcaccagcagggtgatgagctggccatcaaggctggctaggcggccgccggccaggcgcagcagggcctcagccgccaggcggtggtgcagccccgcatcggcagcccgccattgcgcccataaccagagggcgcgctcgcggccgggggccgggccgtagcggttgagcacattgagggcgtcgtcgggggcgcggcagttcaccagggcctcggcattggccaacaccactgccaggggctggggtgccggcttgaccgccagcaggcgcagccgcaaggcccgcagggacgggccctggtcgtcccgggcggcctggaggcaggccctattcaggagggccaggtcgctgctggccaggaccctgacgagggctagctctggcgatgcccctggtggcagttgggcagcagtcggtggggggggaacctgggcagccgccgactggggcaccgccaaacccaccagtagggccggcaacagcagggcccgccccaggcaacccagcgacgngtctcggcgcaccggcgagtaaagaggatggggcacggcgaagcctccacgcggcgtcaacctaggngaggccgccctcgcccccatcccttgatccggctgccatgtccgacccggcgaccttgctaagccctgagcgggtgctcgtggtggggggcggtggccgcgaaaattccctcgcctgggccctggcncgcagccaaggtgtggccgcagtgtgggtggccccgggcaatggcggcacggctgacatcgccggctgtcagcagctggcgatcgccgaaaccgacnccgcaggcctgctggcggcctgcaagacccacgccatcgacctcgtggtggtgggcccggaggcgcccctagcggcgggcctgggggaccacctgcgggccgccggtatggcggtgtttggccctggagccgacggggcccagctngaagccagcaagcaatgggccaaggccctgatggtggaggccgccatccccacngccggctactggccggccgatagccgggagcaggccttggccatccttgaagggcagaaccgaccgctggtggtgaaggccgatggcctggcggctggcaagggggtgacggtggcngacagcctggcggagtccngggccgcgattgaggagatttttgcggggcgttttggcggcgctggcgccagcctggtgctggaggagcgcaccgaagggcccgaggtgtcggtctttgccctctgcgacggcgagcggttggtggtgctcccccccgcccaggaccacaaacgcatcggcgaaggcgacaccgggcccaacaccggcggcatgggggcctangccccagcccctttgctcgatagcgccgccctcgaggccgtgcgccaacgggtgctggagcccaccctggcggccctgaaggcncgcggtatcgactatcggggggtgatttacgccggcctgatgctcacctccacggggatcagcgtgatcga

SEQ ID NO: 734 - DNA, 4000 bp, Escherichia coli
  misc_feature (1)..(1): n is a, c, g, or t
  misc_feature (3)..(5): n is a, c, g, or t
  misc_feature (7)..(10): n is a, c, g, or t
  misc_feature (12)..(12): n is a, c, g, or t
  misc_feature (14)..(15): n is a, c, g, or t
  misc_feature (18)..(19): n is a, c, g, or t
  misc_feature (21)..(22): n is a, c, g, or t
  misc_feature (24)..(25): n is a, c, g, or t
  misc_feature (27)..(28): n is a, c, g, or t
  misc_feature (30)..(30): n is a, c, g, or t
  misc_feature (32)..(33): n is a, c, g, or t
  misc_feature (36)..(46): n is a, c, g, or t
  misc_feature (49)..(49): n is a, c, g, or t
  misc_feature (51)..(52): n is a, c, g, or t
  misc_feature (54)..(54): n is a, c, g, or t
  misc_feature (57)..(59): n is a, c, g, or t
  misc_feature (61)..(66): n is a, c, g, or t
  misc_feature (68)..(71): n is a, c, g, or t
  misc_feature (73)..(75): n is a, c, g, or t
  misc_feature (78)..(81): n is a, c, g, or t
  misc_feature (83)..(86): n is a, c, g, or t
  misc_feature (88)..(88): n is a, c, g, or t
  misc_feature (90)..(99): n is a, c, g, or t
  misc_feature (102)..(102): n is a, c, g, or t
  misc_feature (104)..(106): n is a, c, g, or t
  misc_feature (108)..(108): n is a, c, g, or t
  misc_feature (110)..(112): n is a, c, g, or t
  misc_feature (115)..(115): n is a, c, g, or t
  misc_feature (117)..(117): n is a, c, g, or t
  misc_feature (119)..(121): n is a, c, g, or t
  misc_feature (123)..(128): n is a, c, g, or t
  misc_feature (130)..(130): n is a, c, g, or t
  misc_feature (132)..(132): n is a, c, g, or t
  misc_feature (134)..(134): n is a, c, g, or t
  misc_feature (136)..(136): n is a, c, g, or t
  misc_feature (138)..(138): n is a, c, g, or t
  misc_feature (140)..(145): n is a, c, g, or t
  misc_feature (147)..(151): n is a, c, g, or t
  misc_feature (153)..(156): n is a, c, g, or t
  misc_feature (158)..(160): n is a, c, g, or t
  misc_feature (164)..(171): n is a, c, g, or t
  misc_feature (173)..(179): n is a, c, g, or t
  misc_feature (181)..(182): n is a, c, g, or t
  misc_feature (184)..(184): n is a, c, g, or t
  misc_feature (186)..(186): n is a, c, g, or t
  misc_feature (188)..(189): n is a, c, g, or t
  misc_feature (191)..(192): n is a, c, g, or t
  misc_feature (194)..(195): n is a, c, g, or t
  misc_feature (197)..(204): n is a, c, g, or t
  misc_feature (207)..(207): n is a, c, g, or t
  misc_feature (209)..(209): n is a, c, g, or t
  misc_feature (211)..(212): n is a, c, g, or t
  misc_feature (215)..(226): n is a, c, g, or t
  misc_feature (230)..(233): n is a, c, g, or t
  misc_feature (235)..(240): n is a, c, g, or t
  misc_feature (242)..(246): n is a, c, g, or t
  misc_feature (248)..(251): n is a, c, g, or t
  misc_feature (253)..(257): n is a, c, g, or t
  misc_feature (259)..(260): n is a, c, g, or t
  misc_feature (262)..(262): n is a, c, g, or t
  misc_feature (268)..(268): n is a, c, g, or t
  misc_feature (270)..(271): n is a, c, g, or t
  misc_feature (273)..(276): n is a, c, g, or t
  misc_feature (278)..(279): n is a, c, g, or t
  misc_feature (281)..(281): n is a, c, g, or t
  misc_feature (283)..(284): n is a, c, g, or t
  misc_feature (286)..(287): n is a, c, g, or t
  misc_feature (289)..(289): n is a, c, g, or t
  misc_feature (292)..(301): n is a, c, g, or t
  misc_feature (303)..(307): n is a, c, g, or t
  misc_feature (309)..(309): n is a, c, g, or t
  misc_feature (311)..(312): n is a, c, g, or t
  misc_feature (317)..(324): n is a, c, g, or t
  misc_feature (327)..(330): n is a, c, g, or t
  misc_feature (332)..(332): n is a, c, g, or t
  misc_feature (335)..(336): n is a, c, g, or t
  misc_feature (339)..(346): n is a, c, g, or t
  misc_feature (349)..(349): n is a, c, g, or t
  misc_feature (352)..(352): n is a, c, g, or t
  misc_feature (355)..(355): n is a, c, g, or t
  misc_feature (357)..(359): n is a, c, g, or t
  misc_feature (361)..(371): n is a, c, g, or t
  misc_feature (374)..(381): n is a, c, g, or t
  misc_feature (383)..(383): n is a, c, g, or t
  misc_feature (386)..(390): n is a, c, g, or t
  misc_feature (392)..(392): n is a, c, g, or t
  misc_feature (394)..(394): n is a, c, g, or t
  misc_feature (396)..(396): n is a, c, g, or t
  misc_feature (398)..(400): n is a, c, g, or t
  misc_feature (402)..(402): n is a, c, g, or t
  misc_feature (404)..(408): n is a, c, g, or t
  misc_feature (410)..(410): n is a, c, g, or t
  misc_feature (413)..(416): n is a, c, g, or t
  misc_feature (418)..(422): n is a, c, g, or t
  misc_feature (424)..(427): n is a, c, g, or t
  misc_feature (429)..(430): n is a, c, g, or t
  misc_feature (432)..(435): n is a, c, g, or t
  misc_feature (437)..(438): n is a, c, g, or t
  misc_feature (441)..(445): n is a, c, g, or t
  misc_feature (447)..(448): n is a, c, g, or t
  misc_feature (450)..(450): n is a, c, g, or t
  misc_feature (456)..(456): n is a, c, g, or t
  misc_feature (459)..(460): n is a, c, g, or t
  misc_feature (463)..(465): n is a, c, g, or t
  misc_feature (467)..(468): n is a, c, g, or t
  misc_feature (472)..(472): n is a, c, g, or t
  misc_feature (474)..(475): n is a, c, g, or t
  misc_feature (477)..(477): n is a, c, g, or t
  misc_feature (479)..(480): n is a, c, g, or t
  misc_feature (482)..(482): n is a, c, g, or t
  misc_feature (486)..(486): n is a, c, g, or t
  misc_feature (488)..(493): n is a, c, g, or t
  misc_feature (495)..(496): n is a, c, g, or t
  misc_feature (498)..(499): n is a, c, g, or t
  misc_feature (504)..(504): n is a, c, g, or t
  misc_feature (506)..(506): n is a, c, g, or t
  misc_feature (510)..(510): n is a, c, g, or t
  misc_feature (515)..(517): n is a, c, g, or t
  misc_feature (519)..(521): n is a, c, g, or t
  misc_feature (523)..(524): n is a, c, g, or t
  misc_feature (527)..(531): n is a, c, g, or t
  misc_feature (533)..(534): n is a, c, g, or t
  misc_feature (536)..(537): n is a, c, g, or t
  misc_feature (539)..(539): n is a, c, g, or t
  misc_feature (541)..(541): n is a, c, g, or t
  misc_feature (543)..(544): n is a, c, g, or t
  misc_feature (546)..(559): n is a, c, g, or t
  misc_feature (561)..(564): n is a, c, g, or t
  misc_feature (566)..(572): n is a, c, g, or t
  misc_feature (574)..(577): n is a, c, g, or t
  misc_feature (579)..(589): n is a, c, g, or t
  misc_feature (591)..(591): n is a, c, g, or t
  misc_feature (593)..(594): n is a, c, g, or t
  misc_feature (596)..(596): n is a, c, g, or t
  misc_feature (599)..(599): n is a, c, g, or t
  misc_feature (601)..(602): n is a, c, g, or t
  misc_feature (608)..(612): n is a, c, g, or t
  misc_feature (614)..(622): n is a, c, g, or t
  misc_feature (624)..(627): n is a, c, g, or t
  misc_feature (629)..(630): n is a, c, g, or t
  misc_feature (632)..(640): n is a, c, g, or t
  misc_feature (642)..(642): n is a, c, g, or t
  misc_feature (644)..(645): n is a, c, g, or t
  misc_feature (647)..(647): n is a, c, g, or t
  misc_feature (649)..(654): n is a, c, g, or t
  misc_feature (656)..(658): n is a, c, g, or t
  misc_feature (663)..(665): n is a, c, g, or t
  misc_feature (667)..(668): n is a, c, g, or t
  misc_feature (670)..(675): n is a, c, g, or t
  misc_feature (677)..(678): n is a, c, g, or t
  misc_feature (681)..(681): n is a, c, g, or t
  misc_feature (686)..(688): n is a, c, g, or t
  misc_feature (692)..(692): n is a, c, g, or t
  misc_feature (694)..(695): n is a, c, g, or t
  misc_feature (697)..(697): n is a, c, g, or t
  misc_feature (699)..(699): n is a, c, g, or t
  misc_feature (702)..(706): n is a, c, g, or t
  misc_feature (708)..(709): n is a, c, g, or t
  misc_feature (712)..(715): n is a, c, g, or t
  misc_feature (717)..(718): n is a, c, g, or t
  misc_feature (720)..(723): n is a, c, g, or t
  misc_feature (726)..(727): n is a, c, g, or t
  misc_feature (729)..(732): n is a, c, g, or t
  misc_feature (734)..(736): n is a, c, g, or t
  misc_feature (738)..(739): n is a, c, g, or t
  misc_feature (741)..(742): n is a, c, g, or t
  misc_feature (745)..(750): n is a, c, g, or t
  misc_feature (752)..(757): n is a, c, g, or t
  misc_feature (759)..(762): n is a, c, g, or t
  misc_feature (764)..(774): n is a, c, g, or t
  misc_feature (776)..(778): n is a, c, g, or t
  misc_feature (780)..(780): n is a, c, g, or t
  misc_feature (782)..(782): n is a, c, g, or t
  misc_feature (785)..(785): n is a, c, g, or t
  misc_feature (787)..(792): n is a, c, g, or t
  misc_feature (794)..(795): n is a, c, g, or t
  misc_feature (797)..(797): n is a, c, g, or t
  misc_feature (801)..(801): n is a, c, g, or t
  misc_feature (804)..(804): n is a, c, g, or t
  misc_feature (806)..(809): n is a, c, g, or t
  misc_feature (815)..(817): n is a, c, g, or t
  misc_feature (821)..(821): n is a, c, g, or t
  misc_feature (823)..(825): n is a, c, g, or t
  misc_feature (827)..(827): n is a, c, g, or t
  misc_feature (830)..(833): n is a, c, g, or t
  misc_feature (835)..(837): n is a, c, g, or t
  misc_feature (840)..(841): n is a, c, g, or t
  misc_feature (843)..(844): n is a, c, g, or t
  misc_feature (846)..(846): n is a, c, g, or t
  misc_feature (896)..(896): n is a, c, g, or t
  misc_feature (953)..(953): n is a, c, g, or t
  misc_feature (955)..(955): n is a, c, g, or t
  misc_feature (962)..(962): n is a, c, g, or t
  misc_feature (971)..(971): n is a, c, g, or t
  misc_feature (998)..(998): n is a, c, g, or t
  misc_feature (1064)..(1064): n is a, c, g, or t
  misc_feature (1068)..(1068): n is a, c, g, or t
  misc_feature (1120)..(1120): n is a, c, g, or t
  misc_feature (1490)..(1490): n is a, c, g, or t
  misc_feature (1761)..(1761): n is a, c, g, or t
  misc_feature (1836)..(1836): n is a, c, g, or t
  misc_feature (1848)..(1848): n is a, c, g, or t
  misc_feature (1882)..(1882): n is a, c, g, or t
  misc_feature (1985)..(1985): n is a, c, g, or t
  misc_feature (2205)..(2205): n is a, c, g, or t
  misc_feature (2998)..(2998): n is a, c, g, or t
  misc_feature (3791)..(3791): n is a, c, g, or t
  misc_feature (3972)..(3972): n is a, c, g, or t
ngnnngnnnntncnnccnntnnanncnncncnncannnnnnnnnnnaanannancannntnnnnnncnnnncnnnccnnnntnnnngntnnnnnnnnnnttntnnngngnnnccntncnnnannnnnnanancncntncnnnnnncnnnnncnnnnannncctnnnnnnnnannnnnnnannanancnncnncnncnnnnnnnnggngnannaannnnnnnnnnnnctcnnnngnnnnnncnnnnngnnnngnnnnntnntnctgctncnncnnnngnnancnncnnangannnnnnnnnnannnnntncnnccgcnnnnnnnnccnnnntnatnnttnnnnnnnnaanacnacngnnntnnnnnnnnnnnccnnnnnnnncntcnnnnngntnantnnncncnnnnnanaannnntnnnnnannnnannannnngnncannnnncnncncaacancannaannncnncttntnncncnncngcancnnnnnnannannagcancnaccncatcnnngnnntnntgnnnnntnntnntncnannannnnnnnnnnnnnnannnntnnnnnnngnnnnannnnnnnnnnncncnncnccntnngggggnnnnncnnnnnnnnncnnnncnncnnnnnnnnntngnngngnnnnnntnnngccannntnntnnnnnncnnctnctacnnntctncnncnancgnnnnntnnttnnnnanngnnnnaannannnncnnnannannacnnnnnncnnnnnngnnnncnnnnnnnnnnncnnnantnatnannnnnncnncncctnctncnnnncgtcgnnnatantnnncnacnnnntnnncannannantattattaggtgaaaagttacgggtcataggtgccattacaattctattntctagagtcaaacttcctagtttaaatggctgaaatagggaattttctgaagtcatnantaatcanatctctgtngtatttaattaacagtcaagtattacncataataaggtgactaaccctattatttattgaccgaccagtctctttcttagaaattcataattnctanggttttaagccataacatagatggttgccatcgccccaatcagcgccgccgncatggccaccagcactcttggcgaacccatgagcaaattagctgtagctgggaaagcaaaagtctttgtcaacgaggcaagtttgtcagcatgatggtcactaccaaaggtctccaaaagagtctctgcacaatcgcggcgactgcggtaacgaacgatacctgtggaagaccagttatcagcgtcatcgcagttaaggttttcgatgtttttagcagcggcgatggctacgaagaatggatggcctgctcgtctgaacattcctgccataaatgttttggtatatctttgaagtaacttggacgattccctttttggggatttaagctccagcaaattaatcataaaccattctcgcccatcatctttntccaaaaaatgctgcagattagccagattatccgcatttactcctctggactcaaattgctgcatgtagtaatccacctcagtctgagttagcttacctttaaatccagaataccaaagccaaaacaccgcataaagcccacccatcactatccaaattagcgtaatatccaaactagaatcctcttttcaattaattgagcacagttgttaatctatcaaatagcaagtcagcccctttgcggcatcccacgaaccattgtcagaaactncatcttagtcccagctcttcgatgctcactgagtgcttgataatcctcatcggtccaccagtcttttgctgcctnttcagatggganactaaaaattatcatgcgccctgatctcggagangtgccttccatagcagtgggattgtcgtcaaacgtaacaaactggcccccataacgttttaatagcggaaagaatcctttctcgtacttccgatactcctctnaatcagttacttttagattcactaccatgtataccggcacatcaggcatctaaataccctcgcttagttttgctcttaaattgtttttagccattctgccacagctattccgatttccactggggaatcctcctgaataaaatgtgtgcccgcaactgtcacttctttttgattgggccatgtgcgacaaaattttcgcgctttgcccgttaaaattganccggggtctgcattaataaaaagcttgggcaattcctggttagttgccatccattcaccataactggctactaaatcaaccatgtgaggcggctctccatcgattggaatttggcgaggccagtttaatgttggctgccgatcagctaccctggtaaacgccttacggtattgattcatctcctcctcgcccatctgccgtatcactgaacttggtagtacagcttcaacgaacatattgcgctgcaagaccaagtcttcgcctttatctgaacggaagcccttaaaaataccacgcgccgactcaggccagtcatcccaagtcaccgggcagactatggcttccatataggcaatacccttgacggcctcagggtgatgcttggcccagtgaaacccaagagcactcccccagtcgtgaattaccaaggtcacatcttcggtaatattgagttcctcaagtaatccagccaagtactcataggtaatctcaaatgagtagcgctcaggtccctcgctatcaggaagcttctcggagtcgccatggccaattaagtctggaactatcactcgtccgataccctcaagatgaggaacgacattcctccataaataagaagaagttggattgccgtgcagcaggacaataggcgcgccgtcaccgacatcgatataagcaatatttttgcccttgatgcttttaaaacacttgccatagggcattgacgctgaaatcattggcttccctttgcactaataaagaattaattatcttgttaattcaaaatacaggnccataatactatatttacattatggcatggtcaatgccataattaaattttgctacttgcatgtattacgcagttgatgtgatcgagttactgaactttccaagcgagaaaaaatagagggtgcgcaatgaaaatattctacagtgtcgtgcttattacctacctgggatggtttacatggtacggaggctctggcaaacctatatccccaaatgaagcagtggcttacaaagcagaattacaagctaacgccaagaaccgagatcgagatttttctggccctattaaatacatggatcgattaattaaagatgatgatggcaatgagttcatcatggtcaatctcattcgctatagagaaaaagcccagtatccggctacatctctatgggccaatgaaactgaccctatgttagcagataacagatatggtgctggtgtagtgccactgctcctgaagagaggaagtttgccaatttttatctcgacagtagctggagagtttattaacgagactagtctagaagaatgggacaccgtcgcaatggtacgttatcgaagtgttcgtgacatggtcgagatgatgatagagatgagcaccacagatcttgctgaccataaatgggctgctattgaacaaacacatgtatttccggtaaaacctgaaataaacctcgcatcacttagattaatagttggaatatgcctacttttttttgctgtggcggtctcctaccttgtaaagttgttaagatcaaaaaattaaaatgtcgatctgccagtaaatttcaanactaaaatgaaaaggacaaatcatgaaaactagaattaccgaaatgctcgggatagaacatccaatcatacaaggcggaatgcaccatgtgggtctggcggagttagccgctgctgtttctaacgctggtggcttgggtattattactgggcttactcagggaacaccggaaaaactggcnaatgagatcgctagatgccgagaaatga

SEQ ID NO: 735 - DNA, 4000 bp, Escherichia coli
  misc_feature (3)..(5): n is a, c, g, or t
  misc_feature (7)..(7): n is a, c, g, or t
  misc_feature (10)..(11): n is a, c, g, or t
  misc_feature (13)..(13): n is a, c, g, or t
  misc_feature (17)..(17): n is a, c, g, or t
  misc_feature (19)..(19): n is a, c, g, or t
  misc_feature (21)..(21): n is a, c, g, or t
  misc_feature (23)..(26): n is a, c, g, or t
  misc_feature (28)..(28): n is a, c, g, or t
  misc_feature (38)..(38): n is a, c, g, or t
  misc_feature (40)..(41): n is a, c, g, or t
  misc_feature (43)..(43): n is a, c, g, or t
  misc_feature (46)..(46): n is a, c, g, or t
  misc_feature (48)..(50): n is a, c, g, or t
  misc_feature (52)..(52): n is a, c, g, or t
  misc_feature (57)..(59): n is a, c, g, or t
  misc_feature (61)..(61): n is a, c, g, or t
  misc_feature (66)..(66): n is a, c, g, or t
  misc_feature (69)..(69): n is a, c, g, or t
  misc_feature (71)..(71): n is a, c, g, or t
  misc_feature (76)..(76): n is a, c, g, or t
  misc_feature (78)..(78): n is a, c, g, or t
  misc_feature (80)..(81): n is a, c, g, or t
  misc_feature (88)..(88): n is a, c, g, or t
  misc_feature (90)..(91): n is a, c, g, or t
  misc_feature (94)..(94): n is a, c, g, or t
  misc_feature (96)..(97): n is a, c, g, or t
  misc_feature (101)..(101): n is a, c, g, or t
  misc_feature (106)..(106): n is a, c, g, or t
  misc_feature (109)..(109): n is a, c, g, or t
  misc_feature (116)..(116): n is a, c, g, or t
  misc_feature (119)..(119): n is a, c, g, or t
  misc_feature (130)..(130): n is a, c, g, or t
  misc_feature (132)..(134): n is a, c, g, or t
  misc_feature (137)..(137): n is a, c, g, or t
  misc_feature (139)..(140): n is a, c, g, or t
  misc_feature (143)..(143): n is a, c, g, or t
  misc_feature (146)..(146): n is a, c, g, or t
  misc_feature (151)..(159): n is a, c, g, or t
  misc_feature (163)..(167): n is a, c, g, or t
  misc_feature (169)..(170): n is a, c, g, or t
  misc_feature (172)..(177): n is a, c, g, or t
  misc_feature (179)..(179): n is a, c, g, or t
  misc_feature (181)..(184): n is a, c, g, or t
  misc_feature (186)..(194): n is a, c, g, or t
  misc_feature (196)..(198): n is a, c, g, or t
  misc_feature (200)..(201): n is a, c, g, or t
  misc_feature (203)..(203): n is a, c, g, or t
  misc_feature (205)..(208): n is a, c, g, or t
  misc_feature (211)..(217): n is a, c, g, or t
  misc_feature (219)..(221): n is a, c, g, or t
  misc_feature (223)..(223): n is a, c, g, or t
  misc_feature (225)..(226): n is a, c, g, or t
  misc_feature (228)..(239): n is a, c, g, or t
  misc_feature (241)..(241): n is a, c, g, or t
  misc_feature (243)..(249): n is a, c, g, or t
  misc_feature (251)..(274): n is a, c, g, or t
  misc_feature (276)..(285): n is a, c, g, or t
  misc_feature (287)..(316): n is a, c, g, or t
  misc_feature (318)..(329): n is a, c, g, or t
  misc_feature (332)..(351): n is a, c, g, or t
  misc_feature (353)..(364): n is a, c, g, or t
  misc_feature (367)..(376): n is a, c, g, or t
  misc_feature (379)..(389): n is a, c, g, or t
  misc_feature (391)..(395): n is a, c, g, or t
  misc_feature (397)..(398): n is a, c, g, or t
  misc_feature (400)..(440): n is a, c, g, or t
  misc_feature (442)..(465): n is a, c, g, or t
  misc_feature (467)..(481): n is a, c, g, or t
  misc_feature (483)..(487): n is a, c, g, or t
  misc_feature (489)..(497): n is a, c, g, or t
  misc_feature (499)..(499): n is a, c, g, or t
  misc_feature (502)..(504): n is a, c, g, or t
  misc_feature (506)..(508): n is a, c, g, or t
  misc_feature (511)..(511): n is a, c, g, or t
  misc_feature (514)..(514): n is a, c, g, or t
  misc_feature (516)..(523): n is a, c, g, or t
  misc_feature (526)..(527): n is a, c, g, or t
  misc_feature (530)..(530): n is a, c, g, or t
  misc_feature (532)..(535): n is a, c, g, or t
  misc_feature (537)..(544): n is a, c, g, or t
  misc_feature (546)..(552): n is a, c, g, or t
  misc_feature (554)..(554): n is a, c, g, or t
  misc_feature (556)..(556): n is a, c, g, or t
  misc_feature (558)..(560): n is a, c, g, or t
  misc_feature (562)..(562): n is a, c, g, or t
  misc_feature (564)..(565): n is a, c, g, or t
  misc_feature (567)..(567): n is a, c, g, or t
  misc_feature (570)..(570): n is a, c, g, or t
  misc_feature (573)..(575): n is a, c, g, or t
  misc_feature (577)..(580): n is a, c, g, or t
  misc_feature (582)..(583): n is a, c, g, or t
  misc_feature (585)..(588): n is a, c, g, or t
  misc_feature (590)..(595): n is a, c, g, or t
  misc_feature (598)..(598): n is a, c, g, or t
  misc_feature (601)..(604): n is a, c, g, or t
  misc_feature (607)..(607): n is a, c, g, or t
  misc_feature (609)..(615): n is a, c, g, or t
  misc_feature (617)..(618): n is a, c, g, or t
  misc_feature (621)..(622): n is a, c, g, or t
  misc_feature (624)..(626): n is a, c, g, or t
  misc_feature (628)..(629): n is a, c, g, or t
  misc_feature (632)..(636): n is a, c, g, or t
  misc_feature (638)..(638): n is a, c, g, or t
  misc_feature (640)..(647): n is a, c, g, or t
  misc_feature (650)..(650): n is a, c, g, or t
  misc_feature (654)..(655): n is a, c, g, or t
  misc_feature (657)..(657): n is a, c, g, or t
  misc_feature (659)..(665): n is a, c, g, or t
  misc_feature (667)..(668): n is a, c, g, or t
  misc_feature (670)..(670): n is a, c, g, or t
  misc_feature (672)..(675): n is a, c, g, or t
  misc_feature (677)..(677): n is a, c, g, or t
  misc_feature (679)..(683): n is a, c, g, or t
  misc_feature (685)..(687): n is a, c, g, or t
  misc_feature (689)..(690): n is a, c, g, or t
  misc_feature (692)..(694): n is a, c, g, or t
  misc_feature (697)..(705): n is a, c, g, or t
  misc_feature (710)..(713): n is a, c, g, or t
  misc_feature (717)..(718): n is a, c, g, or t
  misc_feature (725)..(725): n is a, c, g, or t
  misc_feature (728)..(728): n is a, c, g, or t
  misc_feature (732)..(732): n is a, c, g, or t
  misc_feature (734)..(739): n is a, c, g, or t
  misc_feature (741)..(742): n is a, c, g, or t
  misc_feature (744)..(745): n is a, c, g, or t
  misc_feature (747)..(747): n is a, c, g, or t
  misc_feature (750)..(760): n is a, c, g, or t
  misc_feature (764)..(770): n is a, c, g, or t
  misc_feature (772)..(773): n is a, c, g, or t
  misc_feature (775)..(778): n is a, c, g, or t
  misc_feature (780)..(784): n is a, c, g, or t
  misc_feature (788)..(789): n is a, c, g, or t
  misc_feature (791)..(794): n is a, c, g, or t
  misc_feature (798)..(800): n is a, c, g, or t
  misc_feature (802)..(802): n is a, c, g, or t
  misc_feature (804)..(806): n is a, c, g, or t
  misc_feature (808)..(808): n is a, c, g, or t
  misc_feature (811)..(813): n is a, c, g, or t
  misc_feature (815)..(822): n is a, c, g, or t
  misc_feature (824)..(825): n is a, c, g, or t
  misc_feature (827)..(827): n is a, c, g, or t
  misc_feature (830)..(832): n is a, c, g, or t
  misc_feature (834)..(837): n is a, c, g, or t
  misc_feature (839)..(839): n is a, c, g, or t
  misc_feature (842)..(844): n is a, c, g, or t
  misc_feature (846)..(847): n is a, c, g, or t
  misc_feature (850)..(855): n is a, c, g, or t
  misc_feature (859)..(860): n is a, c, g, or t
  misc_feature (862)..(869): n is a, c, g, or t
  misc_feature (871)..(877): n is a, c, g, or t
  misc_feature (879)..(879): n is a, c, g, or t
  misc_feature (881)..(891): n is a, c, g, or t
  misc_feature (894)..(897): n is a, c, g, or t
  misc_feature (900)..(900): n is a, c, g, or t
  misc_feature (902)..(902): n is a, c, g, or t
  misc_feature (904)..(905): n is a, c, g, or t
  misc_feature (909)..(909): n is a, c, g, or t
  misc_feature (914)..(914): n is a, c, g, or t
  misc_feature (920)..(921): n is a, c, g, or t
  misc_feature (923)..(924): n is a, c, g, or t
  misc_feature (926)..(926): n is a, c, g, or t
  misc_feature (931)..(931): n is a, c, g, or t
  misc_feature (933)..(936): n is a, c, g, or t
  misc_feature (938)..(940): n is a, c, g, or t
  misc_feature (942)..(945): n is a, c, g, or t
  misc_feature (947)..(947): n is a, c, g, or t
  misc_feature (949)..(950): n is a, c, g, or t
  misc_feature (952)..(954): n is a, c, g, or t
  misc_feature (959)..(959): n is a, c, g, or t
  misc_feature (961)..(961): n is a, c, g, or t
  misc_feature (998)..(999): n is a, c, g, or t
  misc_feature (1001)..(1001): n is a, c, g, or t
  misc_feature (1003)..(1006): n is a, c, g, or t
  misc_feature (1008)..(1009): n is a, c, g, or t
  misc_feature (1011)..(1015): n is a, c, g, or t
  misc_feature (1017)..(1017): n is a, c, g, or t
  misc_feature (1020)..(1020): n is a, c, g, or t
  misc_feature (1024)..(1024): n is a, c, g, or t
  misc_feature (1026)..(1027): n is a, c, g, or t
  misc_feature (1065)..(1072): n is a, c, g, or t
  misc_feature (1076)..(1083): n is a, c, g, or t
  misc_feature (1085)..(1086): n is a, c, g, or t
  misc_feature (1088)..(1089): n is a, c, g, or t
  misc_feature (1091)..(1093): n is a, c, g, or t
  misc_feature (1131)..(1136): n is a, c, g, or t
  misc_feature (1138)..(1138): n is a, c, g, or t
  misc_feature (1140)..(1142): n is a, c, g, or t
  misc_feature (1146)..(1146): n is a, c, g, or t
  misc_feature (1148)..(1149): n is a, c, g, or t
  misc_feature (1151)..(1155): n is a, c, g, or t
  misc_feature (1157)..(1159): n is a, c, g, or t
  misc_feature (1196)..(1198): n is a, c, g, or t
  misc_feature (1201)..(1201): n is a, c, g, or t
  misc_feature (1204)..(1204): n is a, c, g, or t
  misc_feature (1206)..(1206): n is a, c, g, or t
  misc_feature (1208)..(1209): n is a, c, g, or t
  misc_feature (1211)..(1211): n is a, c, g, or t
  misc_feature (1213)..(1213): n is a, c, g, or t
  misc_feature (1215)..(1221): n is a, c, g, or t
  misc_feature (1223)..(1225): n is a, c, g, or t
  misc_feature (1253)..(1255): n is a, c, g, or t
  misc_feature (1262)..(1271): n is a, c, g, or t
  misc_feature (1273)..(1274): n is a, c, g, or t
  misc_feature (1277)..(1284): n is a, c, g, or t
  misc_feature (1286)..(1291): n is a, c, g, or t
  misc_feature (1328)..(1329): n is a, c, g, or t
  misc_feature (1331)..(1337): n is a, c, g, or t
  misc_feature (1339)..(1352): n is a, c, g, or t
  misc_feature (1354)..(1357): n is a, c, g, or t
  misc_feature (1394)..(1394): n is a, c, g, or t
  misc_feature (1396)..(1397): n is a, c, g, or t
  misc_feature (1399)..(1403): n is a, c, g, or t
  misc_feature (1405)..(1410): n is a, c, g, or t
  misc_feature (1412)..(1415): n is a, c, g, or t
  misc_feature (1417)..(1423): n is a, c, g, or t
  misc_feature (1460)..(1467): n is a, c, g, or t
  misc_feature (1470)..(1471): n is a, c, g, or t
  misc_feature (1473)..(1474): n is a, c, g, or t
  misc_feature (1476)..(1484): n is a, c, g, or t
  misc_feature (1486)..(1489): n is a, c, g, or t
  misc_feature (1526)..(1527): n is a, c, g, or t
  misc_feature (1529)..(1538): n is a, c, g, or t
  misc_feature (1540)..(1545): n is a, c, g, or t
  misc_feature (1547)..(1554): n is a, c, g, or t
  misc_feature (1592)..(1602): n is a, c, g, or t
  misc_feature (1604)..(1616): n is a, c, g, or t
  misc_feature (1618)..(1619): n is a, c, g, or t
  misc_feature (1621)..(1621): n is a, c, g, or t
  misc_feature (1658)..(1673): n is a, c, g, or t
  misc_feature (1675)..(1679): n is a, c, g, or t
  misc_feature (1681)..(1687): n is a, c, g, or t
  misc_feature (1724)..(1741): n is a, c, g, or t
  misc_feature (1743)..(1746): n is a, c, g, or t
  misc_feature (1748)..(1753): n is a, c, g, or t
  misc_feature (1790)..(1796): n is a, c, g, or t
  misc_feature (1798)..(1799): n is a, c, g, or t
  misc_feature (1801)..(1805): n is a, c, g, or t
  misc_feature (1807)..(1814): n is a, c, g, or t
  misc_feature (1817)..(1819): n is a, c, g, or t
  misc_feature (1856)..(1857): n is a, c, g, or t
  misc_feature (1859)..(1861): n is a, c, g, or t
  misc_feature (1863)..(1864): n is a, c, g, or t
  misc_feature (1867)..(1867): n is a, c, g, or t
  misc_feature (1869)..(1873): n is a, c, g, or t
  misc_feature (1875)..(1876): n is a, c, g, or t
  misc_feature (1878)..(1881): n is a, c, g, or t
  misc_feature (1922)..(1925): n is a, c, g, or t
  misc_feature (1927)..(1930): n is a, c, g, or t
  misc_feature (1932)..(1944): n is a, c, g, or t
  misc_feature (1946)..(1948): n is a, c, g, or t
  misc_feature (1950)..(1951): n is a, c, g, or t
  misc_feature (1988)..(1989): n is a, c, g, or t
  misc_feature (1991)..(1996): n is a, c, g, or t
  misc_feature (1998)..(1998): n is a, c, g, or t
  misc_feature (2000)..(2003): n is a, c, g, or t
  misc_feature (2005)..(2007): n is a, c, g, or t
  misc_feature (2009)..(2013): n is a, c, g, or t
  misc_feature (2015)..(2017): n is a, c, g, or t
agnnnanatnnangatntntncnnnnanaacaaatctncnncnatntnnntngtacnnnantaaanagnanaaganananncctcgcnannatncnnatgntttanaanataccanaanagatggatganannntgncnntcnaanatgannnnnnnnnccannnnntnntnnnnnncntnnnnannnnnnnnntnnngnnanannnnaannnnnnntnnncnannannnnnnnnnnnncnannnnnnnannnnnnnnnnnnnnnnnnnnnnnnannnnnnnnnntnnnnnnnnnnnnnnnnnnnnnnnnnnnnnnannnnnnnnnnnnagnnnnnnnnnnnnnnnnnnnnannnnnnnnnnnnatnnnnnnnnnngtnnnnnnnnnnntnnnnntnnannnnnnnnnnnnnnnnnnnnnnnnnnnnnnnnnnnnnnnnncnnnnnnnnnnnnnnnnnnnnnnnnannnnnnnnnnnnnnntnnnnnannnnnnnnnanatnnnannnctnaanannnnnnnnatnnagnannnntnnnnnnnntnnnnnnngncnannnananntnctntannntnnnntnnannnnannnnnncanaannnnaanannnnnnntnnatnnannnanntgnnnnntncnnnnnnnnaantctnnanannnnnnnanncnannnntnannnnntnnncnncnnnctnnnnnnnnnggttnnnnaaannttgagantanaaanannnnnnannanntnaannnnnnnnnnntacnnnnnnncnntnnnnannnnnttgnnannnnaaannnanannncnaannnannnnnnnngnnanatnnntnnnnanttnnnannatnnnnnnggtnnannnnnnnntnnnnnnncntnnnnnnnnnnnaannnntgntnanntaantaaanctttanngnncnaaaantnnnntnnnannnntnanntnnnagtantngttgtacagttacttaaatcttgagagtacaaaaacnntncnnnnanncnnnnncntgntgtnanngttgtacagttacttaaatcttgagagtacaaaaaccnnnnnnnntttnnnnnnnnannanngnnngttgtacagttacttaaatcttgagagtacaaaaaccnnnnnntntnnntagntnnannnnnannngttgtacagttacttaaatcttgagagtacaaaaacnnnatnatntntnntntngnnnnnnnannngttgtacagttacttaaatcttgagagnnnaaaaacnnnnnnnnnntnnttnnnnnnnntnnnnnngttgtacagttacttaaatcttgagagtacaaaaacnntnnnnnnncnnnnnnnnnnnnnnannnngttgtacagttacttaaatcttgagagtacaaaaacntnntnnnnntnnnnnntnnnntnnnnnnngttgtacagttacttaaatcttgagagtacaaaaacnnnnnnnnaannanntnnnnnnnnnannnngttgtacagttacttaaatcttgagagtacaaaaacnntnnnnnnnnnntnnnnnnannnnnnnntgttgtacagttacttaaatcttgagagtacaaaaacnnnnnnnnnnntnnnnnnnnnnnnnanntngttgtacagttacttaaatcttgagagtacaaaaacnnnnnnnnnnnnnnnntnnnnnannnnnnngttgtacagttacttaaatcttgagagtacaaaaacnnnnnnnnnnnnnnnnnntnnnnannnnnngttgtacagttacttaaatcttgagagtacaaaaacnnnnnnncnntnnnnntnnnnnnnnttnnngttgtacagttacttaaatcttgagagtacaaaaacnnannntnnttntnnnnnanntnnnnaaaggttgtacagttacttaaatcttgagagtacaaaaacnnnntnnnnannnnnnnnnnnnncnnnanngttgtacagttacttaaatcttgagagtacaaaaacnntnnnnnnangnnnncnnncnnnnnannngttgtacagttacttaaatcttgagagtacaaaaacctcaaattcgtcaattttggtttttgtagctcaaaaccattataaagtcttagacttaactagtcaatactattcttctaaatacttcaataacattgtgttgactggttcaatacggaattttattttcatttcatactggtacaaattgtttaataatctcaatgctacttgatcctcaattgataaactcatatgaagaatgtcagaactaaataaataaggtccaatcttccttaaagatgataaaaactcttgtttattaggtatttgatttattggatatttattagtaaaacgttcgtacataaattctaacgaataaaaatgttcaacgaaatctgaaacaatattaatctcctccagtacttctttcgtgacatgaagataaccttcatttgaaggaaaagagattgtgtacaacaggttgctatgattattggttaatcgttctaattgttcgcaacacccaacaaattccttataagataaataatcatccatatttcggagaacaagcaataccttttcagattgatcagtaatcactacttgcaacatcgaaagaaataataaaaactttgtcttattatcaacaaattcaaaggatatatttttatcgttctgtccaaaatagggtagaaaatttttttggatcaattggtctgcattaaaatatttcgcttctgtatgataattaataccatctagttgtagattcaaattctgattcaacagcaaggaaatcctatctagatgatcattgatattttcaatttgctccatcatctccactgtattaatctttttctttagataatcataagctatcgttccttttttatactccatctgctcgattagatcattaatattcgatagttggatcaccctgaattccgaacgggaaaccaccgtatcgtctattaagattttaggttcattttgttcgaataggactaagtcttcttcactatatttttttcctccaaaataccataacaggatttgccaaatatagtactttaattgttgatcttggccaacaacttgagtaaattgtccaaaactcaatgtaatattgtccttgtatggatgactgatattcattttcatataactaccaacttattatcgctgaccacttcttcttgttttgttttcccaccaatgatcaaaatcatttcagagaattgtttctcagttactgctaataaacggacattcccactaggtaaattactttggcttaattttttatagaatttactagcaaaacttcgatttggacatgttctataataaactgaaaactgcaacatttcaaaaccattagcaattaaatctttccgaaaattacgatagattcttttttcttgattcgtatccataggaagatcaaaaaaacacaataacctcaatgcttcatacctcattacttcagctccattctacactagaaacgatcggacagtagaatttactcgtatccttatccgaaatacattttaaaaaccccttaacatatttatccattgctaccgttacagaacaagtttcttttccataacgaatttttgcattcagtgtatcagttaaggctaatctgaactcatattttaaatattcttcatcccgtagattttggtaaacccaaacatcaataatctgcctaaaaggttccattaaatcgtctactaaattaaattgattatattcgtttttatgaaaaattccgattaagggatttagcccatacccagaaataatacgcgccatctgcgctctcataatcgcatagccataatttaggcctgcattaataacatcagtttcctgttgggtaagacgaacgaatttctttccaaataattcattgaaataaacttttgcagcgtgtccttcgcgattggttttatctccaaattcaatatgatctttataatc

SEQ ID NO: 736 - DNA, 4000 bp, Escherichia coli
  misc_feature (430)..(430): n is a, c, g, or t
  misc_feature (551)..(551): n is a, c, g, or t
  misc_feature (1324)..(1324): n is a, c, g, or t
  misc_feature (1960)..(1960): n is a, c, g, or t
  misc_feature (1970)..(1971): n is a, c, g, or t
  misc_feature (1985)..(1985): n is a, c, g, or t
  misc_feature (1992)..(1992): n is a, c, g, or t
  misc_feature (2000)..(2000): n is a, c, g, or t
  misc_feature (2013)..(2013): n is a, c, g, or t
  misc_feature (2158)..(2158): n is a, c, g, or t
  misc_feature (2176)..(2176): n is a, c, g, or t
  misc_feature (2749)..(2749): n is a, c, g, or t
  misc_feature (2751)..(2754): n is a, c, g, or t
  misc_feature (2756)..(2760): n is a, c, g, or t
  misc_feature (2763)..(2767): n is a, c, g, or t
  misc_feature (2769)..(2774): n is a, c, g, or t
  misc_feature (2776)..(2776): n is a, c, g, or t
  misc_feature (2779)..(2783): n is a, c, g, or t
  misc_feature (2785)..(2794): n is a, c, g, or t
  misc_feature (2796)..(2798): n is a, c, g, or t
  misc_feature (2800)..(2804): n is a, c, g, or t
  misc_feature (2807)..(2807): n is a, c, g, or t
  misc_feature (2809)..(2814): n is a, c, g, or t
  misc_feature (2816)..(2816): n is a, c, g, or t
  misc_feature (2818)..(2818): n is a, c, g, or t
  misc_feature (2820)..(2823): n is a, c, g, or t
  misc_feature (2825)..(2826): n is a, c, g, or t
  misc_feature (2828)..(2828): n is a, c, g, or t
  misc_feature (2830)..(2833): n is a, c, g, or t
  misc_feature (2836)..(2837): n is a, c, g, or t
  misc_feature (2839)..(2845): n is a, c, g, or t
  misc_feature (2847)..(2858): n is a, c, g, or t
  misc_feature (2860)..(2862): n is a, c, g, or t
  misc_feature (2864)..(2866): n is a, c, g, or t
  misc_feature (2868)..(2870): n is a, c, g, or t
  misc_feature (2873)..(2877): n is a, c, g, or t
  misc_feature (2879)..(2884): n is a, c, g, or t
  misc_feature (2888)..(2890): n is a, c, g, or t
  misc_feature (2892)..(2893): n is a, c, g, or t
  misc_feature (2896)..(2898): n is a, c, g, or t
  misc_feature (2900)..(2904): n is a, c, g, or t
  misc_feature (2906)..(2906): n is a, c, g, or t
  misc_feature (2909)..(2912): n is a, c, g, or t
  misc_feature (2914)..(2918): n is a, c, g, or t
  misc_feature (2922)..(2927): n is a, c, g, or t
  misc_feature (2929)..(2930): n is a, c, g, or t
  misc_feature (2933)..(2933): n is a, c, g, or t
  misc_feature (2935)..(2936): n is a, c, g, or t
  misc_feature (2938)..(2943): n is a, c, g, or t
  misc_feature (2945)..(2950): n is a, c, g, or t
  misc_feature (2953)..(2961): n is a, c, g, or t
  misc_feature (2963)..(2967): n is a, c, g, or t
  misc_feature (2969)..(2969): n is a, c, g, or t
  misc_feature (2971)..(2971): n is a, c, g, or t
  misc_feature (2973)..(2975): n is a, c, g, or t
  misc_feature (2977)..(2979): n is a, c, g, or t
  misc_feature (2981)..(2986): n is a, c, g, or t
  misc_feature (2988)..(2989): n is a, c, g, or t
  misc_feature (2992)..(2993): n is a, c, g, or t
  misc_feature (2996)..(2999): n is a, c, g, or t
  misc_feature (3001)..(3007): n is a, c, g, or t
  misc_feature (3009)..(3011): n is a, c, g, or t
  misc_feature (3013)..(3015): n is a, c, g, or t
  misc_feature (3017)..(3025): n is a, c, g, or t
  misc_feature (3027)..(3030): n is a, c, g, or t
  misc_feature (3032)..(3034): n is a, c, g, or t
  misc_feature (3037)..(3037): n is a, c, g, or t
  misc_feature (3039)..(3041): n is a, c, g, or t
  misc_feature (3043)..(3043): n is a, c, g, or t
  misc_feature (3045)..(3045): n is a, c, g, or t
  misc_feature (3049)..(3050): n is a, c, g, or t
  misc_feature (3585)..(3585): n is a, c, g, or t
  misc_feature (3587)..(3587): n is a, c, g, or t
  misc_feature (3589)..(3590): n is a, c, g, or t
  misc_feature (3592)..(3593): n is a, c, g, or t
  misc_feature (3595)..(3604): n is a, c, g, or t
  misc_feature (3607)..(3608): n is a, c, g, or t
  misc_feature (3616)..(3616): n is a, c, g, or t
  misc_feature (3620)..(3621): n is a, c, g, or t
  misc_feature (3623)..(3623): n is a, c, g, or t
  misc_feature (3625)..(3628): n is a, c, g, or t
  misc_feature (3630)..(3630): n is a, c, g, or t
  misc_feature (3633)..(3636): n is a, c, g, or t
  misc_feature (3640)..(3640): n is a, c, g, or t
  misc_feature (3642)..(3642): n is a, c, g, or t
  misc_feature (3646)..(3651): n is a, c, g, or t
  misc_feature (3653)..(3653): n is a, c, g, or t
  misc_feature (3655)..(3657): n is a, c, g, or t
  misc_feature (3659)..(3659): n is a, c, g, or t
  misc_feature (3661)..(3665): n is a, c, g, or t
  misc_feature (3667)..(3669): n is a, c, g, or t
  misc_feature (3671)..(3671): n is a, c, g, or t
  misc_feature (3676)..(3677): n is a, c, g, or t
  misc_feature (3680)..(3681): n is a, c, g, or t
  misc_feature (3683)..(3684): n is a, c, g, or t
  misc_feature (3686)..(3689): n is a, c, g, or t
  misc_feature (3691)..(3692): n is a, c, g, or t
  misc_feature (3695)..(3695): n is a, c, g, or t
  misc_feature (3700)..(3700): n is a, c, g, or t
  misc_feature (3702)..(3702): n is a, c, g, or t
  misc_feature (3709)..(3709): n is a, c, g, or t
  misc_feature (3711)..(3712): n is a, c, g, or t
  misc_feature (3721)..(3721): n is a, c, g, or t
  misc_feature (3724)..(3724): n is a, c, g, or t
  misc_feature (3728)..(3729): n is a, c, g, or t
  misc_feature (3735)..(3736): n is a, c, g, or t
  misc_feature (3740)..(3740): n is a, c, g, or t
  misc_feature (3742)..(3742): n is a, c, g, or t
  misc_feature (3749)..(3749): n is a, c, g, or t
  misc_feature (3753)..(3753): n is a, c, g, or t
  misc_feature (3763)..(3764): n is a, c, g, or t
  misc_feature (3768)..(3770): n is a, c, g, or t
  misc_feature (3772)..(3772): n is a, c, g, or t
  misc_feature (3778)..(3778): n is a, c, g, or t
  misc_feature (3782)..(3784): n is a, c, g, or t
  misc_feature (3787)..(3787): n is a, c, g, or t
  misc_feature (3789)..(3790): n is a, c, g, or t
  misc_feature (3794)..(3796): n is a, c, g, or t
  misc_feature (3798)..(3799): n is a, c, g, or t
  misc_feature (3803)..(3803): n is a, c, g, or t
  misc_feature (3805)..(3806): n is a, c, g, or t
  misc_feature (3810)..(3811): n is a, c, g, or t
  misc_feature (3814)..(3815): n is a, c, g, or t
  misc_feature (3820)..(3821): n is a, c, g, or t
  misc_feature (3825)..(3825): n is a, c, g, or t
  misc_feature (3829)..(3829): n is a, c, g, or t
  misc_feature (3832)..(3834): n is a, c, g, or t
  misc_feature (3836)..(3836): n is a, c, g, or t
  misc_feature (3838)..(3841): n is a, c, g, or t
  misc_feature (3847)..(3847): n is a, c, g, or t
  misc_feature (3849)..(3849): n is a, c, g, or t
  misc_feature (3851)..(3851): n is a, c, g, or t
  misc_feature (3853)..(3853): n is a, c, g, or t
  misc_feature (3860)..(3860): n is a, c, g, or t
  misc_feature (3865)..(3867): n is a, c, g, or t
  misc_feature (3869)..(3869): n is a, c, g, or t
  misc_feature (3872)..(3872): n is a, c, g, or t
  misc_feature (3875)..(3875): n is a, c, g, or t
  misc_feature (3879)..(3879): n is a, c, g, or t
  misc_feature (3881)..(3882): n is a, c, g, or t
  misc_feature (3885)..(3885): n is a, c, g, or t
  misc_feature (3890)..(3890): n is a, c, g, or t
  misc_feature (3897)..(3897): n is a, c, g, or t
  misc_feature (3904)..(3905): n is a, c, g, or t
  misc_feature (3909)..(3911): n is a, c, g, or t
  misc_feature (3915)..(3918): n is a, c, g, or t
  misc_feature (3921)..(3921): n is a, c, g, or t
  misc_feature (3924)..(3924): n is a, c, g, or t
  misc_feature (3926)..(3927): n is a, c, g, or t
  misc_feature (3930)..(3930): n is a, c, g, or t
  misc_feature (3932)..(3933): n is a, c, g, or t
  misc_feature (3939)..(3941): n is a, c, g, or t
  misc_feature (3943)..(3947): n is a, c, g, or t
  misc_feature (3952)..(3952): n is a, c, g, or t
  misc_feature (3954)..(3954): n is a, c, g, or t
  misc_feature (3957)..(3957): n is a, c, g, or t
  misc_feature (3960)..(3960): n is a, c, g, or t
  misc_feature (3962)..(3962): n is a, c, g, or t
  misc_feature (3964)..(3965): n is a, c, g, or t
  misc_feature (3967)..(3968): n is a, c, g, or t
  misc_feature (3976)..(3976): n is a, c, g, or t
  misc_feature (3978)..(3979): n is a, c, g, or t
  misc_feature (3981)..(3981): n is a, c, g, or t
  misc_feature (3983)..(3984): n is a, c, g, or t
  misc_feature (3987)..(3987): n is a, c, g, or t
  misc_feature (3990)..(3991): n is a, c, g, or t
  misc_feature (3994)..(3994): n is a, c, g, or t
  misc_feature (3996)..(3996): n is a, c, g, or t
  misc_feature (4000)..(4000): n is a, c, g, or t
acttatgaggcctccaggctagcagcgccggaggccgcaacgcatctctaccactccttacggagcgcgcagcgccggatccttttcaaaggatgcattcgttgatttggcgcaacaacattgaacctctcgattccgtcaattcagttcggctcacttctccggtatgtctctggaggctccaagaaacgcaggtcagccaagttgtggctcttgttgagtacggcaaatccgcttgaagtgtcggaaccggtagctggctcaactctgagcactaaggcttccgcttcaagtcttaaattcgatccttccccaacgaggggaccaaatagcacttcgagtcgaagatcaactttcgctggaggcagagagtcagagaaaataaacgatcctttggaactaatgtcacgtgtcacgccttgctcgcggngctggacgcccttcgcgtcgcgccactcgaaggttacgcccgcacggacgttgaaccgagtttgttccctgcggtccacgccgttaccgacatcccgtcccatttttttattcctagaacnttcgtagaggattttcactttccgaatgggctcctcaatccctcttactacgtgaactcggcagcgggcactttacgctcttcggcaccggctcgcaagagaaggaatgttggttgaaggtgggccaactcgtggagacaagcattcatccctacgaaaagccctctggagcttctcgtactgccgaggtcgctaggtacatgcctacctagtagtacatagatcccggtacataccgcactcattcggtgggatcaagagagactgctttgtaacggttgtcacggtgcgcataaatctgggaagggcgacccttgtgagtgaaaacggtttagggttgtggcctttgaggagggcttgtgcttatgcctagccgcgcagcagcgtcgttatgagaattcctggggtaccttgggtagagcaatcgcgggtcgaatcagtttccctcaccatcatcgcgttttcgactcaaggcatagagagcgagttccagccggttcgaagtccccaccttgttgaagatccgaaacaggtaatttctaaccgtgtgctcgctcagattgagctgccgcgaaatatcccggttcgtaagcccctcagagactaaagtgactaaatccgcttccctctttgtgagggcattaggccctttagcaagagcaggcggttccgcccattgcgccgaaccctgggccagcgagtccattatgaatcgaagttccttattgccaacccatatttgtccttgtgagataacatggacgcacttgcanagcaactcaaaccgctcctcgcgagagaatacgccgcttgcgccagcgcgaacagcctctatgaccatgaggcgctcgatcgaatcaagcatcattatgatgctcgtgttgggatgcgaggttcgcacttcacgcgcgacgctgaagcccgctgtcgcgccctctttcagccgagcgctgatgatggcaacattcgtttgattctggcgaagtccgtcacgaattcccgcggaatcggtagcggaaccgactaccgtcagcttgtggcgactgcgccgcaacgcggcggccatcaactgacaacccattggcgtgtcatcaccgatgaaaacagtcacccctggaataggctgcgcggtaccggacatcgtctaactccctgaagccaagcttcgggctggaaacgaggcggctttcgtggcaacgtcgcggtcccgataaatctagaaagcgttcaggctgtagcagtcctctgtcaagcggtcacaaagcgaaacaatcagcccactccgttttcgctgaccgccagcaccaccaatgatctcgggggtccggcttttcccgcgtgagccttaccgccgtcggtttcagcatcgatttggcgtcaccatcccctaacccaagtctctcaccctngtcaatacgnnaaatatattaattngcacgtnacgtctangtgaacttttcgnctgcgtctagctaagtcgcatcgcctagagatgccacgaacatctacaagtcgtcttgcaaatcgaatgcgattcagaccggacacgctgagatcgcgtagtgctcgtgaccacctcccgagcaagtggcgtcggaatggcgtcnatttgcttgccttgctcncgcgtactttttctaaagcttcagcgactcctcagcaactggcagtaatgccagccatcgcttcggcttacgtcgcatcggaaccgatactcagtgcattacagggatgcgctgacatgcagtaactgaagcggtttctcccactgcccgataagtcttatcggctttttggtcttcagggagcggttgtgccaggcctctcctcgcgctcaacagcaagaatcaatgatttatacacatcgaactcccagccccctgtgacgcgaaaccgaacagcacctccagactccgcaataataattccccgaagcggcacgcgtgtttcccccgttatcagctgaaggaccacagtttttccaaaccactgttcgaaagaactgaccattgtcgtgacctcctcagatcaaggggatcgggaactgccaagggggatatcccctatcgaaagagatcgcgagaactatttgggttagtgtccgtcacggaggtctcttccgataggaaattttctcgccctttgtagtcgagcaggatgacgcatgccactggcaaaactactaggtggccaagtcntnnnntnnnnnggnnnnncnnnnnnangcnnnnntnnnnnnnnnngnnnannnnnccngnnnnnngncncnnnncnncngnnnncanncnnnnnnncnnnnnnnnnnnngnnncnnntnnngcnnnnngnnnnnngggnnncnnggnnncnnnnngngcnnnnannnnntaannnnnntnnacncnnannnnnncnnnnnnagnnnnnnnnngnnnnngncncnnncnnntnnnnnngnnggnngannnngnnnnnnngnnncnnncnnnnnnnnncnnnncnnnccncnnngngnttgnnccgcagtggctcatagacttccccgctcacccacaacttgtgtagcagtacggccaacttccgcgccacggcaaccacggctcgcttcttggcattctttcctccccgctcggctagcttcagtccccagcgccgcagatcactgtcctgtccaaagggcccgagaatgtagtgcgctccttgcgccatcagtgtccttaggtaacggtcgccttccttgctgatgtggagttgtggttcgctcttgccagagttccggcgcccagcacgtaaccccagaaaacatcctgcatcccggctgcggcgaaagcggtgtggatcgcccaaggttagaacgtaggtcaacgcaatcagggttcctactcccttcacttgttgaagccgagcaacttcgggatacacttgctgggcgatttgttcgatccgccgatcgtattccgcgatgcgctcgttcaacgattcgatttcccccaacagaggatccaaggcctcccgcaactcctggctcagtcccttggcgatctctcgattcatngngnngnncnnnnnnnnnntgnnttccgggnaganncntnnnnanatnnnngccncnggannnnnntncnnnangnnnnntnnncnaactnnggnnanngnnnntnnagncgttntnccggggntnncttcgatcntgnagcnngttccnngaantngtcaganacangaccaagcgnnggcnnncncagcantcgnnngancnngaannngnnatcncnnagcnnggnntgtcnnggcngcgntannngncnnnncggatngngnantcaactncaacnnncngantanaagnanntgnactgnttggagntgcacgnncaannncaannnnctnccncnngcntnnaccctnnncnnnnngagananttncancnanntnntgacaatntnnangnntgnccnncgntnctan

SEQ ID NO: 737 - DNA, 4000 bp, Escherichia coli
  misc_feature (1)..(2): n is a, c, g, or t
  misc_feature (4)..(4): n is a, c, g, or t
  misc_feature (7)..(8): n is a, c, g, or t
  misc_feature (10)..(10): n is a, c, g, or t
  misc_feature (12)..(18): n is a, c, g, or t
  misc_feature (20)..(23): n is a, c, g, or t
  misc_feature (32)..(32): n is a, c, g, or t
  misc_feature (116)..(116): n is a, c, g, or t
  misc_feature (118)..(118): n is a, c, g, or t
  misc_feature (123)..(123): n is a, c, g, or t
  misc_feature (269)..(269): n is a, c, g, or t
  misc_feature (272)..(272): n is a, c, g, or t
  misc_feature (308)..(308): n is a, c, g, or t
  misc_feature (312)..(312): n is a, c, g, or t
  misc_feature (434)..(434): n is a, c, g, or t
  misc_feature (752)..(752): n is a, c, g, or t
  misc_feature (755)..(755): n is a, c, g, or t
  misc_feature (968)..(968): n is a, c, g, or t
  misc_feature (1327)..(1327): n is a, c, g, or t
  misc_feature (1869)..(1869): n is a, c, g, or t
  misc_feature (2682)..(2682): n is a, c, g, or t
  misc_feature (2687)..(2687): n is a, c, g, or t
  misc_feature (3362)..(3362): n is a, c, g, or t
  misc_feature (3512)..(3512): n is a, c, g, or t
nnanttnnantnnnnnnnannnntttttttantcataaatatagaatagatattatttaacttagattgtcttttttgatgaattttatatttaaatatcatttatatatacaatntnaattntgattaaaaaatttaaaaatactcataataaatggcaattctggattgacagaggaggaacctttacagatattattgggcgtaatccagagggtaaaatttcaacacataaactactatcagaaaatccacaacaatactctgangcngccatacaaggtattcgtgacatattgtctttaaantctnatgaccaaatcccaatagataaaattgaccttataaaaatgggtacaactgttgcaactaatgctttattagagcgaaatggggaaagaactctattagcaattacaaaaggctttggaganatcttaagaattggttaccagcaacgacctaatttatttgctctcgatattaaactgccagatatgctctactctgaaattgaagaaattgatgagcgtgtagacattcatggaaacataattaaaaaacttgataagtctggtacagaagtaaaactgaaaaaagcatttgacaacggttatcgctcaattgccattgttctgcttcatggatatcgctataaaaaacatgaaaatcaaataaatctcattgctaaaaaaattggttttgaacagatttcagtgagtcaccaagttatcccattaatgaaaattgtnccnagaggagacaccacagttattgatgcctacctatcaccgattttgcgacgttatgtgaatcaatttgaaaatgcattggggactgaaaagaaagacaaaggaaagttaatgtttatgcaatcaaatggtggactaactgacgcacatttttttcaagggaaagatgcaattctttcaggtcccgctggtggagttgttggaatggtaaagacnggagaaaaagcaggctttaaaaaacttatcggctttgatatggggggaacttccaccgatgtttgtcactataacggtgactatgaaagaaccctcgaaacacaagttgcaggtgtaaggcttagagcgcctatgatgttaattaataccgtagcagctggtggtgggtcaattcttcactttgatggatctcgctatcgagtcggtccagattcagcaggagcaaaccccggtccagcatgttatcgtaatggagggcctctaacagttactgattgtaatgtaatgctaggtaaattaaatccagaattatttcccaaagtatttggtaaaaacgcaaaccaacaaatagatgttantatcgttaaagaaaaatttaatgttctagctaaagaaatttctaatgcaactaaaaaagcagtctcacctatagaggttgcagaaggatttttatcaatagcaattgaatgtatggcaaatgccattaaaaaaatatcagttcaacgtggctatgatgttagcaaatataccttgtcttgttttggtggtgctggtggacaacatgcttgcctagttgcagatagtcttggtatgaaaaaaattcatttgcaccagtatgcaggagtattatcagcctatggcattggtcttgcggatagtcgaacaattaatgatctagctattgaattaaacctaaataaagacattattgaatcactctcaattcaatttaataatttaaaaaaacaaggacgagaagaaatggtagctcagaatttaaattctgagaaacttcgttatagctctcgaatttatcttcgctatgaaggctctgacagtgctttagcagttagattttctgaatatcaagaaataaagtcaaattttgaaaacattcatnaagcaaggtttggctttatctccccagaaaaattactgatcgttgaatcaattcaagttgaagtttcgtgtccaagtgagcatgttgaaagcaaaaataacaagaggacaaagagaggtactagttctctagctaggctaaatgtagtgatgaatggagattcaaatccaacttcattttatcatcgtaataatatttctactaatgacaagcttattggcccagcggtcattattgaggatacctcaacaatcgtcattgagccaggttggcaggcaagtattaataataactttgaccttatattagagcgcactgaagaaaaacaaagaatgagtgctatcggcactaacgttgatccaatcatgttggagatttttaacaatttatttatgaacgttgcagagcagatgggaacagtgctcgaaaataccgcttcatcagtcaacattaaagagcgtctcgatttttcttgtgctttattctctccaactggtgatctcgttgccaatgctcctcacgtacctgttcatcttggttcaatgagtgaatcaattaaaacaattattcgtgaaaataataaaacaatgatgcctggtgatgcttttcttattaatgctccttataatggcggaacacatttgcctgatattactcttatcaagcccgtttatgatgaacaagaagaagaggtaattttttatgtagcaactcgtggtcatcatgcagatattggtggaacagtcccaggatctactcccgcatattccaaacatattaaagaagaaggcatcttaattgataatttcactntagtntcaaaaggagtttttcttgaagaagaaatatacaatttactaagctctggtgattttcctgcacgcaatattaagcaaaatatagctgatttaaaagctcaagttgcatcagcagaaaaaggcgctcaagaattacttggagttattcaaaattatggccttaaagtggttcatgcatatatgcagcatgttcaagataacgctgaggagtctgttcgaagaatattagatgttattagtgattctagctttacctataaaatggatgatggttaccaagtaagtgttactattagtgttgataaaaaaaagcgcagcgcaactatagactttactggcactagtgatcaacacccaagtaattttaatgcaccaagtgcaatttgtcatgctgcagttctttatgtttttcgttgtttagttgatgacaatattccacttaatgctggctgtctcaagcccttaaagttaattattccggaacactcaatgattaaccctgaataccctgcggctgttattgctggaaatgttgaaacttctcaatatattgtagataccctttttggagctttaggtgtagtcgctgcctcacaaggaacaatgaataacttcacatggggtaatgacagaatacagaattatgaaaccatctgtggaggttctggtgctagngcagaacaaaatggctgcagcgcagttcatacccacatgaccaattctagattaaccgaccctgaggtattagaatggcgctttcctgttagacttgaatcattcagtattagaaataactctggaggtgatggtattcataaaggaggngatggtgttgatcgaagaatacgttttctagaatcaatgacagtaaatatgattgctggccacagagtagtgcctccttatggtattaaagggggaaagccaggcgcagtagggaaaaattatgtcattcatagagatgcacgaatcactgaattagggactaaagggcagattgaagttgtaaaagatgatgtttttgtcctgaaaacacctggtggaggtggttatggacaatacaattagctaaaaaactattaacactaatattatttgatttagagaaaattatgaaaacaatttgtcaaaatcctgaacctttcgatgccaaagagcgtcgtactattaagcctgtggtttcttaccctattgataatttacccacatatgattcaactctttatagagatgcaagagataaaatgaaacttgttgactcagttatcattcctccaagagaggcaaaaacttttgttgtacctgctggtcat

SEQ ID NO: 738 - DNA, 4000 bp, Escherichia coli
  misc_feature (138)..(138): n is a, c, g, or t
ttatgcctctgattgtctgaatgctttgtgctgctcttggcgtaaactctgtatcaaatgttttatcattctcatcagtttgtgttccccattcgattgtaaaatacaatgaatgtaatatgtcgttcatatccatcnattcaccattgtgccaattactaaatttgaaatcaaatgtcaccttacttgtcgcaagtgtgtttgttggaacgttgtcccatttctgtaatgctgtatcccacattttagcctcgataggaactttgatcttttcatttaatccccgtgtctccacttcccattgcgctctaactggaaatgtttctcccgtaaatgggtgcttgaatgttatggggtctgaaattattccccaaatttgtctgctgtatgtgtctgttaaccccattaccggattccatgatccttgatagatttgctttactccgataactaactcttcatcgttattttttgcattaattgatgtgaatctacttggcactcctgcccctaggtcattaaccactccctctacattctgatttaccacatactgatcaattttacttgctagaaaaattctcactgactcgttaatcccttctactactgcttcttgaattaactgtgttcttttttctgatgtttcaaaatcacctttgtatatttgttgagttagttcatctaattttttattttcataattccaatatgtcgggtcgttaaaacctggcatatttgaaaaccacggtgaatacatttgacctagtcctatagagtcatactttacaaatgcagagcgaccccatccttctgtgtatagattccattttgaatctgctggatttgatccataaaccaccacaaatgctttgttcaaatcgccatattcttttttcactgtgaatcccatgttttctaattctgatgataaaatctctccaattgattttctaaccggatcatcgcttcgaataaaaactattaattcaatttcattattttcaaacatccatctattatcaatttttactgcaccgcgctctgtcaatgacttggaaataattttttcagataatgttggattgtatttaaaattgaacgactctaattgctttattattgtgatgtactctggatccgttggcccgtaataggatataattgaagatccgtatcctcccatcagttcattaacgattaatttcctatctagtaggtagttcaaggcaaatctggcatctttatttgaaaacggattaaatttttctgattctgctggattcactagtaggctgtatgatcctcctgtggaatcataaactttcaatccctcccttgattgattactttccagtctatctgacgaaattgtataataatacatgtcaagattaccgtttcttacttcttctaatgctgtattttcatctaaatactgaataaattttattgaatctgcaaaagtatttttttctgcaaacacttgattgtgtgttattattatgattgaaagagctagtatgattactagcatttttttcatactgctaattctaaatgcttctaataaaacctatatttccggtgttacgcaaaaatcataattgaaaatttatccaaaaatgattactagcttaaatggaataattcaaggcggtgtgtctgtcaaggatttttctactgtaactgagattaatcttgatgactctgaagacattttaaataattttgttgataacgggtttggaacactgaccgatagtttctattattttgaagctggtgataaattaaaaattgcaatttccttccttcaacatgggttgccattagacgaaatctcgattgcgttggattggagagattttgaagggttaactgctgaaattttatcatccaaaaattttgctgtgattaaaaatttaatgctaacaaaacctaggatggaaattgatgtcgttggaattcgtttgggtattgcgatattgattgattgcaagcattggaaaacatacagtcaatcatccttatcatctgctgtccggaaacaaattgaaagaaccaagcaatatgttgctaaaacccctggctctacggctgtacctgttattgttactttgcatcatgacaagattgactttgttgacagagttccgatcgtgcctatttttcaattttcttcatttattgatgagttttatggcaatgttgatcaaatgaaaactatagaaacagactagttatgaataaccctagactggcaattacaaaaattttggtaattttcaatgagttgtctaaagcttttgaataatcttcgtagatgctcttgcccatgactctaactttggtttcattctctaaaatttcatattttgccgatgtgatgtttagttgtgaattttctgcaattttactgagccattttgaaattttatctgaacttgtaattaatcctaattgataatacccgtttctgtttcttgctttaactgccgcatagtgtgtgtctgacgtacaaatttctaatagattgtttccattatttgaaaagttttctacaattttctctctgactccattttccatgttgttggcatctgcccatcctagaaaatattttttatcgttaattttcagacacgtaattcctaatcctcccattcctaaatcctctgcccacacatccatgccctcggtatttgcatatccgaattctattggaaaactatcttttgtaattaatgaatccagacatgatttagcagctttcaataggtcctctccgtcttcttttgaaatttcttcacccattgcattgtgacaatcaacagtcattatttttgtataatttctattatttccgtattgttcgatttctttttttatgtaattgggaatatcttccatgccgtgtggtgataacgatagcaacagcaacggattatttccaaatagtattcctgtaacccttgctttgttaatttgaactaccatcggctctgtacatttcataccttcttcttttacctcaaaattttgcaagttatttagataattatctacctcgtttcttgatggcaggtttaacgcatgatcagatatgctgtgcattaccattgcagacgatgatagatttttgtaaattaggtatgggatgttgctgcctcctactggatggtatggtcctgggtgaatctctggtaacaccattctgaattctttagctccgtcatgtgatgataattttatttgaaatgttgcaactttagtttcagttgcatgttctcccatcaattcttcagcatcactaacatcgttaccttgcgatgcaagatatgcttgaatggttttgtgtgtgcttttcattcctggtcttcctgctctatctgttactactgaccatgcggttgcaataattaaaaatgtaaatccatatcctaatgcaattggattggtaagcattggaatccatgattcttgtggaatcaataccagaaacattgctagtggctgaatgaatgcaattgcccatgcttttttcagacttgcccccaacgttgttgtatacaagccaattctaaaacttgcaaaaagtatcattccaaatgtaatgaaaaacagtgatgtgtcttttgatagcactacacttgctagtattcccattaggattgtgaccacccagagcatgtttccaaaaagtgatgaatgcagtgattttgaatattcttttttctttgcaaattttatgtctagtaattgcattgcagccattactgctaacaccattggtatcttgtaccaaaattcattgaactctaagttgagatatccaaaacatgttgctaatacgattactattcctactaccaatgatcctaccagtgagaaatacttggatcctggatttactaaagtaagagaaaacctatcgtgtatatttgaaacgtcgtctgattcttgttccattattttttcacggagcgaaaagtgtgtc

SEQ ID NO: 739 - DNA, 4000 bp, Escherichia coli
  misc_feature (144)..(144): n is a, c, g, or t
  misc_feature (150)..(150): n is a, c, g, or t
  misc_feature (514)..(514): n is a, c, g, or t
  misc_feature (616)..(616): n is a, c, g, or t
  misc_feature (637)..(637): n is a, c, g, or t
  misc_feature (820)..(820): n is a, c, g, or t
  misc_feature (1045)..(1045): n is a, c, g, or t
  misc_feature (1048)..(1048): n is a, c, g, or t
  misc_feature (1252)..(1252): n is a, c, g, or t
  misc_feature (1288)..(1288): n is a, c, g, or t
  misc_feature (1669)..(1669): n is a, c, g, or t
  misc_feature (1795)..(1795): n is a, c, g, or t
  misc_feature (1804)..(1804): n is a, c, g, or t
  misc_feature (1989)..(1989): n is a, c, g, or t
  misc_feature (1991)..(1993): n is a, c, g, or t
  misc_feature (2012)..(2012): n is a, c, g, or t
  misc_feature (2014)..(2014): n is a, c, g, or t
  misc_feature (2625)..(2625): n is a, c, g, or t
  misc_feature (2628)..(2628): n is a, c, g, or t
  misc_feature (2631)..(2631): n is a, c, g, or t
  misc_feature (2721)..(2721): n is a, c, g, or t
  misc_feature (2799)..(2799): n is a, c, g, or t
  misc_feature (2916)..(2916): n is a, c, g, or t
  misc_feature (2940)..(2940): n is a, c, g, or t
  misc_feature (3062)..(3062): n is a, c, g, or t
  misc_feature (3123)..(3123): n is a, c, g, or t
  misc_feature (3128)..(3128): n is a, c, g, or t
  misc_feature (3132)..(3132): n is a, c, g, or t
  misc_feature (3183)..(3183): n is a, c, g, or t
taatagaaatgccgctgcgccaagggcacatccacatcgcgcgcctcgcggatgggtttgccgttgtccagcgtttccagcacggcgaacaaccggctgtgtttctgcagcaaccgcgccagcgcataaaggaaccgcgcccgnccgtgnccgcccagcttggcccatttgggctgtgccttgcgcgccgcggcaaccgcggtgtcgacctctgcctggctggcctgcgtcaacgttgccagcacattgccattggcggggttgcggctttcgaaatcatcccgcgcctcggtgaacgcgccgtcgatgaaatgcccgaaacggctgccctgatcgaccagccacgccagtgcgtcagcggcattttccggtgccgtcccatagtccatggtttcatagatttcggacacgctcatgggttcacccttttcaaaatactcaaatccgacattggtttcacgcggctcagctgatggcgtgacgatggcttgcggaatagctgcccgacacatgntggtcgagctgacgttcgatgtcgcccaacagcgacgaggccccgaaacggaagaggtcgggctgcaaccagcggtcgcccaattcctctttcatcatggcnagatagaccagcgcgtccttngccttcgatatcccgcccgcgggcttgtagccaacgcggaagccggtgcggtcgaaatagtcgcggatcgcgcggatcatcacgagggtcacgggcagggtcgcattaacgctttccttaccggtggaggtcttgatgaagtcagcacccgccatcatgcagatcagcgaggcacgcgcgacnttgcgcaggctgcccaactctccggtcgcgaggatcgccttgacatgcgcatcgccacaagcggcgcggaaggcacgcatttcatcataaagcgcctgccagtcacctgacagcacatggcggcgcgaaataacgatgtcgatctcggcggctccggcggcgacgctcatctcgatctcgcgcagacgcagctcgaacggggagagaccggcgggaaatcctgtnganacggcggcaatcgggatgcctgtgccctgcagtgctgctttggcgggggcgatcatctcgtggtagacacagaccgcgcccacggtgatctgcgacatgccaagcgcgtccagcagcgcgggcgcaatcggttgacgtgccttcgcacaaagccgctcgacacggcgggcggtatcatcccctgacagcgtggtcaggtcgatncagctgacggcgcgcagcagccacgcggcctgatantctttcttcacggaacggcgcgcgggcaaacccgcggcgcggcgctccaccgcagaggagttcacctgcacggcgcgcacccaatccatatccagcggcatccccggattgcggggttccgtcacctgtggcaggtggctttgggccagttcggtcgggtcatatacatgcgtggacatgggcgctttcctgtctgatcagacaggcaatgtgccacggggcaacggcgcaatgcaagcatcgcgccctcacgtcacatccgccagcggcgttcagctgccgcgataggttgaatagccgaacggcgatagcaaaagcggcacgtgataatgcgcatccgcatccgaaatgccaaagcggagggggatctggtccaggaancgcggtgcttcgggctccgctccgatggcatcaagataggccccggcttcgaacaccagctcgtaggtgccagccgcaaactggcccttgggcaagatcggcgtgtcggtgcgaccgtcagcattngtggtcatntgcaccagcttcatgcggttggccccctcgatccggtaaagcgtgatttccagcccgcctgcggggcggccgcgtgcggtgtccagaacatgcgtcgtcaaatagccgtttgccatgggtggggtctttcctgatccgttggacccttacgataggcgggtgtcgggctaggtcaatggcggatngnnnggcggctttctgggcgcgncngcgctgaaagaggcggtgattcgggcgatggcgaaaaataattcgcctaccgaatcgtttttgcttgagccgcgaatcatcctgcgcctatatggtacacaacattcaatcggaggtgttgcctgccagcgacccatacaatccgagtatgtattctgggggacagaattcttatgatcgggcaagtcgcacgtggtgcgacgatcattgggcaggggccgacaggactcgtgttgcatagcgcagcaagagcggccccttccactcactttcccgcccgatatgccccccgtatgtgtttgagtttcaggccggccagcgccttagaactttcgctataagagagcagggccactcgagccgatctggcagccggccgacctttcgggaagggttggctggctgtacattgcgaaaaatcagtgccagaaaaccgttggttgactaaaacaacggcccgcagcgcgcggtttccccgcgcgcgcaggcgctgaccaaaggacgatcccatgacacgctaccctcgtgattttcacggctacggccccacaccgcctgatgcacaatggccgggcggcgcgcggatcgcggtgcaattcgtgctgaactanganganggcggcgagaactgtctgcttcacggggatgccgcgtcagaggccttcttgtccgagatcgtcggggccgccccttggccggggcaacgncactggaacatggaatccatctatgactacggcgcgcgggcgggcttttggcggttgcaccgcctgttcacgggtgcngatatccctgttaccgtttatggcgtcgccaccgccttggcgcggtccccgcagcaggtagaggcgatgacccaggccgattgggaaatcgcaagccacgggctgaaatggatcgantacaaggatcacaccgccgaggtngaaagcgccgatatggacgaggcgatccgcctgcaccgcgaggtcgtcggcacagcgccgcgtggctggtacacggggcgcagctctgtgaacacggtcgcgctggcggcagagacgggggncttcgactatatctcggatacatacgacgatgatctgccctattggatgcaggtggcaggncgcgntcanctgattatcccctatactcttgattgcaacgatatgcgctttgccacgccncagggttttaattcgggcgatcagttctatgcctatctgcgcgataccttcgatgcgctttatgccgaaggcagcgccgggcaggccaagatgatgtcggtcgggctgcattgccgtctgatcgggcggcccggacggatacaggcgctgaaacgctttatcgactacatcaaagggttcgaaggcgtctggacgccgcgccgcatcgacatcgcagagcattggcgtgtcacccatccgcctcagccgcgcctgcgtctggaccagatggaccgcgccagctttgtcgcgaaattcggcggggtgttcgaacattcaccgtggatcgccgaacgcgcctatgaccttgaacttgggcccgcgcataactctgtcgcggggatacataatgctttggcgcggatgttccggtcggcgacgcgggcggaacgcttgggcgtgctgaccgcgcaccccgatctggcgggcaagctggcggcggccaaacggctgacggctgaaagcacgcaagaacaagccagcgccgggctggacgccttgaccgatgccgagcgcgcccgcttcgagacgttgaacagccaatacgtcgcgaaacacgggtttccctttatcatcgcggtgaaggatcacgacaaggacggcatcctgcgccagttcgagacccgcatcgccaacgcaaccgaagatgaatttaccaccgcatgcgcacaggtcgaacggatcgcacggctgcggctggaggatatgctatgacctatgccttcccccccggcggtctgccggaccagactgtctctcctgaaagcacggctgtgtt

SEQ ID NO: 740 - DNA, 4000 bp, Escherichia coli
  misc_feature (6)..(8): n is a, c, g, or t
  misc_feature (10)..(10): n is a, c, g, or t
  misc_feature (12)..(14): n is a, c, g, or t
  misc_feature (16)..(16): n is a, c, g, or t
  misc_feature (18)..(18): n is a, c, g, or t
  misc_feature (20)..(20): n is a, c, g, or t
  misc_feature (22)..(22): n is a, c, g, or t
  misc_feature (25)..(25): n is a, c, g, or t
  misc_feature (27)..(31): n is a, c, g, or t
  misc_feature (33)..(33): n is a, c, g, or t
  misc_feature (36)..(36): n is a, c, g, or t
  misc_feature (38)..(38): n is a, c, g, or t
  misc_feature (41)..(41): n is a, c, g, or t
  misc_feature (44)..(44): n is a, c, g, or t
  misc_feature (46)..(46): n is a, c, g, or t
  misc_feature (48)..(49): n is a, c, g, or t
  misc_feature (51)..(51): n is a, c, g, or t
  misc_feature (56)..(56): n is a, c, g, or t
  misc_feature (58)..(58): n is a, c, g, or t
  misc_feature (61)..(62): n is a, c, g, or t
  misc_feature (64)..(66): n is a, c, g, or t
  misc_feature (68)..(75): n is a, c, g, or t
  misc_feature (78)..(82): n is a, c, g, or t
  misc_feature (84)..(84): n is a, c, g, or t
  misc_feature (88)..(88): n is a, c, g, or t
  misc_feature (92)..(92): n is a, c, g, or t
  misc_feature (95)..(95): n is a, c, g, or t
  misc_feature (97)..(101): n is a, c, g, or t
  misc_feature (104)..(112): n is a, c, g, or t
  misc_feature (114)..(118): n is a, c, g, or t
  misc_feature (121)..(124): n is a, c, g, or t
  misc_feature (126)..(126): n is a, c, g, or t
  misc_feature (128)..(130): n is a, c, g, or t
  misc_feature (134)..(136): n is a, c, g, or t
  misc_feature (140)..(142): n is a, c, g, or t
  misc_feature (146)..(150): n is a, c, g, or t
  misc_feature (152)..(155): n is a, c, g, or t
  misc_feature (158)..(172): n is a, c, g, or t
  misc_feature (174)..(177): n is a, c, g, or t
  misc_feature (182)..(192): n is a, c, g, or t
  misc_feature (194)..(210): n is a, c, g, or t
  misc_feature (212)..(215): n is a, c, g, or t
  misc_feature (609)..(609): n is a, c, g, or t
  misc_feature (618)..(618): n is a, c, g, or t
  misc_feature (900)..(900): n is a, c, g, or t
  misc_feature (1968)..(1969): n is a, c, g, or t
  misc_feature (1998)..(1998): n is a, c, g, or t
  misc_feature (2141)..(2141): n is a, c, g, or t
  misc_feature (3310)..(3312): n is a, c, g, or t
  misc_feature (3314)..(3316): n is a, c, g, or t
  misc_feature (3320)..(3323): n is a, c, g, or t
  misc_feature (3325)..(3338): n is a, c, g, or t
  misc_feature (3341)..(3343): n is a, c, g, or t
  misc_feature (3346)..(3347): n is a, c, g, or t
  misc_feature (3350)..(3356): n is a, c, g, or t
  misc_feature (3359)..(3361): n is a, c, g, or t
  misc_feature (3364)..(3366): n is a, c, g, or t
  misc_feature (3368)..(3369): n is a, c, g, or t
  misc_feature (3371)..(3372): n is a, c, g, or t
  misc_feature (3374)..(3374): n is a, c, g, or t
  misc_feature (3378)..(3385): n is a, c, g, or t
  misc_feature (3387)..(3387): n is a, c, g, or t
  misc_feature (3389)..(3395): n is a, c, g, or t
  misc_feature (3398)..(3404): n is a, c, g, or t
  misc_feature (3406)..(3406): n is a, c, g, or t
  misc_feature (3408)..(3409): n is a, c, g, or t
  misc_feature (3411)..(3411): n is a, c, g, or t
  misc_feature (3413)..(3415): n is a, c, g, or t
  misc_feature (3417)..(3418): n is a, c, g, or t
  misc_feature (3420)..(3420): n is a, c, g, or t
  misc_feature (3422)..(3426): n is a, c, g, or t
  misc_feature (3429)..(3432): n is a, c, g, or t
  misc_feature (3434)..(3436): n is a, c, g, or t
  misc_feature (3439)..(3440): n is a, c, g, or t
  misc_feature (3442)..(3445): n is a, c, g, or t
  misc_feature (3447)..(3450): n is a, c, g, or t
  misc_feature (3452)..(3454): n is a, c, g, or t
  misc_feature (3456)..(3456): n is a, c, g, or t
  misc_feature (3458)..(3465): n is a, c, g, or t
  misc_feature (3467)..(3471): n is a, c, g, or t
  misc_feature (3473)..(3475): n is a, c, g, or t
  misc_feature (3478)..(3478): n is a, c, g, or t
  misc_feature (3481)..(3484): n is a, c, g, or t
  misc_feature (3486)..(3490): n is a, c, g, or t
  misc_feature (3494)..(3496): n is a, c, g, or t
  misc_feature (3863)..(3863): n is a, c, g, or t
  misc_feature (3890)..(3890): n is a, c, g, or t
  misc_feature (3922)..(3927): n is a, c, g, or t
  misc_feature (3930)..(3936): n is a, c, g, or t
  misc_feature (3939)..(3939): n is a, c, g, or t
  misc_feature (3941)..(3948): n is a, c, g, or t
  misc_feature (3950)..(3953): n is a, c, g, or t
  misc_feature (3955)..(3958): n is a, c, g, or t
  misc_feature (3960)..(3963): n is a, c, g, or t
  misc_feature (3965)..(3968): n is a, c, g, or t
  misc_feature (3970)..(3974): n is a, c, g, or t
  misc_feature (3976)..(3978): n is a, c, g, or t
  misc_feature (3980)..(3982): n is a, c, g, or t
  misc_feature (3985)..(3986): n is a, c, g, or t
  misc_feature (3988)..(3991): n is a, c, g, or t
  misc_feature (3993)..(3993): n is a, c, g, or t
  misc_feature (3995)..(3996): n is a, c, g, or t
  misc_feature (3998)..(3998): n is a, c, g, or t
  misc_feature (4000)..(4000): n is a, c, g, or t
aaaaannntnannntntntncnaanannnnntnttnanttntcncnanngnttttntnaanncnnntnnnnnnnnaannnnncnaaantttnccnannnnnttnnnnnnnnncnnnnnccnnnnantnnnaaannnaaannntttnnnnnannnnccnnnnnnnnnnnnnnnannnnaaaannnnnnnnnnncnnnnnnnnnnnnnnnnnannnnttttttaattaattttcaaattttactcctaacaaacgcaaatagcgtccgttgtctgtaaagtgtactttgtcacagccagttgcaaaacgtaaccaattgcattctgcttgtgtaaacttgtctcctattattccaaagcacaagttgcgtctgtcctttacatcctctaaatctttttgcacaccgtttgtccaagtgcgccatacacctgtgtccttttgtgcaatcatatctgcaaccaatttacgtgcttgttttgtgtttaattctgtctgcatatataagccctccatatgcgtgttgtataaaaacactgtagcacagttgcgctacagtgtcaagcatttttttaaattacacctccatgcttgcatagccatcgtcctgcatnccttgctcngtaaaagttacgtccatacctaatgctgtactaatagcacgttcaaatccactgtccgtgtaaatgtcccatgtagcatcatgcacaacgttcaccataacactgtcgctcatatcgtcttcatacacagtatgtcttacctgtatgctgtccacacgcacagtatcctttcctgtgtaatcccatatgctgtccatagcaagttttacagttccttgcacatcatacattgtattagttacagtttcctgcagttccgcgtcacgctcattttcagtgtanagttttttaagtgtaagcatattgccctcgctttgcttgtttgttaatgttaactatttgtagcacatacaaaagcataatgcaagagaaaagttttgtttaaaaacaatgacttagcaaaaaaatttattttataagtcattgaaaacaaaggaaacttttttcacaaatggggttgacaaatgacccttagcttgctatattataattgaggatgggggcagtaggtccgagggaaccgaagagccgcaaacgggagggcacggagctctgaccattttttcaaaccagaaccaaaaagaaagacgacccctagggccgcctctctctgagggcaagtctatctagtactcgtctgagtaaacctctccaaagtcttcccactcctgctcccaggtgggttgcccgtcgttgtcgtcgaaactctcgtcgaactctacacgcaccccgccaccataggctaggttgtattctgtctgcatggcctcggcctcgttccgattatcgaaactgtctacgacctcgcccttccaaattaacttccacatttttgcacctctttctaactataccttactataacacggccccacagcaatgtcaaccccttttggtataagtcctcgggtcgactgaaatagcgttggagatctggtactcccgatagtctttgctatcgtcagccagctcggccatccactcgtcataggtggaatatgagcttgggaactccttgaacgaaatgttgttctccatcccaatagccgctacaaatgccacagcatcctgtagccgctctaccccacttacaatgtaggtatcgcctcccttgaatttccaataagcgttcccgctcttgaaccggccgtcctcacagtgagcgccatagttttccatgtgttgtgtgtgaactacgaattgcataatttttgccctctctaatgcgttattgtctctacagtataagaccaacacaaggagaagtcaacccctaatttaccaaaaaacggttttttgaacgacacggaaagaacacgacgagtggggtgatgatccaaactcaagtgnncaccaaactgtatagtctgaccaaaaccngaattttctcaatgttttcaaagggttagcaggctctcttagtgtagtagcatagtagagctaaccgcaagtccaaaacccctagtagccgcactatacactatagccgcaagccccaccaaaaggcccctccaaacccctcntaggcccagatctgaggccccgccaggggccgaattatccaacaaaatcaaggggttagacgcagatcttgaggcaaataaaggccctagacgggctctatcgtggtggtcactgtgaaaatcagagtaattttattacaaaaaactgtagatctatagtggaaaatttttcgagtcacggtggtgacgagaggcatagttcaaatactattcactcttaggtttatcactgatagctggtgccagtacaatataatcacgcttcttaagagtgttcttatagtgtagtgccagtctaggatttgaagttctcagcactatacgacccagtctgttgtatagtgtgaccgtacggggtagatcctttgatatttctatccatgcttcgttcatactgtatttaaccttcacctcttcacagtccctacagcggggtctagggtgtatctaggttgtgtagatacttacagcggggtcagttgtgtacggtgttagatcaagcctatccagtgtgttacatcatcacacgggtcatcacaccagctttcttgccatgcgattatttcaggatctatgggcttgttgttaaacatcagtgtagatcagggtctctacccaatcctcgtactgtgtatatctgttcacgcactacagtgagcttgtcagttcttcgctcttgcaggaagttgactacagtagtcgcagtcttttcgtcaggtatatttgattctaatcgctcgccgcgttcagtttcaatatgatatctgtaggttggcatagaactatttacggtggcagtctcagcaataaaactgtctgttttaccgcggagccgtttcacggctgttctggcttatctcctttgctcccgtctatgatgcggggacgccaacgaggtttgtccatgcctttgggttctcgtcgtatggttatgttggtggctccatcttcgtctactgatgtttcatactcaacacgatgtgtagcaatgcccagtcgttcagcagtttctaccagtatggtctgtaggtcctctgctagaacatcgtctagttgactgtcgatgtggccctgtgctagttcaaacactgtctgtatcagctcttgtgtttctctgtcaagctcatatggtcctgtgtaatccaatggttcatgtgttccttgctagnnngnnntctnnnnannnnnnnnnnnnnngtnnnccnnccnnnnnnnatnnntgnnncnntnnancacnnnnnnnncncnnnnnnnaannnnnnncngnngntnnntnntngnnnnntcnnnngnnnccnncnnnnannnnannnancnnnnnnnnannnnntnnngtngtnnnntnnnnnatgnnntggtattctacctgcacgagacgttcagctagaacatagtgggtcagtggtgtgccatcccgatctctgcagacttcataggcatcttcttctgccttttgttctgtttgtgcgatgttagtctgcttcattgtattcctcccattcagccatacgctcgtctagaccgaattcgtctacaaggtacttgggaatgtcatcgttgattgtgcctgcggttgagttggagtattcatagtagtcatcgccaccatctgaatcccaacagcctacgaaacacatccctggctcgtcatagaatgcttctagatagcacccatcaaaatcatctgcaaactgttgataggcttcaatgggtggtgcccangctgaatcaaaccaaccgtggatttcncttgtgccgtcaccattgtctgtgaactcaannnnnnctnnnnnnnctncnnnnnnnntnnnncnnnngnnnncnnnncnnnnntnnnannngtnntnnnngncnncnan

SEQ ID NO: 741 - DNA, 4000 bp, Escherichia coli
  misc_feature (769)..(769): n is a, c, g, or t
  misc_feature (954)..(955): n is a, c, g, or t
  misc_feature (979)..(979): n is a, c, g, or t
  misc_feature (1080)..(1080): n is a, c, g, or t
  misc_feature (2040)..(2040): n is a, c, g, or t
  misc_feature (2741)..(2741): n is a, c, g, or t
  misc_feature (2760)..(2760): n is a, c, g, or t
  misc_feature (2788)..(2788): n is a, c, g, or t
  misc_feature (2803)..(2803): n is a, c, g, or t
  misc_feature (2843)..(2843): n is a, c, g, or t
  misc_feature (2852)..(2852): n is a, c, g, or t
  misc_feature (2942)..(2942): n is a, c, g, or t
  misc_feature (3173)..(3173): n is a, c, g, or t
  misc_feature (3467)..(3467): n is a, c, g, or t
  misc_feature (3685)..(3685): n is a, c, g, or t
  misc_feature (3687)..(3687): n is a, c, g, or t
  misc_feature (3743)..(3743): n is a, c, g, or t
  misc_feature (3965)..(3965): n is a, c, g, or t
taattacagattgcccaatcatggcgcagccagccatgccacccatgaagccggcgaagatgttagacaggccttggccgacgcactcgcgatttttatcgctgggtgtatcggtcaggtcgtccacgatggaggcggtcatcatggactccagcaggccaaccaccgccatggtggccgagaccgggaagatgatggttagggtttcccaagtcaacggcatatcggggaacaggaagaccgggaggctgtcgggtagttctcccatgtcgccgacggtccggatgtccagcccaagggagatggacacagcggtcaggaccacgatggtgaccagcggtgaggggatgcttttcgtcagcagggggaacaggtaaatgatgcccagaccggcagcggtcatggcgtaaaccacccagctgacatcgatcagttcgggcaattgggccatgaagatcaagatggccaacgcattgacgaatccggtgatcaccgagcgcgagacgaatcgcatcaacgcaccgaggcgaagccaaccggcgatgatttgtaacagacctgtcaggatggtcgccccgagcaggtattccaagccatgcgttttgaccaacatcaccatcagaagtgccatggcacccgtggctgcagagatcatcccagggcgaccgcccatgaatgcactgacaaacgcgatacaaaacgatgcgtaaagacccaccttggggtcaacacctgcaatgatcgaaaaggcaatcgcctcagggatcanagcgagggcgacgacgaggcctgcgagcaggtcattgcgggtgttggatagccattcttggcgaagattgttcatgcgtgctttggggctgaggtgggcaaaaagcccgacccgtggtggttcgagacggtgtctcgatccatgcagaggggagggaaaggcagcgcgcgtggcgcagagaagcnnctattttaaacgcttgcgtttttnagtctccgctgagcgctgcccgcgtggccggatgcttcaagtgatccagccaccattgcagcgcccgacccgtttggccgttggcagcggcccgccaagcntaggccaggcgtgcgatgcggttcggctgctcaaccgttttggcgaccaactcaccgctggcgatgtgggggcgagccaatggctcgggcaggaaaccgcaacccagccctgcgatttgggccgccagcttcagggccatgctcggtaccgcgagggtgtcttgacccgccaaaatcccaacgctgatcgcttgcccgctggttcccgagtcggcgacgctgaccacgcgatatgcagcgcgctgcgcgtcggttaagggctcgggcgcggctgccagtgggtggtgtttcgcaacggcaaaaatgaagggcacattgcccagcggcgcatggcgaattccggcgaactgggcagtctctgagctgatgcccaaggccaagtccgattggccgctggtcagggattcagtcgtaccgctcaaggtttccacctgaagtttgatgcgcgtgggcgcattgagttggtagaaggcgtccatcaattcaagcagcggctgcttgttgatgatgtcgtcagccacgatgaccaactgcgcctcccagccggtggccacccgcttgacccgcatggccacggcggtgagctcagtgagtaagtgggcacttgcatcattgagcgcatgtccagcgggcgtcagctgcgcccgccgagagctgcgatcgagcagcagcacatcgagctgcgcttccatttgtcgtaaccggtaagtcaatgcgctggggaccagccccagcttccgcgcggcccccgccaggctgccttccgttgcgaccgttgcaagcaggtgcagattttctggggagagggcgttgcggtagttttgcatggcgatttgctgttcaaataatttgatgatagacgttaatttattaatctttattttggatgataagacctaaactgggctttctcgcccacatccaatcgggcacgcattcaggcgattcaggagttcacanatgttgcaaatcagacgcgcggctgaccgaggtcaagccaaccatggttggttaaagagccaacacacgttttcctttgcttcctattacgcgccccagttcatggggtggggtaatttgcgcgtgatcaatgaggaccgcatcgcggcgggcacggggtttggtacccatggccaccaagacatggaaatcgtcagttacgtcatctccggtaatctggcccataaagacaacatgggtaacgtgacagggattcccccgggggatgtccagcgcatgagcgcgggtacgggcgtgatgcacagcgagttcaatcacgccgaaaaccaagagacgcattttttgcaaatctggctcttgccgcacaccgctggtattcaacccagctacgagcaaaaacattttcagtctgcggtcaaacgggggcgcttgtgtttggtggcagatccagccggcgccgacggtgccgtgacgattcacagtgatgcccgcatttacagcggcctgtttgatggtgatgagtcggccacattgccgcttgattcaaaacgcaaagcttacgtccaggtcgttagaggccaggttgtcgtgggagggcacgcgctgaaacagggggatggcctttttgttgccgatgaagcggcactctcctttgccaatggtcaagacgctgaagtgctgttgtttgatctgcaggcttnagtccgatcgtcgaccccnaccagagatacagccaaatgacccccancaccacccagccagncctcgacgtgcgcccgattgcccgagtcagtgagatgccntttcacgcnttcgatgccaaaaccttcgcgcacatgttgcgcgttgagcccagcgcgttgattgaccccttcttaggcattgatgccttcaacatgccngagtgctacttcttgccccatccgcatgggggcatgagcgcgatcacgctgttgttcgaggactcacctggcggtgtgcgtaaccgcgattcgatgggcgatgactcgcacattgaggcaggggatttgcactggacgcaggcgggcaagggcatcatccatgaggagacgccctctgagattggacaggccgccgtcggattgcagatcttcgtgaacatggcaaaaganaaaaagtacatggatgccgcggtcttcaaggtgaagcgtgcggatatgccaaaaggccgcgtcgatgacgcgacggtcgtggcggttgctggtgcgctgccgggtaccgagacgcgttcgccgattgactcggatccccggtgggccaccccggtcggtctcttggatgtgacagtcgaccccaatggtcaggttcgtttgcccattccaaccgaccacaacgtgtttttcatttggcatgccggtgacttggtcgtcggtgaacaaactgtcagccagccggtttcggtgctntgggcgggtgcgacgcaatctgaggtgccattcatacagttgcaagccggtgcggcgggcctgcgtggtgtggtgtttcacggcaagcccctgaatgagcctgtctttccgcacggtccgtttaccggcaacaccaagcaagacatcgtgaattacatccaagcctatcaagacggtgccatgggcgcgcttgatccttctttttctcgtaactaacntntctaccaacctcaaccaataggactttttatggcgaacacagcagttgtttatttntcaggctacggccacacccagcgcatggccgagtttgtggctcaaggcgcccagggcaccctcattgaaatcgatgccgacgggaacatcaccgatgcgcagtgggatgtgttggacgcggcggacgcgatcatcatgggctcgccgacctacatgggcatggtcgcttggcaattcaaaaaatttgctgacctctcatcaaagcgctggtttgctggcaantggcagggcaaagttgccggtggttttaccatttc

SEQ ID NO: 742 - DNA, 4000 bp, Escherichia coli
  misc_feature (758)..(758): n is a, c, g, or t
  misc_feature (1371)..(1371): n is a, c, g, or t
accggaatgaatggttttgttgttggagtctcaggtggaatagattcagcggtaacctcaacactttgtgcaaaaacaggcaagagcgtattatgtcttgaaatgcccattaaacaagagtctagtcaagtaaatagagctcaagatcacatcaaatggttgaaagctaattttaaaaatgttaaatcatttagacttcctttggattccgtttttgaatcctttacagagattattcctacagcagaggataaagaagctcaatttttaagtttagccaatacaagagcacggcttaggatgactagcctatattattttgcagcattacatcactgtcttgttgcaggaacaggaaacaaagtagaggattttggagtaggtttttatacaaaatatggagatggaggggtggatcttagccctattgcagatcttatgaaaactgaagtttttgagatagcaaaataccttcaaataattgatgtaattcaaaatgcggcaccaactgatggcctttggggggatgatcgaacggatgaagaccaattgggagcaacttatcctgaactggaatgggccatggaaatgtatcaaaaaaacaattcgcaaagtagttttaatagccgtcaaaaagaaatttttgcaatctacaccaaacaccacctccaaaaccagcataagatgaaacctatacccgtatgtaaaatacctaaagagtttttataaataaattcttacattgcaacaacttagtncccaaatctatttctaatgatccaaatcgttcttctagatcctcatcctgttgtgcaaaaagggtttaaaacattttttaacaaaaaagatcatattaaagtacttggaactttttcaaagacccaacaacttttcgattttttacaaaaaaataccattgatatagtaatcattgagatggaattaaaagatgttagtgcagtacaaacagtcagaaaacttaaattactatatccaaatatatcgactctaatctttacctctcttagagaatctgtttatggaatttcaatattaaaggcaggggcgaaaggttttctttcaaaagaaataagtagagaaacaatgatagatgccattgaaaaagttcatcataaaggttatcacattacctctaatttcgcaaatcaaataaacaaaaatgttgaccttcatcggcctagaaatgcctacggtacactttcatcacgtgaaattgaagttctaaaatacctaattgaaggaaaaagaaatgttgaaattgcagctactctgaaaattcatcaaaaaacagtaaatacttacaaaagtaggttgatgaaaaaactcgaggtaactaattcagcagatttntatcagcaagcatttaatcttgaattaatctagagcactctgttcaactttcgtgaaagtagtttttttaaattctgatattgtattacgtcttctaaaaacagcttgtcttcttctgtagcatcaggatcttttgccgcatccattaaactttggattttttgatcaatcaaataccttctaaaggttaggattgtttcactgactagctgtcccactgcgcttttacgatctttaacaaagatatttttcttttcccaatcgtggagttgataagcctcatcagcaaacaaaatatctgttaaaatttgccccaaatgtgggtcttcttgttgaattattttctcaggttttacatcgccttccatttgaaagtgctcgatgagctgtttgtataaaatctgaaactcaggctgaattaactctacttcatcttgctgtaaatctaaaaatattttttcgtgcactttagattcgactgtcttagattcttctttcagattcccttcttcatcagcacttataaataactcatcaaaggctgcttcctggcttccgtattgtaaaagaatactaataatttgacgctctaaagaaagtattgggtttacatggcctaattttgagggtgttttttgtatgactgtttcagccccaactgtcggtgtatttatagaacgaacaggaacttttttcttacttttttcctgggcaagggcattaaacaatacagcctcagacacatccatagtactagcacattgctttatataaatctcctgtttaatagggtcagggatttttgaaatactttgcaccaactcacgaaccgtatttgatttttttacaggatcattatcagcctcttgaagtagaaggtctgttttaaattgaataaaatccttagcttcattttttaaatactctttaatttcttcaagtgtatgagactttgcaaaactatccggatcttctccaacagggaatgtgcaaactttaacattcattccttgttcaagaatcaaatcaatccctctaattgcagctcgaagaccagcagcatctccatcaaataaaacaacaatatttgaggtgagtcttctgattaatctaatttgctctgaagtgagtgcagtacctgaagatgaaactacattctcaaccccttgttgatacatttgaatgacatcggtatatccttctaccaaataacaaacatcttcttttgcaatggctttcttagcttcatacatcccatacaacaccatgcttttatggtagacgtcactttcgggagagttgagatattttgcagtttttgctgtggctgacaagattctacctccaaagccctgaactcttcctgccatactccgaataggaaaaataactcgccctcgaaatcggtcaacaaaaccacgttcatttttgattactaaaccggtttcttctagtaaattttctgcgtaccctgctttagttgcttttttataaaaatggtctctttgttctgctgcataacccaaactgaaaaaacgaatagattcatccgtaaaaccgcgctccctgaagtaacttaaaccaatagccattccttcagaagactcccaaaggtcttgagcaaaactgtcttgggcaaactggtttattaagtatagactttcacgagtattcgctttttctttttcttcatcggattgttccgtttcttcaatctcaatattatacctttttgctaaaaaacgaattgcttcaggataggtaaaatgctcgtgttccatcaaaaaagcaacaacattacctcctttaccactactaaagtctttccaaatctgttttaccggggaaaccataaaactgggagtacgctcttgagaaaaaggacttaagcccttgaaattactgccagacttttttaataccacaaaatcgccaatcacctcctctactcgagcggtttcatatacttgatcaatggtgtttcttgtaatcaaaaattagtgttttgataaatttaaaacattcttggcaaatgctttatgttgagagtgaagtctttaaatttttcgttcaataacgtaattgagcatcaattctaaagcatcacgatattcactttttggaaactcaaataaaatttgtaaagcttcttttctgtaggtctccattttttttattgcaaaatccagccctccgttttctttcactgtggcaattaattctttgaccttagctttgtctttattcttattttttacaatgtttattagtgcttttttctcagctttagaaacaacgttcaaagtgtaaataagtggtagggtcatcttttgttctttgatgtcaatacctgtaggctttcctatcttttgatccccataatcaaaaagatcatctttaatttgaaatgccataccaagaacctcaccaaaatggtgcattttttcaacttcttcaacagttgcatttaccgactgtgcacctagagcacaacaggatgctaacagtgtagctgttttttgacgtattatttcataataaattgtttctgtgatgtcaagatttctagctttttcaatttgaagtaattccccttggctcatttctctaactgcaaccgaaataattt

SEQ ID NO: 743 - DNA, 4000 bp, Escherichia coli
  misc_feature (2894)..(2897): n is a, c, g, or t
  misc_feature (2902)..(2902): n is a, c, g, or t
  misc_feature (2904)..(2904): n is a, c, g, or t
  misc_feature (2906)..(2906): n is a, c, g, or t
  misc_feature (2908)..(2911): n is a, c, g, or t
  misc_feature (2916)..(2916): n is a, c, g, or t
  misc_feature (2918)..(2918): n is a, c, g, or t
  misc_feature (2920)..(2921): n is a, c, g, or t
  misc_feature (2924)..(2924): n is a, c, g, or t
  misc_feature (2928)..(2928): n is a, c, g, or t
  misc_feature (2930)..(2930): n is a, c, g, or t
  misc_feature (2946)..(2946): n is a, c, g, or t
  misc_feature (2957)..(2958): n is a, c, g, or t
  misc_feature (2967)..(2968): n is a, c, g, or t
  misc_feature (2971)..(2985): n is a, c, g, or t
  misc_feature (2990)..(2991): n is a, c, g, or t
  misc_feature (2993)..(2996): n is a, c, g, or t
  misc_feature (2998)..(2999): n is a, c, g, or t
  misc_feature (3004)..(3004): n is a, c, g, or t
  misc_feature (3006)..(3006): n is a, c, g, or t
  misc_feature (3011)..(3011): n is a, c, g, or t
  misc_feature (3014)..(3014): n is a, c, g, or t
  misc_feature (3029)..(3029): n is a, c, g, or t
  misc_feature (3031)..(3036): n is a, c, g, or t
  misc_feature (3038)..(3040): n is a, c, g, or t
  misc_feature (3043)..(3044): n is a, c, g, or t
  misc_feature (3046)..(3046): n is a, c, g, or t
  misc_feature (3048)..(3049): n is a, c, g, or t
  misc_feature (3053)..(3054): n is a, c, g, or t
  misc_feature (3056)..(3058): n is a, c, g, or t
  misc_feature (3060)..(3062): n is a, c, g, or t
  misc_feature (3064)..(3064): n is a, c, g, or t
  misc_feature (3066)..(3066): n is a, c, g, or t
  misc_feature (3074)..(3078): n is a, c, g, or t
  misc_feature (3080)..(3080): n is a, c, g, or t
  misc_feature (3082)..(3082): n is a, c, g, or t
  misc_feature (3084)..(3085): n is a, c, g, or t
  misc_feature (3090)..(3090): n is a, c, g, or t
  misc_feature (3094)..(3094): n is a, c, g, or t
  misc_feature (3103)..(3103): n is a, c, g, or t
  misc_feature (3107)..(3107): n is a, c, g, or t
  misc_feature (3109)..(3109): n is a, c, g, or t
  misc_feature (3118)..(3118): n is a, c, g, or t
  misc_feature (3121)..(3121): n is a, c, g, or t
  misc_feature (3125)..(3125): n is a, c, g, or t
  misc_feature (3132)..(3132): n is a, c, g, or t
  misc_feature (3135)..(3135): n is a, c, g, or t
  misc_feature (3138)..(3138): n is a, c, g, or t
  misc_feature (3140)..(3140): n is a, c, g, or t
  misc_feature (3143)..(3143): n is a, c, g, or t
  misc_feature (3146)..(3147): n is a, c, g, or t
  misc_feature (3149)..(3149): n is a, c, g, or t
  misc_feature (3151)..(3157): n is a, c, g, or t
  misc_feature (3160)..(3161): n is a, c, g, or t
  misc_feature (3165)..(3167): n is a, c, g, or t
  misc_feature (3169)..(3170): n is a, c, g, or t
  misc_feature (3172)..(3172): n is a, c, g, or t
  misc_feature (3176)..(3177): n is a, c, g, or t
  misc_feature (3179)..(3180): n is a, c, g, or t
  misc_feature (3182)..(3183): n is a, c, g, or t
  misc_feature (3185)..(3188): n is a, c, g, or t
  misc_feature (3191)..(3192): n is a, c, g, or t
  misc_feature (3194)..(3194): n is a, c, g, or t
  misc_feature (3196)..(3199): n is a, c, g, or t
  misc_feature (3203)..(3203): n is a, c, g, or t
  misc_feature (3205)..(3206): n is a, c, g, or t
  misc_feature (3211)..(3211): n is a, c, g, or t
  misc_feature (3214)..(3215): n is a, c, g, or t
  misc_feature (3217)..(3218): n is a, c, g, or t
  misc_feature (3220)..(3220): n is a, c, g, or t
  misc_feature (3224)..(3224): n is a, c, g, or t
  misc_feature (3226)..(3226): n is a, c, g, or t
  misc_feature (3230)..(3230): n is a, c, g, or t
  misc_feature (3233)..(3234): n is a, c, g, or t
  misc_feature (3236)..(3239): n is a, c, g, or t
  misc_feature (3242)..(3242): n is a, c, g, or t
  misc_feature (3248)..(3248): n is a, c, g, or t
  misc_feature (3254)..(3256): n is a, c, g, or t
  misc_feature (3260)..(3261): n is a, c, g, or t
  misc_feature (3269)..(3269): n is a, c, g, or t
  misc_feature (3275)..(3275): n is a, c, g, or t
  misc_feature (3279)..(3279): n is a, c, g, or t
  misc_feature (3284)..(3286): n is a, c, g, or t
  misc_feature (3289)..(3296): n is a, c, g, or t
  misc_feature (3298)..(3298): n is a, c, g, or t
  misc_feature (3302)..(3302): n is a, c, g, or t
  misc_feature (3304)..(3307): n is a, c, g, or t
  misc_feature (3309)..(3309): n is a, c, g, or t
  misc_feature (3314)..(3314): n is a, c, g, or t
  misc_feature (3317)..(3317): n is a, c, g, or t
  misc_feature (3322)..(3323): n is a, c, g, or t
  misc_feature (3325)..(3329): n is a, c, g, or t
  misc_feature (3335)..(3335): n is a, c, g, or t
  misc_feature (3338)..(3338): n is a, c, g, or t
  misc_feature (3344)..(3344): n is a, c, g, or t
  misc_feature (3347)..(3350): n is a, c, g, or t
  misc_feature (3352)..(3352): n is a, c, g, or t
  misc_feature (3354)..(3357): n is a, c, g, or t
  misc_feature (3359)..(3359): n is a, c, g, or t
  misc_feature (3363)..(3364): n is a, c, g, or t
  misc_feature (3368)..(3368): n is a, c, g, or t
  misc_feature (3374)..(3374): n is a, c, g, or t
  misc_feature (3376)..(3377): n is a, c, g, or t
  misc_feature (3383)..(3386): n is a, c, g, or t
  misc_feature (3388)..(3388): n is a, c, g, or t
  misc_feature (3390)..(3390): n is a, c, g, or t
  misc_feature (3392)..(3392): n is a, c, g, or t
  misc_feature (3394)..(3394): n is a, c, g, or t
  misc_feature (3397)..(3398): n is a, c, g, or t
  misc_feature (3403)..(3403): n is a, c, g, or t
  misc_feature (3407)..(3407): n is a, c, g, or t
  misc_feature (3411)..(3411): n is a, c, g, or t
  misc_feature (3414)..(3414): n is a, c, g, or t
  misc_feature (3416)..(3416): n is a, c, g, or t
  misc_feature (3418)..(3419): n is a, c, g, or t
  misc_feature (3422)..(3422): n is a, c, g, or t
  misc_feature (3426)..(3426): n is a, c, g, or t
  misc_feature (3428)..(3429): n is a, c, g, or t
  misc_feature (3431)..(3433): n is a, c, g, or t
  misc_feature (3436)..(3437): n is a, c, g, or t
  misc_feature (3443)..(3444): n is a, c, g, or t
  misc_feature (3450)..(3453): n is a, c, g, or t
  misc_feature (3460)..(3460): n is a, c, g, or t
  misc_feature (3468)..(3468): n is a, c, g, or t
  misc_feature (3470)..(3470): n is a, c, g, or t
  misc_feature (3472)..(3472): n is a, c, g, or t
  misc_feature (3474)..(3474): n is a, c, g, or t
  misc_feature (3476)..(3477): n is a, c, g, or t
  misc_feature (3479)..(3480): n is a, c, g, or t
  misc_feature (3483)..(3483): n is a, c, g, or t
  misc_feature (3487)..(3491): n is a, c, g, or t
  misc_feature (3495)..(3496): n is a, c, g, or t
  misc_feature (3498)..(3500): n is a, c, g, or t
  misc_feature (3502)..(3503): n is a, c, g, or t
  misc_feature (3505)..(3505): n is a, c, g, or t
  misc_feature (3507)..(3511): n is a, c, g, or t
  misc_feature (3515)..(3516): n is a, c, g, or t
  misc_feature (3518)..(3518): n is a, c, g, or t
  misc_feature (3520)..(3521): n is a, c, g, or t
  misc_feature (3526)..(3526): n is a, c, g, or t
  misc_feature (3533)..(3533): n is a, c, g, or t
  misc_feature (3535)..(3536): n is a, c, g, or t
  misc_feature (3540)..(3540): n is a, c, g, or t
  misc_feature (3542)..(3542): n is a, c, g, or t
  misc_feature (3548)..(3551): n is a, c, g, or t
  misc_feature (3560)..(3560): n is a, c, g, or t
  misc_feature (3563)..(3563): n is a, c, g, or t
  misc_feature (3567)..(3567): n is a, c, g, or t
  misc_feature (3570)..(3571): n is a, c, g, or t
  misc_feature (3578)..(3578): n is a, c, g, or t
  misc_feature (3580)..(3580): n is a, c, g, or t
  misc_feature (3584)..(3584): n is a, c, g, or t
  misc_feature (3593)..(3593): n is a, c, g, or t
  misc_feature (3595)..(3595): n is a, c, g, or t
  misc_feature (3599)..(3601): n is a, c, g, or t
  misc_feature (3604)..(3605): n is a, c, g, or t
  misc_feature (3607)..(3607): n is a, c, g, or t
  misc_feature (3610)..(3611): n is a, c, g, or t
  misc_feature (3621)..(3621): n is a, c, g, or t
  misc_feature (3626)..(3626): n is a, c, g, or t
  misc_feature (3629)..(3632): n is a, c, g, or t
  misc_feature (3638)..(3638): n is a, c, g, or t
  misc_feature (3641)..(3641): n is a, c, g, or t
  misc_feature (3645)..(3645): n is a, c, g, or t
  misc_feature (3648)..(3649): n is a, c, g, or t
  misc_feature (3651)..(3653): n is a, c, g, or t
  misc_feature (3655)..(3655): n is a, c, g, or t
  misc_feature (3657)..(3657): n is a, c, g, or t
  misc_feature (3659)..(3659): n is a, c, g, or t
  misc_feature (3664)..(3665): n is a, c, g, or t
  misc_feature (3668)..(3669): n is a, c, g, or t
  misc_feature (3674)..(3678): n is a, c, g, or t
  misc_feature (3683)..(3683): n is a, c, g, or t
  misc_feature (3687)..(3687): n is a, c, g, or t
  misc_feature (3690)..(3690): n is a, c, g, or t
  misc_feature (3692)..(3692): n is a, c, g, or t
  misc_feature (3700)..(3701): n is a, c, g, or t
  misc_feature (3704)..(3704): n is a, c, g, or t
  misc_feature (3706)..(3706): n is a, c, g, or t
  misc_feature (3709)..(3709): n is a, c, g, or t
  misc_feature (3719)..(3719): n is a, c, g, or t
  misc_feature (3721)..(3721): n is a, c, g, or t
  misc_feature (3723)..(3723): n is a, c, g, or t
  misc_feature (3727)..(3727): n is a, c, g, or t
  misc_feature (3729)..(3730): n is a, c, g, or t
  misc_feature (3732)..(3732): n is a, c, g, or t
  misc_feature (3742)..(3743): n is a, c, g, or t
  misc_feature (3747)..(3747): n is a, c, g, or t
  misc_feature (3749)..(3749): n is a, c, g, or t
  misc_feature (3752)..(3752): n is a, c, g, or t
  misc_feature (3755)..(3756): n is a, c, g, or t
  misc_feature (3758)..(3758): n is a, c, g, or t
  misc_feature (3761)..(3761): n is a, c, g, or t
  misc_feature (3763)..(3763): n is a, c, g, or t
  misc_feature (3766)..(3766): n is a, c, g, or t
  misc_feature (3768)..(3769): n is a, c, g, or t
  misc_feature (3772)..(3772): n is a, c, g, or t
  misc_feature (3775)..(3775): n is a, c, g, or t
  misc_feature (3778)..(3778): n is a, c, g, or t
  misc_feature (3780)..(3783): n is a, c, g, or t
  misc_feature (3785)..(3785): n is a, c, g, or t
  misc_feature (3787)..(3787): n is a, c, g, or t
  misc_feature (3789)..(3789): n is a, c, g, or t
  misc_feature (3803)..(3803): n is a, c, g, or t
  misc_feature (3805)..(3805): n is a, c, g, or t
  misc_feature (3807)..(3807): n is a, c, g, or t
  misc_feature (3809)..(3809): n is a, c, g, or t
  misc_feature (3811)..(3812): n is a, c, g, or t
  misc_feature (3819)..(3819): n is a, c, g, or t
  misc_feature (3821)..(3821): n is a, c, g, or t
  misc_feature (3824)..(3825): n is a, c, g, or t
  misc_feature (3829)..(3829): n is a, c, g, or t
  misc_feature (3843)..(3843): n is a, c, g, or t
  misc_feature (3848)..(3848): n is a, c, g, or t
  misc_feature (3852)..(3854): n is a, c, g, or t
  misc_feature (3857)..(3858): n is a, c, g, or t
  misc_feature (3875)..(3876): n is a, c, g, or t
  misc_feature (3880)..(3882): n is a, c, g, or t
  misc_feature (3888)..(3888): n is a, c, g, or t
  misc_feature (3890)..(3890): n is a, c, g, or t
  misc_feature (3896)..(3896): n is a, c, g, or t
  misc_feature (3898)..(3898): n is a, c, g, or t
  misc_feature (3901)..(3902): n is a, c, g, or t
  misc_feature (3906)..(3906): n is a, c, g, or t
  misc_feature (3908)..(3909): n is a, c, g, or t
  misc_feature (3911)..(3912): n is a, c, g, or t
  misc_feature (3914)..(3916): n is a, c, g, or t
  misc_feature (3923)..(3923): n is a, c, g, or t
  misc_feature (3925)..(3925): n is a, c, g, or t
  misc_feature (3930)..(3930): n is a, c, g, or t
  misc_feature (3938)..(3939): n is a, c, g, or t
  misc_feature (3942)..(3943): n is a, c, g, or t
  misc_feature (3946)..(3946): n is a, c, g, or t
  misc_feature (3948)..(3949): n is a, c, g, or t
  misc_feature (3956)..(3956): n is a, c, g, or t
  misc_feature (3958)..(3958): n is a, c, g, or t
  misc_feature (3965)..(3965): n is a, c, g, or t
  misc_feature (3974)..(3974): n is a, c, g, or t
  misc_feature (3979)..(3979): n is a, c, g, or t
  misc_feature (3983)..(3983): n is a, c, g, or t
  misc_feature (3986)..(3986): n is a, c, g, or t
  misc_feature (3989)..(3989): n is a, c, g, or t
  misc_feature (3991)..(3992): n is a, c, g, or t
  misc_feature (3994)..(3994): n is a, c, g, or t
gctgattgctatcgaaccctcgtcgataagtttgatgtcatcgcgccaaacgaaggcgatcggttggcgatattaggcgacgtttggcgcgtcgtgcagaaatggactcacgtggaaccgtatttgcgcgtcgccgagcggtttttgctctacgtcatcaagtatctcgcgcaaggtgaacttgagacgttgatgaaggacgttgcgagacacgtgcacgcacacttagcccaagctaaagagcgcgagccgacgaaatcggccgaattacccgccgaggcgatgcgctgcgttgagcgggcgttacgcgtcgtcaccgatcaatttcgcgacgtcgattacctcgtctccttgaagtggtacgtgtacctcggcgaaatattaggcggtgaagccaaggtgaaatttagcgccgctcttctgaagtgtgggtcgagcgctggatccatctcggatcccatgtgtttgcacaccctgctagaagccgcgagaacggtacacgacgatatcgacggcatgagctcggaagaatcgcgcgccgaagctgaaagcttggtcgtggacttcatcaacaacgtcagctttgccggtgacttcgaggcgcacttgaacttccttgtcaccgctcgaagcgcgttcgcaaacttggacatggcgcaagaaattttagtataccacgcgatttctctgatgacgagtgtgtacgagcgcgtgggcgtcgaacacacgaacaagacgaaagccttcgtcaacgcctgcacggcgtactgtcaaatcacgatacccagtgtgcgtggagtcaatgttcgcctacaactgttcatgctcaccgcgcaagcggcgatcgtgcacggattgattcagcaagtggatggtctgattcgcagcgcggtgacggatgcgcaagagagcggcggcgaaaccgccgtgggcggatggatcgatcttcccaccgatcgcgccggcgctgagatgctagatttcgttcggcgatgcagtgctcttctcgtggtacagccagggaatttagaaaaaggagcattcttggtcttccgcgggttgatgaaagtcgtggaggatttcgattgggagccgtcgagcgccgacgaagttcgcgcgtacgtctcgttgatccccatgatcactgccatggcgcaagagacgataccctttaaaatcgacggcttacagtccaacgacgtgctattcgccggcgaggaggcgtacgtggaagaagccaccgagctcgcgcacgaactcatccagcgagcgacggatttagccggcaacgaatcatcgctcgcagacgacgacggcgaggatgaccaagccgagaccacgcacaagtctcgcgcgcgtgaattcgcgcgcgtcaacctcgagctcgcggaggtgatcgcgatgacgtgcaaaccttcgccggagatgctcgcgctcgccgccggcgtcgtcgatcgagcgcgacgcctcttgcccccagacgtcgtcgacccggtcgcggcgtacgtccaccgactcctcgacgacgcgtcgatggacgtcgacgtcgacgcgcctcgcgcgcgcgagtagcccatcgcgtgtatttatagtcgtattcgccacacgccgcctcgcgcgcgatgcgcgtcctcgtcctcgtcctcgccctcgtcctcccgcgcgccgcgctcggcctcgagttcgacccggcgtcgtggatgaacgccacgcgcgatcgcgcgctcggcgcgctcacgcttcccggctcgcacgacagcgcgacgcagtacctgagtccaaagctccaaccgggacgcgcgggacagcttccgcgctgggtcgacgacgccgtccggctcgccgaatcgatcggggtgcccgcggatcaactcgtgcgtcggtgggcgcgcgcgcagtccgcgcgcgtgggcgcgcagttgcgactgggggcgcggtacgtcgacttgcgaagcggttgggacggcgacgagggcgtctggcggacccaccacgcgctcgagggacaggcggtggatgaaatcttggaggaagtgaaagtgtttctggtggaacaaccttcggaggtggtgatcgtggagttgagtcacttttacggcgatccgagcgagagcgcggtggagcgcttggcgacggcggcgacggaaatcttcggagacatgctcgcgccgtatccaggagacgcgcgcgcggcgctgtacgacgcgcagctcgggaaagattacgtcgacgtcaatcatcgcgcgatcgtcgtgttcgaggacgcgaacgtcggcaagagattcaaactgtggccccgcgagacgctgacgaatacgtacgccgattccgacgacgcccgcgcgatggccgccttcaaccgcgacgtcgtcgcggccttcaacgagaaatcattccgcgacgacgcactcttaaagctcagctggacgctcaccccacaagcgtcgacggtcgttcgatcgttgaacatctttgagaagaatccaaagtcgcttctcgagctcgcgtcttcgcgcgcgaacccgccgttgcgcgatttcgccgccgacgccgcgctccacgcgtgttcgctcgcccacatcgtcgtcgtcgatgatttcgaccattcatccgtcgtggacgtcgtcttagcctccaacgtccacggcatgttcccgaaaggcgcgtgcgcgtggtccgccgccgcgctcgcctccgagcgctgaacgcgccgaactttagattgtcgcaccttcccctagtcacccaagcacgaacgattgacgagtttcaacgctcatcgatggacgcatcgagcgtagcccatcgcgatcgacatcacgcatcgacgcgctaggcccgatcgagcgcggtttactttgcgcggctcgcggcggctccgcaataatgattgnnnngtgtngngncnnnncgcgngncnncgngccncngcgccgcgccgcgccncgcccggcgcnncgcgcgcgnngannnnnnnnnnnnnnnacgannannnncnngtccncnccgcncgnccgcgcgcgcgcgcncnnnnnngnnnccnnananncgcnnannncnnncnancacgccgnnnnncncncnncgcgncgcncgcgcgcgngcgngngcgcgcccntcncgcncgcgctntcntgngngtnctnncncnnnnnnncgnngacnnntnntnacanngnngnntnnnncanngngnnnngagngnngcgcncgnngnngngggngngggngtnngnnnncgncggcgntcgccnnnagtnngcgcgagngtgcgngagngcgtnnncgnnnnnnnngngcgncnnnnangcgcncanatcgnngnnnnnggcgcnggngagcgnatnnnngngnnnntncgannggangcgcgngnnggcgannnngngngngncgnnggagncgangcgnganangnngtngtgngnnannncgnnggaggnntggcgnnnngcggagngcgcgggngngntntnncnnaanaaannnnnaaannannngnntntnnnnncganngngnncaaanacgcgcngnngagngntgtgtnnnngtttgcgtncgngganggnngcgccgngntggngggcgcgcncncgcnnncgnntnaanncgcgttgggngtgtngannnntagcgncangtgnaanncnnngngntngacgnncgnngcgannnnngcggngagnggngnggacgcgnnggngnacncgtgcccgcncnantgtngnngnaaattttccnngggnangcnctnngngcngngcncnnccnagngcnannnnancnangactctttcttcgncntncntnncgacgcntncgnngacnttctcaaagccttnccccncgcnnncgnnggttcgagcgcgctcannaacnnnttcccncngtggcncntcnngccncnntnnannncaaagangnccgcnacgggcgnngannccncnngaccgcngncgctcgntctcccgcnctcgngcgncgngangnncnacgccc

SEQ ID NO: 744 - DNA, 4000 bp, Escherichia coli
  misc_feature (881)..(881): n is a, c, g, or t
  misc_feature (1169)..(1169): n is a, c, g, or t
  misc_feature (1990)..(1990): n is a, c, g, or t
  misc_feature (2047)..(2047): n is a, c, g, or t
  misc_feature (2156)..(2156): n is a, c, g, or t
  misc_feature (2237)..(2237): n is a, c, g, or t
  misc_feature (2710)..(2710): n is a, c, g, or t
  misc_feature (2723)..(2723): n is a, c, g, or t
  misc_feature (2742)..(2742): n is a, c, g, or t
  misc_feature (2750)..(2750): n is a, c, g, or t
  misc_feature (2757)..(2757): n is a, c, g, or t
  misc_feature (2759)..(2759): n is a, c, g, or t
  misc_feature (2762)..(2762): n is a, c, g, or t
  misc_feature (2767)..(2768): n is a, c, g, or t
  misc_feature (2771)..(2771): n is a, c, g, or t
  misc_feature (2791)..(2791): n is a, c, g, or t
  misc_feature (2797)..(2797): n is a, c, g, or t
  misc_feature (2804)..(2804): n is a, c, g, or t
  misc_feature (2811)..(2811): n is a, c, g, or t
  misc_feature (2828)..(2828): n is a, c, g, or t
  misc_feature (2849)..(2849): n is a, c, g, or t
  misc_feature (2902)..(2902): n is a, c, g, or t
  misc_feature (2961)..(2961): n is a, c, g, or t
  misc_feature (2993)..(2993): n is a, c, g, or t
  misc_feature (3065)..(3065): n is a, c, g, or t
  misc_feature (3116)..(3116): n is a, c, g, or t
  misc_feature (3125)..(3125): n is a, c, g, or t
  misc_feature (3163)..(3163): n is a, c, g, or t
  misc_feature (3188)..(3190): n is a, c, g, or t
  misc_feature (3192)..(3192): n is a, c, g, or t
  misc_feature (3209)..(3209): n is a, c, g, or t
  misc_feature (3257)..(3257): n is a, c, g, or t
  misc_feature (3279)..(3279): n is a, c, g, or t
  misc_feature (3316)..(3316): n is a, c, g, or t
  misc_feature (3320)..(3320): n is a, c, g, or t
  misc_feature (3324)..(3324): n is a, c, g, or t
  misc_feature (3326)..(3326): n is a, c, g, or t
  misc_feature (3341)..(3341): n is a, c, g, or t
  misc_feature (3344)..(3344): n is a, c, g, or t
  misc_feature (3363)..(3364): n is a, c, g, or t
  misc_feature (3401)..(3401): n is a, c, g, or t
  misc_feature (3722)..(3722): n is a, c, g, or t
  misc_feature (3728)..(3728): n is a, c, g, or t
  misc_feature (3820)..(3820): n is a, c, g, or t
  misc_feature (3900)..(3900): n is a, c, g, or t
tgctgagatataaaaccaaccgcaacctgaaactcagaggttttgttttttccagtgtaggtgaaaattttaataatttctattataacaacttaccattttccctcaccgaagctcagaaaagagtaatgaaagagataaggaaagatcttggttcaggtaaacagatgaaccggttgcttcagggagatgttggcagcggtaaaacacttgttgcattaatgagtatgcttattgccttagacaatggataccaggcttgcattatggctcctaccgagattcttgcaaaccagcattatcagacaattaccaaattactcgatggaattgatattaaaatatcactgcttacaggttcctcaaaaaaatcctcccgtaaatcaatagctgagtctttgctcgacaggtcactgaatattttaatcgggacacatgccctgcttgaagaaaatgttctgttcgcaaatcttggtttagtaattattgatgaacagcaccggttcggagttgagcaaagatcaaggctctggcagaaaaatctcaatccgccccatatccttgtaatgacagctactcctattcccagaacgcttgcaatgacactttatggtgatctcgatgtatcggtaattgatgaactgccaccgggcagagttccaataaaaacaatgcattttactgattcagaaagaaataaggtctttggtttcatccgaaatcagatagccgagcatcgtcagatttatattgtatatcctcttatcaaagagtctgaaaaaatggactataaagatcttgaggatggctgggacaccatttcaagagtattccctgctcctaaatattgcattagcattgttcatggaaagatgactccntcaaataaagaaatgtcgatgaagctattcaaggatggcgtggcgcacatactgatagcaacaacagttatcgaggtaggtgttgacatacctaatgcgacagtaatgattattgagagtgctgaaagattcggtctgtcacagttgcaccaattaagaggacgggtaggcagaggtgctgatcagtcatattgcatccttatgagttcagataaactttcaagagaagcggcaaagagaattgaagtaatgatccggacgaatgatggttttgaaattgctgagacngatcttcaactcagaggaccaggcgatattgaaggaactcttcagagcggtattccctttgaccttaaaattgctgatctcggaaaagacgggcaattaattgagtacgtcagacatattgccgaggagatacttgaccaggaccctttactggagaataatcaaaaccttatattcaaatcagagttaaaaaggcttttcagtcagagacaatcgtggagcaatattagctgaagatatgacattaactgactactacgaaatattaggtttacctctcaactcttcaattgaagagataaaaaaggcttatcggaaaaaagcgcgtctttatcaccccgatattaatccggctccggatgccaaggaccattttatcagcttaaccgaagcttacgaatttttaattgcaaatcatgagaaggttaaatctgacgatcaggcttataatcaggctatggaagattggagaaaatacagacaggacaggtcacgaaaacgagctactgtttatgcccggacatcctacggaacatttaagaatacaaagttttataaaacaacaaggatttttgatggcacaacaattatattcagttttgtgatctcaattatggtgctgatttgtactgtatatggctatatcttcagactaaaacatccgatcttcggactggaaaaaccatcagttttttctttcataatgcttctcctgctcgggatggtcttttttgttatctcctttatatatcttaaagcatattgggagacctccaaaaaacgaaaaaacaaatcctagttaaatggcatggtttttggantaattaagttcataacccggacttaacctgattggatttttaatgattcaattatanttgtccatctaatgcagggagtatgaaaaaaaataatttcaaaacagtagttgcatttttagtcatcattcctttgactcttttatcctgtaacaaacaatctgtaganactttcccgaccgatcctgttccgataaaccttacggcagatcagatcgcccttatctcgtctgaaaattcttttgcactngatatcttcaaaaaagttatcgaaagctccactgaatcagagaatgtcatcatctcccctctcagcatctcatcggcactttcgatgacacttaacggtgccaacggtacaacacgcgatgcaatgcttgctactttaggaatgaatggattgacccccgaaaaaatcaataattcatataaagatctcacagaagcactccttaatgttgataaacgggtattgatctcaatagccaattcagtatggacagagaagaattttgtagttaaaaagccatttaccgatgtccttactcaatattataatgctgaatcaaagtcatttgatatcacagatcctctggtacctaatcaaattaacagctggattgagagcaaaacaaacgggttgataaagaatatgattgacaaacttgatcaaagcactgtaatgcttctgattaacgccatatatttcaaaggaaagtgganttcccagtttganaaagataaaactgtacagnggtcattntataaancnggnggagnnacngcccaggtacctatgatganacaganttctgantttaagntttataacggggaaggntttactttagctgagtttccntatggtcaggccaattttgttatggatgtcctgcttcccgatgctgacaatgnaataaaaagtattattccactgatcaacgataacagtttcaaaggatggatcagtcagntgagtgaaagaaaaaccgacctttcatttccnaaatttaaatatgggtataaaaaggatcttaatgatatattgaccgatatgggaatgggaattgcatttacngataatgccgatttctcaaatatatctgatatggatcttcttataagtatngttaaacancaggcatttattgaaacgaatgaagaaggttcagaagntgctgctgcaacaattgtcggtatnnntnctacttcaatgccggcnggtccttatattctgaacattgaccatccgtttttgtacataatcagngagacatcaacaaattccattntatttatgggcagggtgggtgatccgctggctaattnaagngacnancaggacttaacatcnttnaatgccacgccatggcgtnncactacaatcaaaatcacggtaactgcagggtcatgncatggcatgacctcatacttttgataagatcatttaagtttgataaaattgaaccggacatcaagaaccgaagcaaagtattctcccctttcaaggatgtcatcgtcaccatcctcataataccagttaaatacaaatttctttcgctttaaagtgacgtaggtaatcttctgcaaaagatgtataaacacttttgcacttgcgctgttaaaatattcaagactcagatccacactcgttacttcagccggagcacttatatattcgctgatccaatcttctacaggttcaaaaaaatcagtcacattctcatgtattgancgtccnttaataagaattatcccttcaggatttaacatgatctcaggtgtattcttcgttggcgaaatcctcaactcctccatctcatataatttgtnaccaaattacgaattttataacaaaaaacataaagtatcaattgaatctatcaaaaaaaggatcatcaaagttgcaaacngatatattccttttcttaagctcaatctgatgtatcatattcactataaaagtattaacaggaactggcacaccggatatgttgccgtttttaataatat

SEQ ID NO: 745 - DNA, 4000 bp, Escherichia coli
  misc_feature (361)..(361): n is a, c, g, or t
  misc_feature (434)..(434): n is a, c, g, or t
  misc_feature (506)..(506): n is a, c, g, or t
  misc_feature (1346)..(1346): n is a, c, g, or t
  misc_feature (1466)..(1466): n is a, c, g, or t
  misc_feature (1547)..(1547): n is a, c, g, or t
  misc_feature (1985)..(1985): n is a, c, g, or t
  misc_feature (1988)..(1988): n is a, c, g, or t
  misc_feature (1991)..(1991): n is a, c, g, or t
cttgccgttattaatagcagtttcgactagctccttagcaagtccaaaccctccaataagctcaagtactacatcaatgtcaggatggttgacaacctcaaatgggtcttccgttaatttaatattagaggtgtcacaaattcgtttttttgtgacgtctcgaacgcctgctatgacgagttctatttgaccaccagtacgtctttctatagacgcactatttttttgtaatacattaacaacaccaccgccaacagtacctagaccaagaattccaactttcattattgtattttataaattcgaatgcgtcattataccaatcagtgaaaaagactcactacaaatgctatttaaaaangttacaagggttgttgagttttattaactataaatccaatatgtaatattactttaagccgcccatacatatntacttaagctcaaggaaatcgtcaattccgtagtgcgaaccttctcgtcctaagccggactctttgaccccnccaaaaggggcaacttcatttgatatgacgccctcatttactcctaccatgccatattctaaagcttctgaaacacgccatattcgattcacattgcttgtgtagaagtatgaggcaagtccaaattcagtatcattcgcaagttttatcgcctcatcttcagttttgaacttaaagactggagcaagaggtccaaaagtctcctctgaagccattttcatattggtgtcaacgtttccaataactgttggctcaaacatggttcctcccttctcatgaggttttccacctgctacaatgactgcaccatgatctactgcatccgctaagtgctctttaaccttgtcaagtgctttaaagctgatgagaggcccctgattaacgccttcatccattccattgccaacattaagggttttaacggcttcacccagtttcttaacaaacttatcataaataccctcttgaacaataaaacgatttgtgcaaacacaggtttgtccagtatttctaaattttgacattaatgcgcctgagacagctgagtctagatcagcatcatcgaaaacaataaatggggcattacctccaagttccatagaaacttttttcattgtatcggcacagttgcgcgtcaagattttgccaacagcggtagaccctgtaaacgagagcttgcggacgatcgaactatccgttaacgcgtttccaatttcacttgctttagttcccacaactacattcaaaacaccttttgggatgcctgcttggtctgctaactcagcaattgctagagctgaaagtggggtttctgaagcaggcttaatgactactgggcancctgcagctaaagcaggagcacactttctggtaatcattgcaattgggaaattccaaggcgtaattgaggccacaacaccaatgggctgttttataacaagaattcttctgtcatttgcnggcgttgggataatgtcaccataggttcttttaccttcttctgcaaaccactcaataaatgatgcaccatagccaacttcncctctggcttcagctaatggcttaccttgttccgctgtcattaatatagcaagatcttcttgattttccataattaggtcaaaccatttttttaagattgcggctctttcttttgcagttttactgcgccaatttggccaagcaatattggctgcttcaatggcatcattggtttcttttttacccatttcaggaagcgtactgattacttcatttgtataagcgttagtaacctcaaagcgagattcagtgttatcgccaatccactcaccattgatgtagccatgtgcttttagaagtttagtattattgagcataattcatccttatttttagattgatattttaagaggctaattataatagtctattgagttgtgtattcttaagtttatgtgactttaattagtgtttttttgtcttctaccaatgattgangcngcnattactccaagtgtaacaagtccaactaagatagttgagacggcatttatttccggtgtaacacctagtctaaccatagaatatattttcattggaagcgttgtagagccaggtcctgaagcaaagcttgcgatgaccaaatcatcaagagatagggtaaatgataatagccacccagaaaccactgccggcataataataggcagcgtgattagtcgaaaggtgtgaaagggtgtacaccctaagtcaagtgcagcttcattgatgctgtcatcataacttgacattctagattgaataataacagcaacgtaacacatcgagaaagttatatgggcaagtgtaattgtaaaaacgcctcggttaatggagagtgctacaaacataagcaagatagacaaaccaatgattacttctggcattaccataggtgcatagatcattcctgagaaaagtgttcttcctctaaagtttccaaaacgtgtcataacaaggcctgctatagtgccaagggctgtcgctactgtagaggaaataaaagcaaccttaatggttacccaggcggcatcttttatgccttggttatgcatcagttctacgtaccattttgtcgaaaatccaccccaaaccgtcaccaatcttgattcattaaaactaaacaatatcagtagaataataggaatatacagaaatgaaaatcctacgactaaggcaaagatattgaagttgccaaactttttcatgagatggccttttcttgagatttttgatagaacattattggaacaaccagaagagcaagcagaatgattgcgactgcagatgctaccggccagtctctgttataaaagaactccgtccacagtacctttcctatcatcagtgtgtttgtgccacctagtaaatctggaataacgaactcacccataacaggaataaagactaaaaaacagccggctaaaattcctggaagagataaaggtatggtcacagtccagaatgttttgaaagggcgacagcctagatcagctgctgcctctaataaactcatatccattttctctaggtttgcatagagaggcaaaatcataaacggtaagtaagaatagacaataccaatgtagaccgcaaggtcggtattcattattgtaagtggtttgtcgataatcccgattgatatcaaagctaggtttaataagccttccgtctttagaatacctatccatgcatagactcgaatcaagaaagaagtccaaaaaggaagtattaccagcattaataagacacctctccagcgtgttggcgcctttgcgacactgtaggctattgcatagccaattattagcgttaggatggttgaaataattgcaatctttaagctagaaaggtaggcattaatataaagagagtcactaaagagaaataaatagctatctaaacttgcttgaattgttggaagccatgattcaccccatttaaaaaatgatgtgtatggcggtattgccaaaataggctcagcaagacttatctttagtacaaatataaatggcagtaaaaaaagtactagaagccaaatataaggaattgaaatgacagcatttcttccactaaaagcttttttcaaaaaatttggaatttggatttcttttcggttcattgaaatttaagaaagtagaaccactgctgagtgaggtgcccattgaaggaagacttcatccccccaagttaaatggtgttcttttgttctttcacggttggctcgtattgcctttagaattgtgccgttttgaagcttgacgtggtaggtagaaaaactacctccataagctatatcttcaattgttccttttaagatgttgtgttcattttttggcaatcttttagatatttcaagtttttctggccttagagcaaaccatagctgatttccgatagctgcatcaactttttgagtagcatagacaatcgagtttgagtcgtccgaaagtaactgagtaccaatttcattt

SEQ ID NO: 746 - DNA, 4000 bp, Escherichia coli
  misc_feature (498)..(499): n is a, c, g, or t
  misc_feature (502)..(511): n is a, c, g, or t
  misc_feature (522)..(523): n is a, c, g, or t
  misc_feature (536)..(536): n is a, c, g, or t
  misc_feature (538)..(538): n is a, c, g, or t
  misc_feature (540)..(540): n is a, c, g, or t
  misc_feature (546)..(559): n is a, c, g, or t
aaataccttgtttaattcttcatcatttctgatagctaattgaaggtgacgtggaataatacgagacttcttattatctcttgcagcattaccagccaattcaagaatttcagcagttaaatattctaaaacagcagctaaataaactggagcaccagcaccaatacgttgagcataattaccctttcttaaaagtcttcagattattatatttatttaaaataaaataattaataattaaaaattaatttatcgcaatcaaaaaaaattattcaattattgtatacaaaataatacaacatatttaaatatattattattattagtatatacctgtgaacacgaccaactgggaacttttataaacatattttcaaaaaaatttattttttataataatacattatacgttttattaaataaaattaattttatcagatcaatatttgtttaaaattttatatttaataatttatatcttattttaaaaagatatanntannnnnnnnnntatttaaaaannaaaaaaaaaaaanananaaaaannnnnnnnnnnnnnaaaaaaaaaaaaaaaaaaaaaaaaaaaaaaaaaaaaaaaaaaaaaaaaaaaaaaaaaaaaaaaaaaaaaaaaaaaactatataataattacttgaagaccagctcttgaagatctagaagcagctttttgatgtaagttgtcagatttacctttacctccagccattgttatgtttcttaattggtaatttagttataattatttctagcactaataaaaaaaataaatttcaaaatttcaaataaaattgacttttttgaattaaaagaacttgaagaaaaaaaaaaagaaaaaaagaaaaaaatattttaatttattataatttaaatttataaaaaaaaattaatattattaattttttaattattaaatggaaattaaatttttaatataaaaaagagtatggacaataatttttataaccaatcataatttatttaattcaatatttttaatttttcaattaaaaatttttaaaagttgtctattttattaataaaaaaaaaaataaaaaataaaaagttcatttgaattataaaaatgttttaaaaatattcatatatatttataaatgataattatatattattatattattttatataattatatttataatatattattttttaatatattatttataatttattacaatattatattgatattattgaatgaattcaaaaaacttaaagtagtaaaaaaaaagatatagttttgtcaattacacaactaataatgaaatgatcttttttttaaaattattattaatattataattattattattattatttatttatttatttatttatttatttatctacttatttattatttttattattttatacagaatgttattaattttaaatttatttatttatctatttatttatttatttatttatttatttatttatttatattaaagaaaacaatacaatacttcaaatatatttttaattttttgaaatgaaaaaaaaaaaaaataaaattttataattattagagttatatatatttatgatttttaccatttttatgatcgaaaaataaaataaaagttttgtttctatttaacctaatataaaaaaattcatcaattatttttagaaataaaaatattaaaaatactcttcatcatcaacaataattatatataaccatcaaaattatctaatttaattaacgaatataaaactaatgatatttcataatttatgggtatatctttctaatcatataataaaaattttaaaataataaaagtttattttaaaaatttcatttaataatacttataattaatttatcataaaaaaaataacaattttaaatatataaacaataatgcaaataaaatataaaaaaatttaaattattaataaaaaattaataaaattaaattatttttaataatgatagtacttttaataataattttttttttttttttttattagatattgaaaattaatttatatttaattttataaattcattataatataaaaaatttttataatgatattatttaaatttatttaatataattattatataaatatggagctgacagagttttttgaatttgaagataatatgtatataaagacaaaaaaaattatgtacaatgatatagagttaactattgaaacaaatacatcacagtacgaattatttaatcaacttatttcaaaagtaaaaaaattagattgtgtatatgataaaaataattattattatagaatgataacaaaactattgcacaatccatttctattaaagtatgaaaaaatatctggaaaaattatagaagtatttcaagaattacaaaaatatataacggaagcgattaaaaaaaaaaatacattattgtcattagctattacagaactgaataatattgacttaatatcacattttcctgatttaacaaatgattatgtattaccacttgttttatcacgaaaagatcagttaaaaattaatatagaagattataagcaacaaattcggtttaaaaatgaatttaatatattgtatatacaatataatttaatatttcaaattttaattaaatatttagatttcgctcaggtaaagaaaaatgatattatcatcaaacaatttgagcatcttccatatataaaagaaaaagtagaattaattgatgcatgtcgaaatgacgatataaaaaaggcgaaaagaattttagacaaagatttaaatattagatttaatacctatgacgggaaaacgatattcgatataccaattaataatgaaaatgaaaattttattaaatttttagtatcatatccagaaattgatctatatgtttatgatgttaataaacaaattccaattaaaaatgccaatgaattaattaataaaagtgtatttaatattttattggatcgtatggcagattcttatacatataaattaggaatgaaaacaacattattaatatgggctatatgcaataacgaaaaagacatatataattatatacttaacaatacaaaacctaaaaatataaatctatctgattcaaatgatcgaacagcattaatatgggcaatcaaaaagaaaaatagacaaattattgatatactcttaaaatatccaggtattgatgttaatgtctatgataaatatggtaatagcccgttgctcctaacagcaattcataatgatatagccacaatgaaaaggttaattacagattttaaagtaaatgtaaatgcaaaaaattgttttggaaatacttcattaattattgcaacagataagaaacttgtggaaattaccaatttattaattgataataatgatactgatgttaacatatccaataataataaaataactgcattaatgtatgctatatttaaagattgctatgatattgtatataaactattaaaacatccaaaattagatattaatgcagtagataataaaggtaattctgttcttatgctagcatcgaaaaaaggaaatatacaattagtaaaagctatattagattttccaaatgtaaatattaatcttcttaattctgaaaacaaaaccgcattagtatattctatagaaaaaaatatgattaaggttacagaattattgttacaacaaaataatattatagtaaatactatagacgttaatggtgatacacctttaacttcctttataaaagttaaccctgaagaaaatatggtccatttgaaaacattattaaaaactaaaaaatttaatgttaatatagttgataaaaatttacgttctccattaattcttgcctgtgacaagaactatccccttgctgttaaatatttacttaaagtaaaagatattgattttaatttacaagataaatataaaaataccgcattaatatttgctgctattaatcgcaacgcagaaat

SEQ ID NO: 747 - DNA, 4000 bp, Escherichia coli
  misc_feature (1)..(2): n is a, c, g, or t
  misc_feature (6)..(6): n is a, c, g, or t
  misc_feature (8)..(8): n is a, c, g, or t
  misc_feature (10)..(11): n is a, c, g, or t
  misc_feature (15)..(15): n is a, c, g, or t
  misc_feature (17)..(17): n is a, c, g, or t
  misc_feature (19)..(19): n is a, c, g, or t
  misc_feature (21)..(25): n is a, c, g, or t
  misc_feature (28)..(28): n is a, c, g, or t
  misc_feature (30)..(30): n is a, c, g, or t
  misc_feature (32)..(33): n is a, c, g, or t
  misc_feature (37)..(37): n is a, c, g, or t
  misc_feature (39)..(40): n is a, c, g, or t
  misc_feature (44)..(45): n is a, c, g, or t
  misc_feature (47)..(48): n is a, c, g, or t
  misc_feature (51)..(51): n is a, c, g, or t
  misc_feature (53)..(53): n is a, c, g, or t
  misc_feature (56)..(56): n is a, c, g, or t
  misc_feature (60)..(63): n is a, c, g, or t
  misc_feature (65)..(65): n is a, c, g, or t
  misc_feature (67)..(67): n is a, c, g, or t
  misc_feature (69)..(70): n is a, c, g, or t
  misc_feature (73)..(75): n is a, c, g, or t
  misc_feature (77)..(78): n is a, c, g, or t
  misc_feature (80)..(80): n is a, c, g, or t
  misc_feature (82)..(84): n is a, c, g, or t
  misc_feature (86)..(86): n is a, c, g, or t
  misc_feature (88)..(90): n is a, c, g, or t
  misc_feature (92)..(93): n is a, c, g, or t
  misc_feature (96)..(99): n is a, c, g, or t
  misc_feature (101)..(102): n is a, c, g, or t
  misc_feature (105)..(108): n is a, c, g, or t
  misc_feature (110)..(112): n is a, c, g, or t
  misc_feature (115)..(115): n is a, c, g, or t
  misc_feature (121)..(122): n is a, c, g, or t
  misc_feature (124)..(128): n is a, c, g, or t
  misc_feature (130)..(133): n is a, c, g, or t
  misc_feature (137)..(138): n is a, c, g, or t
  misc_feature (140)..(142): n is a, c, g, or t
  misc_feature (146)..(146): n is a, c, g, or t
  misc_feature (148)..(149): n is a, c, g, or t
  misc_feature (152)..(154): n is a, c, g, or t
  misc_feature (156)..(156): n is a, c, g, or t
  misc_feature (158)..(158): n is a, c, g, or t
  misc_feature (160)..(160): n is a, c, g, or t
  misc_feature (162)..(162): n is a, c, g, or t
  misc_feature (164)..(166): n is a, c, g, or t
  misc_feature (168)..(168): n is a, c, g, or t
  misc_feature (170)..(171): n is a, c, g, or t
  misc_feature (174)..(174): n is a, c, g, or t
  misc_feature (176)..(176): n is a, c, g, or t
  misc_feature (178)..(179): n is a, c, g, or t
  misc_feature (181)..(181): n is a, c, g, or t
  misc_feature (183)..(183): n is a, c, g, or t
  misc_feature (185)..(185): n is a, c, g, or t
  misc_feature (189)..(189): n is a, c, g, or t
  misc_feature (191)..(191): n is a, c, g, or t
  misc_feature (194)..(194): n is a, c, g, or t
  misc_feature (198)..(199): n is a, c, g, or t
  misc_feature (201)..(202): n is a, c, g, or t
  misc_feature (207)..(207): n is a, c, g, or t
  misc_feature (209)..(209): n is a, c, g, or t
  misc_feature (211)..(211): n is a, c, g, or t
  misc_feature (213)..(213): n is a, c, g, or t
  misc_feature (215)..(218): n is a, c, g, or t
  misc_feature (220)..(222): n is a, c, g, or t
  misc_feature (230)..(231): n is a, c, g, or t
  misc_feature (233)..(234): n is a, c, g, or t
  misc_feature (236)..(238): n is a, c, g, or t
  misc_feature (240)..(243): n is a, c, g, or t
  misc_feature (245)..(245): n is a, c, g, or t
  misc_feature (247)..(251): n is a, c, g, or t
  misc_feature (254)..(254): n is a, c, g, or t
  misc_feature (257)..(257): n is a, c, g, or t
  misc_feature (259)..(259): n is a, c, g, or t
  misc_feature (261)..(261): n is a, c, g, or t
  misc_feature (265)..(265): n is a, c, g, or t
  misc_feature (268)..(269): n is a, c, g, or t
  misc_feature (272)..(272): n is a, c, g, or t
  misc_feature (274)..(274): n is a, c, g, or t
  misc_feature (277)..(280): n is a, c, g, or t
  misc_feature (282)..(286): n is a, c, g, or t
  misc_feature (288)..(288): n is a, c, g, or t
  misc_feature (292)..(295): n is a, c, g, or t
  misc_feature (297)..(298): n is a, c, g, or t
  misc_feature (302)..(303): n is a, c, g, or t
  misc_feature (305)..(305): n is a, c, g, or t
  misc_feature (308)..(310): n is a, c, g, or t
  misc_feature (313)..(313): n is a, c, g, or t
  misc_feature (315)..(316): n is a, c, g, or t
  misc_feature (319)..(320): n is a, c, g, or t
  misc_feature (322)..(322): n is a, c, g, or t
  misc_feature (325)..(328): n is a, c, g, or t
  misc_feature (330)..(330): n is a, c, g, or t
  misc_feature (335)..(335): n is a, c, g, or t
  misc_feature (338)..(338): n is a, c, g, or t
  misc_feature (340)..(340): n is a, c, g, or t
  misc_feature (342)..(344): n is a, c, g, or t
  misc_feature (347)..(347): n is a, c, g, or t
  misc_feature (349)..(350): n is a, c, g, or t
  misc_feature (353)..(354): n is a, c, g, or t
  misc_feature (357)..(358): n is a, c, g, or t
  misc_feature (362)..(363): n is a, c, g, or t
  misc_feature (365)..(365): n is a, c, g, or t
  misc_feature (367)..(367): n is a, c, g, or t
  misc_feature (369)..(369): n is a, c, g, or t
  misc_feature (371)..(372): n is a, c, g, or t
  misc_feature (375)..(375): n is a, c, g, or t
  misc_feature (377)..(378): n is a, c, g, or t
  misc_feature (380)..(382): n is a, c, g, or t
  misc_feature (384)..(384): n is a, c, g, or t
  misc_feature (386)..(386): n is a, c, g, or t
  misc_feature (388)..(391): n is a, c, g, or t
  misc_feature (394)..(397): n is a, c, g, or t
  misc_feature (399)..(399): n is a, c, g, or t
  misc_feature (401)..(401): n is a, c, g, or t
  misc_feature (404)..(405): n is a, c, g, or t
  misc_feature (407)..(407): n is a, c, g, or t
  misc_feature (409)..(411): n is a, c, g, or t
  misc_feature (414)..(416): n is a, c, g, or t
  misc_feature (418)..(420): n is a, c, g, or t
  misc_feature (424)..(424): n is a, c, g, or t
  misc_feature (426)..(427): n is a, c, g, or t
  misc_feature (430)..(431): n is a, c, g, or t
  misc_feature (433)..(434): n is a, c, g, or t
  misc_feature (436)..(436): n is a, c, g, or t
  misc_feature (438)..(438): n is a, c, g, or t
  misc_feature (442)..(443): n is a, c, g, or t
  misc_feature (445)..(445): n is a, c, g, or t
  misc_feature (447)..(449): n is a, c, g, or t
  misc_feature (451)..(452): n is a, c, g, or t
  misc_feature (454)..(457): n is a, c, g, or t
  misc_feature (461)..(462): n is a, c, g, or t
  misc_feature (464)..(464): n is a, c, g, or t
  misc_feature (466)..(466): n is a, c, g, or t
  misc_feature (468)..(469): n is a, c, g, or t
  misc_feature (471)..(471): n is a, c, g, or t
  misc_feature (474)..(475): n is a, c, g, or t
  misc_feature (477)..(478): n is a, c, g, or t
  misc_feature (480)..(480): n is a, c, g, or t
  misc_feature (482)..(482): n is a, c, g, or t
  misc_feature (485)..(487): n is a, c, g, or t
  misc_feature (490)..(493): n is a, c, g, or t
  misc_feature (495)..(497): n is a, c, g, or t
  misc_feature (499)..(499): n is a, c, g, or t
  misc_feature (504)..(506): n is a, c, g, or t
  misc_feature (509)..(511): n is a, c, g, or t
  misc_feature (513)..(514): n is a, c, g, or t
  misc_feature (517)..(517): n is a, c, g, or t
  misc_feature (520)..(520): n is a, c, g, or t
  misc_feature (522)..(522): n is a, c, g, or t
  misc_feature (525)..(526): n is a, c, g, or t
  misc_feature (528)..(529): n is a, c, g, or t
  misc_feature (533)..(534): n is a, c, g, or t
  misc_feature (536)..(536): n is a, c, g, or t
  misc_feature (539)..(540): n is a, c, g, or t
  misc_feature (543)..(545): n is a, c, g, or t
  misc_feature (547)..(548): n is a, c, g, or t
  misc_feature (550)..(555): n is a, c, g, or t
  misc_feature (557)..(557): n is a, c, g, or t
  misc_feature (561)..(561): n is a, c, g, or t
  misc_feature (566)..(566): n is a, c, g, or t
  misc_feature (569)..(570): n is a, c, g, or t
  misc_feature (572)..(575): n is a, c, g, or t
  misc_feature (578)..(579): n is a, c, g, or t
  misc_feature (582)..(584): n is a, c, g, or t
  misc_feature (586)..(586): n is a, c, g, or t
  misc_feature (590)..(590): n is a, c, g, or t
  misc_feature (592)..(594): n is a, c, g, or t
  misc_feature (596)..(596): n is a, c, g, or t
  misc_feature (599)..(599): n is a, c, g, or t
  misc_feature (601)..(601): n is a, c, g, or t
  misc_feature (603)..(603): n is a, c, g, or t
  misc_feature (605)..(606): n is a, c, g, or t
  misc_feature (612)..(612): n is a, c, g, or t
  misc_feature (615)..(615): n is a, c, g, or t
  misc_feature (619)..(619): n is a, c, g, or t
  misc_feature (621)..(623): n is a, c, g, or t
  misc_feature (625)..(626): n is a, c, g, or t
  misc_feature (628)..(628): n is a, c, g, or t
  misc_feature (631)..(631): n is a, c, g, or t
  misc_feature (633)..(635): n is a, c, g, or t
  misc_feature (637)..(637): n is a, c, g, or t
  misc_feature (639)..(639): n is a, c, g, or t
  misc_feature (641)..(641): n is a, c, g, or t
  misc_feature (644)..(646): n is a, c, g, or t
  misc_feature (649)..(653): n is a, c, g, or t
  misc_feature (655)..(655): n is a, c, g, or t
  misc_feature (658)..(660): n is a, c, g, or t
  misc_feature (662)..(662): n is a, c, g, or t
  misc_feature (665)..(665): n is a, c, g, or t
  misc_feature (667)..(667): n is a, c, g, or t
  misc_feature (669)..(669): n is a, c, g, or t
  misc_feature (671)..(672): n is a, c, g, or t
  misc_feature (676)..(676): n is a, c, g, or t
  misc_feature (681)..(681): n is a, c, g, or t
  misc_feature (683)..(687): n is a, c, g, or t
  misc_feature (689)..(689): n is a, c, g, or t
  misc_feature (692)..(692): n is a, c, g, or t
  misc_feature (694)..(694): n is a, c, g, or t
  misc_feature (696)..(701): n is a, c, g, or t
  misc_feature (703)..(704): n is a, c, g, or t
  misc_feature (708)..(708): n is a, c, g, or t
  misc_feature (710)..(710): n is a, c, g, or t
  misc_feature (712)..(712): n is a, c, g, or t
  misc_feature (714)..(715): n is a, c, g, or t
  misc_feature (718)..(720): n is a, c, g, or t
  misc_feature (722)..(726): n is a, c, g, or t
  misc_feature (728)..(730): n is a, c, g, or t
  misc_feature (733)..(735): n is a, c, g, or t
  misc_feature (738)..(738): n is a, c, g, or t
  misc_feature (741)..(741): n is a, c, g, or t
  misc_feature (747)..(748): n is a, c, g, or t
  misc_feature (751)..(752): n is a, c, g, or t
  misc_feature (754)..(754): n is a, c, g, or t
  misc_feature (756)..(756): n is a, c, g, or t
  misc_feature (759)..(763): n is a, c, g, or t
  misc_feature (767)..(773): n is a, c, g, or t
  misc_feature (776)..(779): n is a, c, g, or t
  misc_feature (782)..(782): n is a, c, g, or t
  misc_feature (784)..(788): n is a, c, g, or t
  misc_feature (791)..(808): n is a, c, g, or t
  misc_feature (811)..(813): n is a, c, g, or t
  misc_feature (815)..(816): n is a, c, g, or t
  misc_feature (820)..(821): n is a, c, g, or t
  misc_feature (823)..(824): n is a, c, g, or t
  misc_feature (826)..(833): n is a, c, g, or t
  misc_feature (835)..(836): n is a, c, g, or t
  misc_feature (839)..(846): n is a, c, g, or t
  misc_feature (848)..(849): n is a, c, g, or t
  misc_feature (851)..(852): n is a, c, g, or t
  misc_feature (854)..(855): n is a, c, g, or t
  misc_feature (857)..(859): n is a, c, g, or t
  misc_feature (861)..(864): n is a, c, g, or t
  misc_feature (866)..(867): n is a, c, g, or t
  misc_feature (869)..(870): n is a, c, g, or t
  misc_feature (872)..(873): n is a, c, g, or t
  misc_feature (875)..(876): n is a, c, g, or t
  misc_feature (878)..(880): n is a, c, g, or t
  misc_feature (882)..(883): n is a, c, g, or t
  misc_feature (885)..(885): n is a, c, g, or t
  misc_feature (887)..(887): n is a, c, g, or t
  misc_feature (889)..(896): n is a, c, g, or t
  misc_feature (898)..(899): n is a, c, g, or t
  misc_feature (902)..(906): n is a, c, g, or t
  misc_feature (909)..(909): n is a, c, g, or t
  misc_feature (911)..(911): n is a, c, g, or t
  misc_feature (913)..(913): n is a, c, g, or t
  misc_feature (915)..(917): n is a, c, g, or t
  misc_feature (919)..(919): n is a, c, g, or t
  misc_feature (921)..(921): n is a, c, g, or t
  misc_feature (925)..(925): n is a, c, g, or t
  misc_feature (928)..(929): n is a, c, g, or t
  misc_feature (932)..(938): n is a, c, g, or t
  misc_feature (941)..(943): n is a, c, g, or t
  misc_feature (945)..(947): n is a, c, g, or t
  misc_feature (949)..(950): n is a, c, g, or t
  misc_feature (952)..(953): n is a, c, g, or t
  misc_feature (955)..(958): n is a, c, g, or t
  misc_feature (960)..(963): n is a, c, g, or t
  misc_feature (965)..(965): n is a, c, g, or t
  misc_feature (967)..(967): n is a, c, g, or t
  misc_feature (969)..(969): n is a, c, g, or t
  misc_feature (971)..(979): n is a, c, g, or t
  misc_feature (981)..(981): n is a, c, g, or t
  misc_feature (984)..(988): n is a, c, g, or t
  misc_feature (990)..(995): n is a, c, g, or t
  misc_feature (997)..(998): n is a, c, g, or t
  misc_feature (1000)..(1007): n is a, c, g, or t
  misc_feature (1009)..(1011): n is a, c, g, or t
  misc_feature (1013)..(1013): n is a, c, g, or t
  misc_feature (1016)..(1025): n is a, c, g, or t
  misc_feature (1027)..(1027): n is a, c, g, or t
  misc_feature (1029)..(1030): n is a, c, g, or t
  misc_feature (1032)..(1032): n is a, c, g, or t
  misc_feature (1034)..(1035): n is a, c, g, or t
  misc_feature (1038)..(1038): n is a, c, g, or t
  misc_feature (1041)..(1041): n is a, c, g, or t
  misc_feature (1044)..(1044): n is a, c, g, or t
  misc_feature (1046)..(1046): n is a, c, g, or t
  misc_feature (1048)..(1049): n is a, c, g, or t
  misc_feature (1051)..(1052): n is a, c, g, or t
  misc_feature (1054)..(1054): n is a, c, g, or t
  misc_feature (1056)..(1063): n is a, c, g, or t
  misc_feature (1065)..(1072): n is a, c, g, or t
  misc_feature (1074)..(1077): n is a, c, g, or t
  misc_feature (1079)..(1079): n is a, c, g, or t
  misc_feature (1081)..(1086): n is a, c, g, or t
  misc_feature (1088)..(1095): n is a, c, g, or t
  misc_feature (1097)..(1097): n is a, c, g, or t
  misc_feature (1099)..(1100): n is a, c, g, or t
  misc_feature (1102)..(1110): n is a, c, g, or t
  misc_feature (1112)..(1112): n is a, c, g, or t
  misc_feature (1114)..(1119): n is a, c, g, or t
  misc_feature (1121)..(1123): n is a, c, g, or t
  misc_feature (1125)..(1127): n is a, c, g, or t
  misc_feature (1129)..(1129): n is a, c, g, or t
  misc_feature (1132)..(1136): n is a, c, g, or t
  misc_feature (1138)..(1141): n is a, c, g, or t
  misc_feature (1145)..(1145): n is a, c, g, or t
  misc_feature (1148)..(1150): n is a, c, g, or t
  misc_feature (1153)..(1155): n is a, c, g, or t
  misc_feature (1157)..(1157): n is a, c, g, or t
  misc_feature (1160)..(1161): n is a, c, g, or t
  misc_feature (1163)..(1163): n is a, c, g, or t
  misc_feature (1166)..(1166): n is a, c, g, or t
  misc_feature (1168)..(1170): n is a, c, g, or t
  misc_feature (1172)..(1173): n is a, c, g, or t
  misc_feature (1175)..(1175): n is a, c, g, or t
  misc_feature (1177)..(1179): n is a, c, g, or t
  misc_feature (1181)..(1181): n is a, c, g, or t
  misc_feature (1183)..(1186): n is a, c, g, or t
  misc_feature (1188)..(1192): n is a, c, g, or t
  misc_feature (1196)..(1196): n is a, c, g, or t
  misc_feature (1198)..(1199): n is a, c, g, or t
  misc_feature (1202)..(1207): n is a, c, g, or t
  misc_feature (1209)..(1209): n is a, c, g, or t
  misc_feature (1211)..(1212): n is a, c, g, or t
  misc_feature (1214)..(1215): n is a, c, g, or t
  misc_feature (1217)..(1217): n is a, c, g, or t
  misc_feature (1219)..(1220): n is a, c, g, or t
  misc_feature (1222)..(1225): n is a, c, g, or t
  misc_feature (1228)..(1231): n is a, c, g, or t
  misc_feature (1235)..(1235): n is a, c, g, or t
  misc_feature (1238)..(1240): n is a, c, g, or t
  misc_feature (1242)..(1243): n is a, c, g, or t
  misc_feature (1245)..(1247): n is a, c, g, or t
  misc_feature (1250)..(1253): n is a, c, g, or t
  misc_feature (1256)..(1260): n is a, c, g, or t
  misc_feature (1262)..(1264): n is a, c, g, or t
  misc_feature (1266)..(1269): n is a, c, g, or t
  misc_feature (1271)..(1271): n is a, c, g, or t
  misc_feature (1273)..(1274): n is a, c, g, or t
  misc_feature (1276)..(1278): n is a, c, g, or t
  misc_feature (1281)..(1284): n is a, c, g, or t
  misc_feature (1286)..(1301): n is a, c, g, or t
  misc_feature (1303)..(1305): n is a, c, g, or t
  misc_feature (1307)..(1313): n is a, c, g, or t
  misc_feature (1315)..(1320): n is a, c, g, or t
  misc_feature (1324)..(1325): n is a, c, g, or t
  misc_feature (1330)..(1335): n is a, c, g, or t
  misc_feature (1337)..(1338): n is a, c, g, or t
  misc_feature (1340)..(1342): n is a, c, g, or t
  misc_feature (1345)..(1346): n is a, c, g, or t
  misc_feature (1348)..(1349): n is a, c, g, or t
  misc_feature (1351)..(1355): n is a, c, g, or t
  misc_feature (1357)..(1358): n is a, c, g, or t
  misc_feature (1360)..(1363): n is a, c, g, or t
  misc_feature (1365)..(1367): n is a, c, g, or t
  misc_feature (1369)..(1369): n is a, c, g, or t
  misc_feature (1371)..(1374): n is a, c, g, or t
  misc_feature (1376)..(1376): n is a, c, g, or t
  misc_feature (1379)..(1379): n is a, c, g, or t
  misc_feature (1381)..(1382): n is a, c, g, or t
  misc_feature (1384)..(1387): n is a, c, g, or t
  misc_feature (1390)..(1391): n is a, c, g, or t
  misc_feature (1394)..(1394): n is a, c, g, or t
  misc_feature (1396)..(1403): n is a, c, g, or t
  misc_feature (1405)..(1408): n is a, c, g, or t
  misc_feature (1410)..(1412): n is a, c, g, or t
  misc_feature (1415)..(1416): n is a, c, g, or t
  misc_feature (1418)..(1419): n is a, c, g, or t
  misc_feature (1422)..(1425): n is a, c, g, or t
  misc_feature (1427)..(1430): n is a, c, g, or t
  misc_feature (1432)..(1433): n is a, c, g, or t
  misc_feature (1436)..(1446): n is a, c, g, or t
  misc_feature (1450)..(1452): n is a, c, g, or t
  misc_feature (1454)..(1461): n is a, c, g, or t
  misc_feature (1463)..(1467): n is a, c, g, or t
  misc_feature (1469)..(1469): n is a, c, g, or t
  misc_feature (1474)..(1481): n is a, c, g, or t
  misc_feature (1483)..(1485): n is a, c, g, or t
  misc_feature (1487)..(1490): n is a, c, g, or t
  misc_feature (1492)..(1494): n is a, c, g, or t
  misc_feature (1496)..(1498): n is a, c, g, or t
  misc_feature (1500)..(1506): n is a, c, g, or t
  misc_feature (1508)..(1508): n is a, c, g, or t
  misc_feature (1594)..(1594): n is a, c, g, or t
  misc_feature (1614)..(1614): n is a, c, g, or t
  misc_feature (1675)..(1675): n is a, c, g, or t
  misc_feature (1678)..(1678): n is a, c, g, or t
  misc_feature (1682)..(1683): n is a, c, g, or t
  misc_feature (1688)..(1688): n is a, c, g, or t
  misc_feature (1693)..(1694): n is a, c, g, or t
  misc_feature (1697)..(1697): n is a, c, g, or t
  misc_feature (1701)..(1701): n is a, c, g, or t
  misc_feature (1703)..(1703): n is a, c, g, or t
  misc_feature (1705)..(1705): n is a, c, g, or t
  misc_feature (1707)..(1709): n is a, c, g, or t
  misc_feature (1724)..(1725): n is a, c, g, or t
  misc_feature (1729)..(1729): n is a, c, g, or t
  misc_feature (1744)..(1744): n is a, c, g, or t
  misc_feature (1748)..(1751): n is a, c, g, or t
  misc_feature (1753)..(1753): n is a, c, g, or t
  misc_feature (1768)..(1769): n is a, c, g, or t
  misc_feature (1771)..(1773): n is a, c, g, or t
  misc_feature (1775)..(1775): n is a, c, g, or t
  misc_feature (1778)..(1778): n is a, c, g, or t
  misc_feature (1780)..(1782): n is a, c, g, or t
  misc_feature (1785)..(1788): n is a, c, g, or t
  misc_feature (1793)..(1797): n is a, c, g, or t
  misc_feature (1801)..(1801): n is a, c, g, or t
  misc_feature (1805)..(1805): n is a, c, g, or t
  misc_feature (1807)..(1810): n is a, c, g, or t
  misc_feature (1814)..(1816): n is a, c, g, or t
  misc_feature (1818)..(1818): n is a, c, g, or t
  misc_feature (1822)..(1826): n is a, c, g, or t
  misc_feature (1828)..(1828): n is a, c, g, or t
  misc_feature (1830)..(1830): n is a, c, g, or t
  misc_feature (1832)..(1832): n is a, c, g, or t
  misc_feature (1841)..(1841): n is a, c, g, or t
  misc_feature (1843)..(1843): n is a, c, g, or t
  misc_feature (1858)..(1858): n is a, c, g, or t
  misc_feature (1955)..(1955): n is a, c, g, or t
  misc_feature (1989)..(1989): n is a, c, g, or t
nncccntntnnaaananancnnnnnggncnanntctngnncaanncnnggngnccncccnnnncngngnnttnnncnntntnnnanannnannctnnnntnnggnnnngnnnggngtgttnnannnnncnnnngggnnannnaaancnnggnnntntntntntnnntncnnaancntnnancncnaaangngcnaaanngnnccccnantngntnnnngnnntggggggnntnncnnncnnnnangnnnnnttnttntngngggnggnnttncnccnnnncnnnnngnaaannnncnntttnnanatnnnaangnnttnnanttnnnncnaaaanacncncnnnccncnnggnntanncggnntngngntnnaancnntnnntntntnnnnaannnntngnggnncngnnnttnnngnnntccngnnaanncnngngntttnnangnnnanncnnnntttnnantngnntnccnntnnancnccnnnttnnnntnnngngtggnnnttnnnannggnggnanccnngnntttnnanggnnttnnntnnannnnnncncccnggggnaanncnnnnttnnggnnntntccncnnnanccntncnanntttttnccncccntnnncnntnttncnnngntntnggnnnttnnnnngngannnanccnanananntccnccccngnnnnngnggnantnnnnnntnncaangngngnnttnnngnnnnnannnggnnnccngantttcannttnntngnttnnnnnaaannnnnnnaannnnttncnnnnnccnnnnnnnnnnnnnnnnnnccnnntnngggnntnntnnnnnnnngnnttnnnnnnnntnnanntnntnnngnnnntnncnntnntnncnnncnngncngnnnnnnnntnnccnnnnnttncnangnnnangnaaanggnnaannnnnnnaannncnnnannanntnnnncnnnntngnantnnnnnnnnnanttnnnnngnnnnnnannannnnnnnntnnntnaannnnnnnnnnantnngntnnaanttnccntnanncnncngnnnnnnnngnnnnnnnnannnntngnnnnnncnnnnnnnncnannannnnnnnnncnannnnnngnnntnnncnaannnnncnnnntttnccnnnttnnnanccnncnttncnnnanngnannntngnnnncnnnnntttngnnggnnnnnngnanngnncnanncnnnnggnnnntttnaannnannannnccnnnnaannnnncnnntnnnnancnngnnnggnnnntnnnnnnnnnnnnnnnntnnngnnnnnnnannnnnngggnnggggnnnnnncnnannnttnnannannnnncnncnnnncnnnancnnnnanggntnncnnnnggnnggnannnnnnnntnnnngnnnggnncnnccnnnngnnnnannttnnnnnnnnnnntttnnntnnnnnnnngnnnnncnggggnnnnnnnnannncnnnntnnngnnngnnnnnnntngggatttggctcaaaaagacctaacaccattgcgagccaagtactaaacaaggatttcttggctgatcctagatctaaactgacantgcttttcgcctgctgttcntggagcagttaaacagctatttttgatactcagatgcctcggttctttccccaggctcacnaangctnnaaagnatcgnnacntttnangngnnngtgaaggtttttttnnaaanttttgggtccctttncccnnnnantttttaaatttgggnntnnntnttncnnnttnnnnggaannnnnccantttnannnntttnnntnaagnnnnntnantnttgaaaagntnccctagacttttttngcgaagcgttatggaggatcaggcgagctggtaggctatgtcaacaaactcattaacgacgcacgactttattcacacccaaagagttacttcaatngcttgtggacatcgtgcctaccagcctgccttgnataaaccataggctggatgacgccggggtgcgagtcctacttattcacaacttattcacattcataagtcattcgttttgagaatactaaattaaccctgagtcgatgaagccaggcactttgtcaagtagggtagcaattgtttctttcgggagacgatgcctggtagatcaaaaacccctggtcttctctgcttgtattggatttgtttgagaattcctttttctccaacgatcaaaagcaaggaggactgccttacgacatccgtcacaagcaaagcactcatgatgtggtttccctcttttcgatacttgcaaagggcgtcggccaatgtctcctgttgtttccagaatgtttcaaaaccgatttcctcgatttgggctacactgaaagtgcctcccgcctcttcataaaccttgcaatcattgacaatggctttttccggatagccctgctttagaaccgaaccagactcaaacaagctctcagtaaatgacgtcgcctcaatgccagtcaaagcctcgaggtgcttgagcatcctcgcgtcgagatctgtagctgtgggcgaagtcaggttcagggtatcggagatgattcctgaaagcagcaaacctcctatttccttggggattttaacctcatgctgcaggaacatttccgtgataatcgtgcaggtactgcccacgggacgattgatgaaaagaatcggttgttgggttgtcatggagccgatccggtgatgatcgacaatttcgatgatttcgacttgatcggctccttcgactgcctgcgatagttcattatggtcgaccaaaatcagttgtcgttctactggcttgacaaaatctgttttggaaagaattccaaccatgcgctgatgcgcgtcctgaaccgggaaagcctgaaattgggaagaaatggccaaattccggatgcgtgccagcggctcatcttcattgaagtgcagaaagtgctcattcctgaggtgctttaccgggatagctgctcggcaaagcatggcggtggttgtcgaatcgtgttctgagcgaagaatggaaacaccttttgagagggctagatcacgtatggcatggctaacactcagaccgcccgtgaccaccatcacccgaatctgatgatcaatggcaacccgctgaatatcctccctgtctccgaccaccagcagaagtctattagggtcatactgccccagccgctgctcaaaagaatccaatttcatggcaccaatcatcagggtcaattcttcttcctgatctgggcggagcaaggatgcagtgctggatttgagcgtcctagccaattgcttaagagtgcatcgaatgttgcgtgtttcgcgcaggcgagatggagagggagaaaagaacctgctcatcttaaagaccgataccaggccttgacaggaaagctcgccgtccacaatgggaagcgttcggatattgaattgatccatgatttccagggcttcacaggcactggtatcgggggcgacctggatgacctggggctgcatgacatctcgtactctgggccgcacatcagccacgaaccgcggaggggctaccccgaatttactcaggacaaactcaatccgatcattgatgtctccacatctggcagcgatggcatttggcataccgatttggcgtttgaagtgagcataggcaatggcagagcaaatactgtccatgtctgggttgcggtgtccgatgatgagtaactctttcactttttatccaagaaggtgtcggatgccctggtttaccttttgtctgcagtagttggcaatccagtgattatagcttagcatagggtgaaaatgagtcacgccaccaattgcatcaagttgagcagggattgtgcatcggttcggatcccttccggtgaagcctatcagcttgcttccggcactgaagtttttctctcccaggagttgggaggaagtttcaccgtacgcactgaccaagggctttttcgcattgaggccaaggac

SEQ ID NO: 748 - DNA, 4000 bp, Escherichia coli
  misc_feature (2300)..(2300): n is a, c, g, or t
  misc_feature (2380)..(2380): n is a, c, g, or t
ccaatgaaaaaggacagggaagatccctttttgccatatattttggtgccggcaggatcattcaagcttacggggccgttaagtgtttcgaagttcaaatatgggttggagctttggtccgtcttttgattgttatagctggccgtaatccaggtagccgagcgggcaacagaggagaatgatgcttcatctacagagcctgctgggccattcgagtctgtctttcttcccagggcaagttctgaaagagtctgcaaacccgggaagtgccaggtggatgagcccacctttgcaccatccatataataggagaagtacccatccttgatgattactgcgacctgccgccaactcccattgccactgagatttggtaaaagtgagctaactttggaaaagggcagatgtgcagactcgtcatcaaaggatataccaaacggttgcgccgtgcttgaactgcccgatgtgtttttagtccaaataatataagttccctcttttgcactagggccattagcgatgcttcccttaaagcccttgtctccactaattgtgtatgattttcctgagaacccatcgctaagaagggtaggtgaattaagggcagtaagcacattgtttgcagggcttgagtccactgcattaccactgccgccctctaggtggtagaccccaaagtaatcactccaagcactaccatcgttggcataggcagggagagtggcagcggaatttccccaaagcatagtgaaattggaatcattggtgaggctaggtacccgtacccaaacctgggattctccaaaggtgttccagctggcaatttcatattttagctcctgcccagcctgatcgataaagcgaagatcacccccattggagtttgcctgggcgtagcggaagcccgcattgcctgctccgttggagggattctcggataggcggaccagcatattccaattatccaccgtggttccgcttggacaatcggtggtaaaggagagggcatagttccaagatgaatagtctgtgacggtgagggtgactgtctgggtggctgtgccaagcgtgttggatgctttgacatcaaaggtgtaagtgcctgcctcggtgggcgtgccgctaaccaaaccatccgagctgtttacgcttaaccaggtgggtttgttctgcagttcataggtaactgtggaatcatatccactcaatccgtaagccacttccttttgaatctggaaggagattgatcgacccactgtgccgaggatactggatgggctggtgatggaaaacttggatgagcctatatctccaaagcccttttcataaattgcctgaacttcggccgaggttaaagaaattccgtatattcttagatcatcaattttaaggctttgcccactcgcgttgttctctccaatcgttagctttgaattagaagaagtgaccgtacccgtctgggcagttgaattaatcaaggagccattgaggtaaacttttttatatcccccaccatatgtcgttaccaaatgattccactgaccattgttaattggtgtttgtacagtgtaggagccaccggccccagttaaggtaatagacaagttgtctgttcctgaattagccgtggcaattgaccaattacttttggacaaaatgttcatgcctgtgttcgaccagccctttatccaaaaagaggtagagaaagcagaacccgcatcaaagatatcctcatttccacctgttgaaactgtggcgaatgcaccgttggatagatcaagtgactgagaattactaaatagagaatctgaggtgtatgaactacttggagctatagacttgtatggatgacctatgggtaagctgcctgaaattccccatttatgtgcaagatatccctcaattttttcacgatctgatattcctgaaagagctgaaagaccgataatttctccgacaccacctttccatccacgatcgttcgaatattcattgtataatattgcacggtcttcattacgaggagtggagcttgtaaaacgaagtaatgttgccggcatcggtagagctgtatttgaagagataagagatccattcttgaaactacctgaatcattaaagttggagctcgttacccacgatgcagaatctatgtcacccattattctatgttccccataggccgctgggccagttatcagtgtattatactgatcaaaagttgagtctgtgccatcgtcataatatgcgattacaaagatctcctgcaggtttacagttggaatagataagccaatttnacccgagttggttgaactggaaatggatggtttgttatttagcaatccatccgaacttgaataggtgggccttcggctancggtattttggtatgtatggatatcattaccactgaggtccttccagttgctaactttattagtcgagcttttagttatggattccagatttgtggcatccaaccataacttcaggtttgctaagtattctggaaaatgttggccatgccggttattgccggaggtatcatttaaattgccatcaaacttccaccatcccttaaggttggtgttttgaacgggagtgactcttgactcattggaggtagtggtgaatgtagtatctcccaaagttgcccaaacggatcctttgtaattcgtggcttgagctttgaaataataggtctgcccatcattcaatccaccggtgatagatcctctaacgatgccactatttaccgagtttatggtgatatttgaatcccaggaacttggggttgttcctccgtcactggtgccataatagaaggtaacttgcgtggtcgcattgcctgtgctgtttaattctacctgcaagtcaactgttgtacccgtgatattgatcgcagattggccgagtaaagagggtagggctactggtataggagtggtaaagtttctgtcgtctgaccaggaggttatatttccctgagtcgttcgtaagcgatagaaataagtatttcctgcagttaatcctgttattgatttaccaaagtaaccactgttgcctgttcccatactgattgcttgattctgccaggaactggcattggtgcccccatcactagacccccaaaaaagttccactgtatagttaacatcgcctccactttgtgcgatctctgcaaggatggttgctgaatcagtcgtgagaccaataggttcgtgtgttcccaggataggtgctgatgctgccgatgatgtgtaagaaataaccccaactgctattttttctgggtttgagctttcggcctggacaattatttggtgactgcctccaacttctggagttccagaaagtacaccagtcgcagaatttatgctcagtccctgggggagattataggccgagtaataggggtttgtgaagtttgcatctatggtggttgaaaaggttgtgcctacagtgcaggtaatggaagcggggaaggtcgaaaaacttccttccttttgcttgtctccctttccagagccatatagttccacaacttcaaggtttgatagtgctgtgttgtaaaacctaacttcatcaatttttattccagcatatttgtgtgcattgatggtaccaatcgaactattaaagtctgatgctccaaataagagagaggcattagttgctgtgactgatcctgtgtttgtagtactggcgacttgctcaccatcgaggaagattttgcgaacactaccgtcaaaagtggaaacgatgtgatgccatgaattatctgtggatagtgacttggagtgtgttgcactttgctctcctcccactcctgttatgttggatattaactggtttgtgcctgtgccccgaccaatcatccaaccaccgatgctagggtgggttgtaggagagcctttggaaatgacggaagcatttacttcgtttggccatcctttagtccaaactgaaatggtgaaatcagaacccatgttgaaag

SEQ ID NO: 749 - DNA, 4000 bp, Escherichia coli
  misc_feature (1)..(14): n is a, c, g, or t
  misc_feature (16)..(18): n is a, c, g, or t
  misc_feature (20)..(23): n is a, c, g, or t
  misc_feature (25)..(47): n is a, c, g, or t
  misc_feature (49)..(52): n is a, c, g, or t
  misc_feature (54)..(56): n is a, c, g, or t
  misc_feature (58)..(58): n is a, c, g, or t
  misc_feature (60)..(63): n is a, c, g, or t
  misc_feature (65)..(65): n is a, c, g, or t
  misc_feature (67)..(70): n is a, c, g, or t
  misc_feature (72)..(74): n is a, c, g, or t
  misc_feature (76)..(77): n is a, c, g, or t
  misc_feature (79)..(83): n is a, c, g, or t
  misc_feature (85)..(87): n is a, c, g, or t
  misc_feature (89)..(89): n is a, c, g, or t
  misc_feature (91)..(91): n is a, c, g, or t
  misc_feature (93)..(94): n is a, c, g, or t
  misc_feature (96)..(96): n is a, c, g, or t
  misc_feature (98)..(98): n is a, c, g, or t
  misc_feature (101)..(102): n is a, c, g, or t
  misc_feature (104)..(105): n is a, c, g, or t
  misc_feature (111)..(112): n is a, c, g, or t
  misc_feature (115)..(116): n is a, c, g, or t
  misc_feature (118)..(119): n is a, c, g, or t
  misc_feature (122)..(122): n is a, c, g, or t
  misc_feature (125)..(125): n is a, c, g, or t
  misc_feature (136)..(136): n is a, c, g, or t
  misc_feature (144)..(144): n is a, c, g, or t
  misc_feature (148)..(148): n is a, c, g, or t
  misc_feature (150)..(150): n is a, c, g, or t
  misc_feature (154)..(155): n is a, c, g, or t
  misc_feature (158)..(158): n is a, c, g, or t
  misc_feature (161)..(161): n is a, c, g, or t
  misc_feature (164)..(164): n is a, c, g, or t
  misc_feature (168)..(168): n is a, c, g, or t
  misc_feature (171)..(171): n is a, c, g, or t
  misc_feature (174)..(174): n is a, c, g, or t
  misc_feature (177)..(177): n is a, c, g, or t
  misc_feature (180)..(181): n is a, c, g, or t
  misc_feature (184)..(184): n is a, c, g, or t
  misc_feature (186)..(186): n is a, c, g, or t
  misc_feature (189)..(189): n is a, c, g, or t
  misc_feature (191)..(191): n is a, c, g, or t
  misc_feature (197)..(197): n is a, c, g, or t
  misc_feature (203)..(203): n is a, c, g, or t
  misc_feature (207)..(207): n is a, c, g, or t
  misc_feature (210)..(210): n is a, c, g, or t
  misc_feature (212)..(212): n is a, c, g, or t
  misc_feature (220)..(220): n is a, c, g, or t
  misc_feature (232)..(232): n is a, c, g, or t
  misc_feature (234)..(234): n is a, c, g, or t
  misc_feature (238)..(239): n is a, c, g, or t
  misc_feature (243)..(243): n is a, c, g, or t
  misc_feature (245)..(247): n is a, c, g, or t
  misc_feature (250)..(253): n is a, c, g, or t
  misc_feature (256)..(256): n is a, c, g, or t
  misc_feature (261)..(262): n is a, c, g, or t
  misc_feature (267)..(267): n is a, c, g, or t
  misc_feature (273)..(275): n is a, c, g, or t
  misc_feature (282)..(283): n is a, c, g, or t
  misc_feature (290)..(291): n is a, c, g, or t
  misc_feature (310)..(310): n is a, c, g, or t
  misc_feature (312)..(312): n is a, c, g, or t
  misc_feature (314)..(314): n is a, c, g, or t
  misc_feature (319)..(320): n is a, c, g, or t
  misc_feature (324)..(324): n is a, c, g, or t
  misc_feature (326)..(329): n is a, c, g, or t
  misc_feature (334)..(334): n is a, c, g, or t
  misc_feature (337)..(337): n is a, c, g, or t
  misc_feature (339)..(339): n is a, c, g, or t
  misc_feature (341)..(342): n is a, c, g, or t
  misc_feature (346)..(346): n is a, c, g, or t
  misc_feature (348)..(348): n is a, c, g, or t
  misc_feature (350)..(351): n is a, c, g, or t
  misc_feature (353)..(354): n is a, c, g, or t
  misc_feature (359)..(359): n is a, c, g, or t
  misc_feature (361)..(361): n is a, c, g, or t
  misc_feature (363)..(363): n is a, c, g, or t
  misc_feature (367)..(367): n is a, c, g, or t
  misc_feature (375)..(375): n is a, c, g, or t
  misc_feature (381)..(381): n is a, c, g, or t
  misc_feature (387)..(388): n is a, c, g, or t
  misc_feature (395)..(395): n is a, c, g, or t
  misc_feature (399)..(399): n is a, c, g, or t
  misc_feature (407)..(407): n is a, c, g, or t
  misc_feature (414)..(414): n is a, c, g, or t
  misc_feature (416)..(417): n is a, c, g, or t
  misc_feature (421)..(421): n is a, c, g, or t
  misc_feature (426)..(426): n is a, c, g, or t
  misc_feature (428)..(429): n is a, c, g, or t
  misc_feature (431)..(432): n is a, c, g, or t
  misc_feature (435)..(435): n is a, c, g, or t
  misc_feature (438)..(438): n is a, c, g, or t
  misc_feature (444)..(444): n is a, c, g, or t
  misc_feature (449)..(450): n is a, c, g, or t
  misc_feature (452)..(452): n is a, c, g, or t
  misc_feature (456)..(456): n is a, c, g, or t
  misc_feature (461)..(462): n is a, c, g, or t
  misc_feature (468)..(469): n is a, c, g, or t
  misc_feature (471)..(471): n is a, c, g, or t
  misc_feature (474)..(475): n is a, c, g, or t
  misc_feature (477)..(478): n is a, c, g, or t
  misc_feature (480)..(482): n is a, c, g, or t
  misc_feature (489)..(489): n is a, c, g, or t
  misc_feature (491)..(493): n is a, c, g, or t
  misc_feature (503)..(503): n is a, c, g, or t
  misc_feature (510)..(510): n is a, c, g, or t
  misc_feature (516)..(516): n is a, c, g, or t
  misc_feature (518)..(518): n is a, c, g, or t
  misc_feature (520)..(520): n is a, c, g, or t
  misc_feature (523)..(523): n is a, c, g, or t
  misc_feature (527)..(527): n is a, c, g, or t
  misc_feature (536)..(537): n is a, c, g, or t
  misc_feature (540)..(540): n is a, c, g, or t
  misc_feature (542)..(542): n is a, c, g, or t
  misc_feature (545)..(546): n is a, c, g, or t
  misc_feature (552)..(552): n is a, c, g, or t
  misc_feature (555)..(558): n is a, c, g, or t
  misc_feature (562)..(567): n is a, c, g, or t
  misc_feature (571)..(574): n is a, c, g, or t
  misc_feature (578)..(578): n is a, c, g, or t
  misc_feature (580)..(580): n is a, c, g, or t
  misc_feature (583)..(585): n is a, c, g, or t
  misc_feature (587)..(590): n is a, c, g, or t
  misc_feature (592)..(592): n is a, c, g, or t
  misc_feature (594)..(594): n is a, c, g, or t
  misc_feature (599)..(599): n is a, c, g, or t
  misc_feature (607)..(609): n is a, c, g, or t
  misc_feature (612)..(612): n is a, c, g, or t
  misc_feature (615)..(619): n is a, c, g, or t
  misc_feature (621)..(626): n is a, c, g, or t
  misc_feature (629)..(629): n is a, c, g, or t
  misc_feature (635)..(635): n is a, c, g, or t
  misc_feature (642)..(642): n is a, c, g, or t
  misc_feature (644)..(644): n is a, c, g, or t
  misc_feature (646)..(646): n is a, c, g, or t
  misc_feature (648)..(651): n is a, c, g, or t
  misc_feature (653)..(654): n is a, c, g, or t
  misc_feature (658)..(658): n is a, c, g, or t
  misc_feature (661)..(661): n is a, c, g, or t
  misc_feature (666)..(666): n is a, c, g, or t
  misc_feature (673)..(673): n is a, c, g, or t
  misc_feature (675)..(675): n is a, c, g, or t
  misc_feature (678)..(679): n is a, c, g, or t
  misc_feature (682)..(682): n is a, c, g, or t
  misc_feature (685)..(685): n is a, c, g, or t
  misc_feature (687)..(687): n is a, c, g, or t
  misc_feature (690)..(691): n is a, c, g, or t
  misc_feature (698)..(698): n is a, c, g, or t
  misc_feature (700)..(700): n is a, c, g, or t
  misc_feature (702)..(703): n is a, c, g, or t
  misc_feature (706)..(706): n is a, c, g, or t
  misc_feature (708)..(708): n is a, c, g, or t
  misc_feature (714)..(714): n is a, c, g, or t
  misc_feature (718)..(719): n is a, c, g, or t
  misc_feature (721)..(722): n is a, c, g, or t
  misc_feature (724)..(724): n is a, c, g, or t
  misc_feature (728)..(728): n is a, c, g, or t
  misc_feature (730)..(730): n is a, c, g, or t
  misc_feature (737)..(738): n is a, c, g, or t
  misc_feature (740)..(742): n is a, c, g, or t
  misc_feature (744)..(745): n is a, c, g, or t
  misc_feature (747)..(747): n is a, c, g, or t
  misc_feature (749)..(751): n is a, c, g, or t
  misc_feature (753)..(753): n is a, c, g, or t
  misc_feature (756)..(757): n is a, c, g, or t
  misc_feature (761)..(761): n is a, c, g, or t
  misc_feature (763)..(763): n is a, c, g, or t
  misc_feature (770)..(770): n is a, c, g, or t
  misc_feature (774)..(774): n is a, c, g, or t
  misc_feature (777)..(777): n is a, c, g, or t
  misc_feature (779)..(780): n is a, c, g, or t
  misc_feature (784)..(784): n is a, c, g, or t
  misc_feature (786)..(786): n is a, c, g, or t
  misc_feature (789)..(790): n is a, c, g, or t
  misc_feature (793)..(795): n is a, c, g, or t
  misc_feature (798)..(798): n is a, c, g, or t
  misc_feature (800)..(800): n is a, c, g, or t
  misc_feature (804)..(807): n is a, c, g, or t
  misc_feature (809)..(812): n is a, c, g, or t
  misc_feature (816)..(817): n is a, c, g, or t
  misc_feature (819)..(819): n is a, c, g, or t
  misc_feature (822)..(822): n is a, c, g, or t
  misc_feature (824)..(827): n is a, c, g, or t
  misc_feature (829)..(829): n is a, c, g, or t
  misc_feature (832)..(832): n is a, c, g, or t
  misc_feature (839)..(839): n is a, c, g, or t
  misc_feature (844)..(846): n is a, c, g, or t
  misc_feature (852)..(852): n is a, c, g, or t
  misc_feature (854)..(854): n is a, c, g, or t
  misc_feature (856)..(856): n is a, c, g, or t
  misc_feature (860)..(861): n is a, c, g, or t
  misc_feature (863)..(864): n is a, c, g, or t
  misc_feature (866)..(866): n is a, c, g, or t
  misc_feature (869)..(870): n is a, c, g, or t
  misc_feature (872)..(872): n is a, c, g, or t
  misc_feature (874)..(874): n is a, c, g, or t
  misc_feature (882)..(882): n is a, c, g, or t
  misc_feature (884)..(884): n is a, c, g, or t
  misc_feature (887)..(887): n is a, c, g, or t
  misc_feature (889)..(889): n is a, c, g, or t
  misc_feature (891)..(891): n is a, c, g, or t
  misc_feature (896)..(897): n is a, c, g, or t
  misc_feature (900)..(900): n is a, c, g, or t
  misc_feature (902)..(904): n is a, c, g, or t
  misc_feature (906)..(908): n is a, c, g, or t
  misc_feature (910)..(911): n is a, c, g, or t
  misc_feature (914)..(914): n is a, c, g, or t
  misc_feature (922)..(922): n is a, c, g, or t
  misc_feature (934)..(935): n is a, c, g, or t
  misc_feature (945)..(947): n is a, c, g, or t
  misc_feature (949)..(949): n is a, c, g, or t
  misc_feature (952)..(953): n is a, c, g, or t
  misc_feature (958)..(958): n is a, c, g, or t
  misc_feature (961)..(961): n is a, c, g, or t
  misc_feature (963)..(963): n is a, c, g, or t
  misc_feature (965)..(965): n is a, c, g, or t
  misc_feature (969)..(969): n is a, c, g, or t
  misc_feature (973)..(973): n is a, c, g, or t
  misc_feature (976)..(976): n is a, c, g, or t
  misc_feature (981)..(981): n is a, c, g, or t
  misc_feature (988)..(990): n is a, c, g, or t
  misc_feature (993)..(994): n is a, c, g, or t
  misc_feature (998)..(998): n is a, c, g, or t
  misc_feature (1002)..(1002): n is a, c, g, or t
  misc_feature (1004)..(1004): n is a, c, g, or t
  misc_feature (1007)..(1008): n is a, c, g, or t
  misc_feature (1012)..(1012): n is a, c, g, or t
  misc_feature (1019)..(1020): n is a, c, g, or t
  misc_feature (1025)..(1025): n is a, c, g, or t
  misc_feature (1027)..(1027): n is a, c, g, or t
  misc_feature (1029)..(1031): n is a, c, g, or t
  misc_feature (1033)..(1033): n is a, c, g, or t
  misc_feature (1038)..(1039): n is a, c, g, or t
  misc_feature (1041)..(1041): n is a, c, g, or t
  misc_feature (1044)..(1045): n is a, c, g, or t
  misc_feature (1052)..(1055): n is a, c, g, or t
  misc_feature (1057)..(1057): n is a, c, g, or t
  misc_feature (1061)..(1061): n is a, c, g, or t
  misc_feature (1065)..(1065): n is a, c, g, or t
  misc_feature (1067)..(1067): n is a, c, g, or t
  misc_feature (1070)..(1071): n is a, c, g, or t
  misc_feature (1073)..(1073): n is a, c, g, or t
  misc_feature (1075)..(1075): n is a, c, g, or t
  misc_feature (1077)..(1077): n is a, c, g, or t
  misc_feature (1082)..(1082): n is a, c, g, or t
  misc_feature (1084)..(1085): n is a, c, g, or t
  misc_feature (1090)..(1090): n is a, c, g, or t
  misc_feature (1092)..(1092): n is a, c, g, or t
  misc_feature (1095)..(1095): n is a, c, g, or t
  misc_feature (1097)..(1098): n is a, c, g, or t
  misc_feature (1100)..(1100): n is a, c, g, or t
  misc_feature (1103)..(1105): n is a, c, g, or t
  misc_feature (1108)..(1108): n is a, c, g, or t
  misc_feature (1110)..(1111): n is a, c, g, or t
  misc_feature (1113)..(1116): n is a, c, g, or t
  misc_feature (1120)..(1124): n is a, c, g, or t
  misc_feature (1127)..(1127): n is a, c, g, or t
  misc_feature (1131)..(1131): n is a, c, g, or t
  misc_feature (1133)..(1133): n is a, c, g, or t
  misc_feature (1135)..(1135): n is a, c, g, or t
  misc_feature (1137)..(1137): n is a, c, g, or t
  misc_feature (1140)..(1140): n is a, c, g, or t
  misc_feature (1142)..(1142): n is a, c, g, or t
  misc_feature (1144)..(1146): n is a, c, g, or t
  misc_feature (1150)..(1150): n is a, c, g, or t
  misc_feature (1153)..(1153): n is a, c, g, or t
  misc_feature (1158)..(1158): n is a, c, g, or t
  misc_feature (1160)..(1163): n is a, c, g, or t
  misc_feature (1167)..(1169): n is a, c, g, or t
  misc_feature (1171)..(1171): n is a, c, g, or t
  misc_feature (1175)..(1175): n is a, c, g, or t
  misc_feature (1177)..(1177): n is a, c, g, or t
  misc_feature (1180)..(1180): n is a, c, g, or t
  misc_feature (1184)..(1185): n is a, c, g, or t
  misc_feature (1189)..(1189): n is a, c, g, or t
  misc_feature (1191)..(1192): n is a, c, g, or t
  misc_feature (1195)..(1196): n is a, c, g, or t
  misc_feature (1204)..(1205): n is a, c, g, or t
  misc_feature (1207)..(1210): n is a, c, g, or t
  misc_feature (1212)..(1213): n is a, c, g, or t
  misc_feature (1215)..(1215): n is a, c, g, or t
  misc_feature (1217)..(1220): n is a, c, g, or t
  misc_feature (1224)..(1225): n is a, c, g, or t
  misc_feature (1227)..(1227): n is a, c, g, or t
  misc_feature (1229)..(1229): n is a, c, g, or t
  misc_feature (1231)..(1231): n is a, c, g, or t
  misc_feature (1236)..(1237): n is a, c, g, or t
  misc_feature (1239)..(1239): n is a, c, g, or t
  misc_feature (1243)..(1245): n is a, c, g, or t
  misc_feature (1248)..(1248): n is a, c, g, or t
  misc_feature (1250)..(1250): n is a, c, g, or t
  misc_feature (1252)..(1252): n is a, c, g, or t
  misc_feature (1255)..(1255): n is a, c, g, or t
  misc_feature (1258)..(1258): n is a, c, g, or t
  misc_feature (1260)..(1263): n is a, c, g, or t
  misc_feature (1268)..(1268): n is a, c, g, or t
  misc_feature (1270)..(1273): n is a, c, g, or t
  misc_feature (1279)..(1279): n is a, c, g, or t
  misc_feature (1283)..(1284): n is a, c, g, or t
  misc_feature (1287)..(1288): n is a, c, g, or t
  misc_feature (1292)..(1294): n is a, c, g, or t
  misc_feature (1296)..(1296): n is a, c, g, or t
  misc_feature (1298)..(1298): n is a, c, g, or t
  misc_feature (1309)..(1309): n is a, c, g, or t
  misc_feature (1315)..(1316): n is a, c, g, or t
  misc_feature (1318)..(1321): n is a, c, g, or t
  misc_feature (1324)..(1324): n is a, c, g, or t
  misc_feature (1326)..(1326): n is a, c, g, or t
  misc_feature (1329)..(1329): n is a, c, g, or t
  misc_feature (1331)..(1331): n is a, c, g, or t
  misc_feature (1334)..(1334): n is a, c, g, or t
  misc_feature (1338)..(1342): n is a, c, g, or t
  misc_feature (1344)..(1344): n is a, c, g, or t
  misc_feature (1348)..(1349): n is a, c, g, or t
  misc_feature (1351)..(1352): n is a, c, g, or t
  misc_feature (1355)..(1355): n is a, c, g, or t
  misc_feature (1359)..(1360): n is a, c, g, or t
  misc_feature (1362)..(1362): n is a, c, g, or t
  misc_feature (1366)..(1369): n is a, c, g, or t
  misc_feature (1373)..(1373): n is a, c, g, or t
  misc_feature (1375)..(1375): n is a, c, g, or t
  misc_feature (1378)..(1380): n is a, c, g, or t
  misc_feature (1382)..(1383): n is a, c, g, or t
  misc_feature (1389)..(1389): n is a, c, g, or t
  misc_feature (1391)..(1392): n is a, c, g, or t
  misc_feature (1397)..(1397): n is a, c, g, or t
  misc_feature (1401)..(1401): n is a, c, g, or t
  misc_feature (1408)..(1408): n is a, c, g, or t
  misc_feature (1411)..(1412): n is a, c, g, or t
  misc_feature (1414)..(1415): n is a, c, g, or t
  misc_feature (1420)..(1420): n is a, c, g, or t
  misc_feature (1423)..(1423): n is a, c, g, or t
  misc_feature (1427)..(1427): n is a, c, g, or t
  misc_feature (1429)..(1429): n is a, c, g, or t
  misc_feature (1433)..(1434): n is a, c, g, or t
  misc_feature (1436)..(1436): n is a, c, g, or t
  misc_feature (1438)..(1438): n is a, c, g, or t
  misc_feature (1490)..(1490): n is a, c, g, or t
  misc_feature (1943)..(1943): n is a, c, g, or t
  misc_feature (1988)..(1988): n is a, c, g, or t
  misc_feature (1991)..(1991): n is a, c, g, or t
  misc_feature (2742)..(2742): n is a, c, g, or t
  misc_feature (2996)..(2996): n is a, c, g, or t
  misc_feature (3001)..(3001): n is a, c, g, or t
  misc_feature (3015)..(3015): n is a, c, g, or t
  misc_feature (3025)..(3025): n is a, c, g, or t
  misc_feature (3033)..(3033): n is a, c, g, or t
  misc_feature (3055)..(3055): n is a, c, g, or t
  misc_feature (3075)..(3076): n is a, c, g, or t
  misc_feature (3081)..(3081): n is a, c, g, or t
  misc_feature (3097)..(3097): n is a, c, g, or t
  misc_feature (3099)..(3099): n is a, c, g, or t
  misc_feature (3107)..(3107): n is a, c, g, or t
  misc_feature (3109)..(3109): n is a, c, g, or t
  misc_feature (3118)..(3119): n is a, c, g, or t
  misc_feature (3139)..(3139): n is a, c, g, or t
  misc_feature (3152)..(3152): n is a, c, g, or t
  misc_feature (3155)..(3155): n is a, c, g, or t
  misc_feature (3158)..(3161): n is a, c, g, or t
  misc_feature (3163)..(3163): n is a, c, g, or t
  misc_feature (3165)..(3167): n is a, c, g, or t
  misc_feature (3169)..(3170): n is a, c, g, or t
  misc_feature (3172)..(3173): n is a, c, g, or t
  misc_feature (3178)..(3178): n is a, c, g, or t
  misc_feature (3181)..(3181): n is a, c, g, or t
  misc_feature (3183)..(3183): n is a, c, g, or t
  misc_feature (3190)..(3191): n is a, c, g, or t
  misc_feature (3202)..(3203): n is a, c, g, or t
  misc_feature (3209)..(3209): n is a, c, g, or t
  misc_feature (3212)..(3212): n is a, c, g, or t
  misc_feature (3233)..(3233): n is a, c, g, or t
  misc_feature (3236)..(3236): n is a, c, g, or t
  misc_feature (3243)..(3246): n is a, c, g, or t
  misc_feature (3251)..(3251): n is a, c, g, or t
  misc_feature (3254)..(3254): n is a, c, g, or t
  misc_feature (3257)..(3258): n is a, c, g, or t
  misc_feature (3265)..(3265): n is a, c, g, or t
  misc_feature (3269)..(3270): n is a, c, g, or t
  misc_feature (3273)..(3273): n is a, c, g, or t
  misc_feature (3275)..(3275): n is a, c, g, or t
  misc_feature (3286)..(3288): n is a, c, g, or t
  misc_feature (3292)..(3293): n is a, c, g, or t
  misc_feature (3295)..(3296): n is a, c, g, or t
  misc_feature (3299)..(3299): n is a, c, g, or t
  misc_feature (3301)..(3301): n is a, c, g, or t
  misc_feature (3303)..(3303): n is a, c, g, or t
  misc_feature (3307)..(3307): n is a, c, g, or t
  misc_feature (3310)..(3312): n is a, c, g, or t
  misc_feature (3316)..(3316): n is a, c, g, or t
  misc_feature (3318)..(3320): n is a, c, g, or t
  misc_feature (3323)..(3324): n is a, c, g, or t
  misc_feature (3328)..(3328): n is a, c, g, or t
  misc_feature (3330)..(3330): n is a, c, g, or t
  misc_feature (3332)..(3336): n is a, c, g, or t
  misc_feature (3338)..(3339): n is a, c, g, or t
  misc_feature (3341)..(3347): n is a, c, g, or t
  misc_feature (3349)..(3351): n is a, c, g, or t
  misc_feature (3353)..(3355): n is a, c, g, or t
  misc_feature (3357)..(3358): n is a, c, g, or t
  misc_feature (3360)..(3362): n is a, c, g, or t
  misc_feature (3364)..(3367): n is a, c, g, or t
  misc_feature (3369)..(3372): n is a, c, g, or t
  misc_feature (3374)..(3377): n is a, c, g, or t
  misc_feature (3379)..(3380): n is a, c, g, or t
  misc_feature (3383)..(3388): n is a, c, g, or t
  misc_feature (3390)..(3397): n is a, c, g, or t
  misc_feature (3399)..(3400): n is a, c, g, or t
  misc_feature (3402)..(3404): n is a, c, g, or t
  misc_feature (3406)..(3413): n is a, c, g, or t
  misc_feature (3416)..(3417): n is a, c, g, or t
  misc_feature (3419)..(3422): n is a, c, g, or t
  misc_feature (3424)..(3428): n is a, c, g, or t
  misc_feature (3430)..(3431): n is a, c, g, or t
  misc_feature (3433)..(3435): n is a, c, g, or t
  misc_feature (3437)..(3448): n is a, c, g, or t
  misc_feature (3452)..(3454): n is a, c, g, or t
  misc_feature (3458)..(3459): n is a, c, g, or t
  misc_feature (3461)..(3471): n is a, c, g, or t
  misc_feature (3474)..(3492): n is a, c, g, or t
  misc_feature (3494)..(3495): n is a, c, g, or t
  misc_feature (3497)..(3507): n is a, c, g, or t
  misc_feature (3509)..(3513): n is a, c, g, or t
  misc_feature (3515)..(3521): n is a, c, g, or t
  misc_feature (3523)..(3526): n is a, c, g, or t
  misc_feature (3528)..(3567): n is a, c, g, or t
  misc_feature (3569)..(3572): n is a, c, g, or t
  misc_feature (3574)..(3591): n is a, c, g, or t
  misc_feature (3594)..(3596): n is a, c, g, or t
  misc_feature (3599)..(3601): n is a, c, g, or t
  misc_feature (3603)..(3604): n is a, c, g, or t
  misc_feature (3606)..(3609): n is a, c, g, or t
  misc_feature (3611)..(3611): n is a, c, g, or t
  misc_feature (3613)..(3617): n is a, c, g, or t
  misc_feature (3620)..(3623): n is a, c, g, or t
  misc_feature (3626)..(3633): n is a, c, g, or t
  misc_feature (3635)..(3639): n is a, c, g, or t
  misc_feature (3641)..(3643): n is a, c, g, or t
  misc_feature (3645)..(3646): n is a, c, g, or t
  misc_feature (3648)..(3650): n is a, c, g, or t
  misc_feature (3652)..(3656): n is a, c, g, or t
  misc_feature (3658)..(3659): n is a, c, g, or t
  misc_feature (3661)..(3663): n is a, c, g, or t
  misc_feature (3666)..(3671): n is a, c, g, or t
  misc_feature (3673)..(3675): n is a, c, g, or t
  misc_feature (3677)..(3679): n is a, c, g, or t
  misc_feature (3681)..(3681): n is a, c, g, or t
  misc_feature (3683)..(3684): n is a, c, g, or t
  misc_feature (3688)..(3696): n is a, c, g, or t
  misc_feature (3698)..(3705): n is a, c, g, or t
  misc_feature (3707)..(3711): n is a, c, g, or t
  misc_feature (3714)..(3720): n is a, c, g, or t
  misc_feature (3723)..(3726): n is a, c, g, or t
  misc_feature (3728)..(3730): n is a, c, g, or t
  misc_feature (3732)..(3744): n is a, c, g, or t
  misc_feature (3746)..(3749): n is a, c, g, or t
  misc_feature (3752)..(3753): n is a, c, g, or t
  misc_feature (3755)..(3757): n is a, c, g, or t
  misc_feature (3760)..(3762): n is a, c, g, or t
  misc_feature (3765)..(3767): n is a, c, g, or t
  misc_feature (3769)..(3776): n is a, c, g, or t
  misc_feature (3778)..(3790): n is a, c, g, or t
  misc_feature (3792)..(3804): n is a, c, g, or t
  misc_feature (3806)..(3807): n is a, c, g, or t
  misc_feature (3809)..(3822): n is a, c, g, or t
  misc_feature (3825)..(3826): n is a, c, g, or t
  misc_feature (3828)..(3829): n is a, c, g, or t
  misc_feature (3831)..(3852): n is a, c, g, or t
  misc_feature (3854)..(3859): n is a, c, g, or t
  misc_feature (3861)..(3870): n is a, c, g, or t
  misc_feature (3872)..(3885): n is a, c, g, or t
  misc_feature (3887)..(3912): n is a, c, g, or t
  misc_feature (3914)..(3915): n is a, c, g, or t
  misc_feature (3917)..(3920): n is a, c, g, or t
  misc_feature (3922)..(3923): n is a, c, g, or t
  misc_feature (3925)..(3927): n is a, c, g, or t
  misc_feature (3930)..(3936): n is a, c, g, or t
  misc_feature (3938)..(3943): n is a, c, g, or t
  misc_feature (3945)..(3954): n is a, c, g, or t
  misc_feature (3957)..(3957): n is a, c, g, or t
  misc_feature (3959)..(3966): n is a, c, g, or t
  misc_feature (3968)..(3974): n is a, c, g, or t
  misc_feature (3977)..(3978): n is a, c, g, or t
  misc_feature (3980)..(3980): n is a, c, g, or t
  misc_feature (3982)..(3983): n is a, c, g, or t
  misc_feature (3985)..(3992): n is a, c, g, or t
  misc_feature (3996)..(3996): n is a, c, g, or t
  misc_feature (3998)..(3999): n is a, c, g, or t
nnnnnnnnnnnnnngnnntnnnntnnnnnnnnnnnnnnnnnnnnnnntnnnngnnnanannnncncnnnncnnnanncnnnnntnnntngngnngncngcnntnncgggannttnntnngantcnttacttattcncttggaanttgngnttgnngtnctncangaantcnacnatntgnntgncngcngngatacnggcgtngatnttngnctcagccntctgcgcacccntnttcnngggngnnntgnnnnagngggcnncaaanttctcnnncagctcnncgtggtnnccgggcatgatgtccgtcngntncttgnngtcngnnnnttccnccngnannttcncnanntnnggctnantnatcncctccttncgggcngtgttnntcagcanggcncctttggncatgctngnnagcngggcntnncnnatnganttcttngtctnntncgtngccgnnatgtgnngnganntnnannngcaggtntnnnacagctcctnagctgangcgacngncntcncacngtctgcctnnatnanttnngagggncannnngcgnnnnnngcannnntctncntannnannnntntngcgangcgggccnnnttncgnnnnncnnnnnnatnggcgtngataccnancntnnnncnnttcngcnccgtncccgacntnccnntanagngnttnngtgcacngnannccntnagaccnagcnnanncncggncncggcgtnngnnntnngncnnngngtnntcancncgcacangttntgngnngtancngcnnccnnntcnangttnnnntnnnnagcnncngcncnnnncncgntcttcanctgtnnngctgcntngngcanntnngngtnnancntatcgctncngangntnatcgnntcngnnncnnncnnggngtccagcnactgtgccttcnnggtgtatttnnncnacnntgccnatncnangccncccntcncgacngcttcannnatnncatncacngnaanngctncaaaggnnttctntntnnnancgagnncnttnntgtctcnnnntntttntctntntanncntntnttgtngnntctcncntcncnngntcnnnctntnntnnnncgcnnnnngcntatncnananttncngnnnccgnacngatanannnnatannncnttcncntcnatannaccnanntcnntcgcgatnngnnnngnncngnnnncttnnancngngagcnntnggcnnnttnananaancgngnnnnctctntnnnngaattncggnnagnncccnnngngntgtttagaganacgganncnnnngcncnccntntcngatnnnnnangttnnannttncaanntntggnnnntgcncnagnnntnnatacantnnctttncgancgctctnganncnngccanacntctnanctcnnanangcatacaagtgcatcagtcaaacaaacaactcaacgattcaacaaccaaacnactcaacatcaatgcttcttttcgaattcctgcatcgtttgaaccagtgccttcacgctttcgatcggcatagcgttgtagagcgaagcgcggaaaccgcccaccgaacggtggcccttgatgccgaccatgccagcagcagcggcaaagtctgcgaactctttctccagctccttgtactcgtcgttcatcacgaagcaaacgttcatcagcgagcggtcttcgacagccaccgttccgcggaacagcttgttgcggtcgatctcgtcatacagcacggctgccttctcctggttcttcttctgaagcaccttgatgccgccctgctccttataccacttcagggtctgcagcgcagagaagataggcagtacgggaggcgtgttgaacatcgaatccttcttgatgtgtgtgcgatagtccagcatcgtggggagcggacggtctacgtgncccagcgcgtctttgcgaacgatgatgatcgtcacaccggccggngcnaggttcttctgtgcaccggcataaacggcgttgtatttcgagaagtcaaccgggaaggagaagatgtctgacgacatatcagccaccagcgggatgttcacttccgggatcttatgcaactccgtgccgtagatcgtgttgttggtcgtgatgtggaagtactccgaatccggtgcgatggtgtagttcttcgggatgtatgtgtagttcttgtccgctgacgaagccacaacgtccacctcaccaacgaacttggcttccttgatggcgttggatgcccacgtacctgtatcgagatacgaggcctttttcttcatcaggttgaaggggatcatgtagaactggaggctggcgccaccgccgaggaagatcacctcgtgcgtttcgggcacatccagcagctccttcaccagcgcgcgagcctcgtcgtttacggcaacgaactcttttccgcggtgggagacttccagcagcgacaggcctgtgcctgcgaaattcagtacggcgtcggccgtgttcttgatcgtgtactcactcaaaatagagggtcctgcataaaaattgtgcttcttcataagatcgaaaaaataatactatcaaatgtgttgcgtgttaaaaccgcgggcaaatgtaggcgcaaaaaccatgtgccaaaagaaaagtgcaaggattgtgaaggaataaccagatgtggcttcaaaacggcaaagttgggccatcaaaagcccctctgcgggacacctccaacccntgggggacgggccgaggctaccgtgcgggaaactccgtcgcagtctatccatcgctaccggtgtgacgtacgatgaaaggcttcgactgacgatcctccatctattgccgagaaacatctcccacccgggttgatcgccatgcaaccggtttccgatcaaactccgcgttactttatcgcagtgcagttgcatggcgacaaattaccgcggtaaataatcgcaaagcagttgcattgtaatcaagtaacgagtncgatnattacaaatcactngcattgtaanaaattacngcggtaaataatcgcaaagcanttgcattgtaatcaagtaannagttngataattacaaatcantngcattgtnanaaattaccnnggtaaataatcgcaaagcanttgcattgtaatnaantannnngntnnntnntnncaaancantngcattgnnataaattactnnggtaantantcgcaaagcaattgcattgcnatnaattacnnnngtaantantcnnaaagcanttgnnttncnataaattaccnnngtanntnntcncnangcanttnnnttgngnnnaannaccncngnnnnnanncnnnnnnnannngnnntnngnnnannnncnnnngnnnntnntcnnnnnncnnnnnnnntnngnnnannnnnnnnggnngnnnngnnnnngnngnnngnnnnnnnnnnnncgcnnngggnngnnnnnnnnnnnccnnnnnnnnnnnnnnnnnnncnngnnnnnnnnnnngnnnnncnnnnnnngnnnncnnnnnnnnnnnnnnnnnnnnnnnnnnnnnnnnnnnnnnnngnnnncnnnnnnnnnnnnnnnnnngcnnnggnnngnnannnngncnnnnncgnnnntcnnnnnnnngnnnnngnnngnncnnntnnnnncnntnnnccnnnnnngnnngnnngngnngggnnnnnnnnngnnnnnnnncnnnnnggnnnnnnngcnnnngnnncnnnnnnnnnnnnngnnnnccnncnnntcnnnggnnnannnnnnnngnnnnnnnnnnnnncnnnnnnnnnnnnngnngnnnnnnnnnnnnnnggnngnngnnnnnnnnnnnnnnnnnnnnnngnnnnnncnnnnnnnnnngnnnnnnnnnnnnnngnnnnnnnnnnnnnnnnnnnnnnnnnngnngnnnntnnannnggnnnnnnngnnnnnncnnnnnnnnnnggngnnnnnnnngnnnnnnntgnngngnnannnnnnnntcgngnng

SEQ ID NO: 750 - DNA, 4000 bp, Escherichia coli
  misc_feature (1759)..(1759): n is a, c, g, or t
  misc_feature (1792)..(1792): n is a, c, g, or t
  misc_feature (3429)..(3429): n is a, c, g, or t
  misc_feature (3559)..(3559): n is a, c, g, or t
tattgacagtgatttgcctgttaaatgtaggatagttggagaagataaagacggtctacgtagcatgagagctacacgagtagaacaacatatgagttaccagatctttgaagaagatgaagactgggaatcagagatggataaagttttaattacacaacctattattggttgtgcttttaaaaagacttatcatgatccaattaagaaacacaatattagtgaaaatgtattagctaaagacttggtggttaattattggactaaaagtttagaaagtgctcctagggttactcatatcttaccaatgaataagaacgacatctatgagcgagtagctcgtggattgtggttagaagtatctgaaggtcgtcctcaacaagactctgttctttcaatgggacagggtttacaaaatttacaagataaagctcaaggcttaatgccaccagagcctacagacggaagtactccttatgagattcttgaacagcattgttttattgatcttgatgatgacggttacgctgaaccttatattgtctatgttcgtagagacactaaaaaagttgctaggattgttgctagatacaccgaaaaagatgtagaaagaaatagtaaaaatgtaatcttaagtattaaagctgaacagtattttactaagtatccattcattccatcacccgatggtggtttctatgacttaggttttggtgtgttgcttggaccacttaacgaatcaatcaacaccattatgaaccagcttattgatgctggtactttggctaacactgctggtggattcttaagtcgtggtattaaactccgtggtggcaattatagttttaacccaatggagtggaaacacgtagacaccactggagatgatttgagaaaaggtattgttcctttaccagtacgtgaaccttctcaagttatgtttactcttcttaatcttttgattaactatggagaacgtattggtggtgctgtagatgttatgacaggtcaaaaccctggtcaaaatactcctgctgaaactactcgtactatggctgaacaaggtatgaagatatttaacggtatctttaaacgtactcatcgtagtcttaaacaagagtttcgtaagttatacagacttaatcaaatctttatttctgaaaacacacattatgtatctaatgccacaaatgcaggtattattttaactgatgattacgagggtcctgtaacagatgtatgcccaactgctgacccaagtattacatctgatacacaaagattaaatcaagctatgggtatagcttcaagagtggctgctacacctggtttatataaccgatatgaagtagagcgtacattcttaagagctatgaagattacaaacattgaaaaagtattgccagatcctaaaggacctaacgctgtacccccaccagttaatcctaagttacaaattgaacaacttaagatacaagctaaacaagcttctgaccaattagaaatgaaaatggctttgcttaaacttatgtctgaggcagaacttaaccaagctcaaattcaaaagctacaagcagaagccgaagccattaagattggtattgctactgagggtgagaagatgcgtatacaagaaattaatatgcaaattggtttacaaagagaacgtagagaaggtttgttaactgcaataagtacaatgaatagtgtgtacgacactatgatgaagcatggtaaagattcccctggagatgacatngtaagtaatcttatgggtggtcaacaaggtatnggacagcctcaacaacaggagatgcctcaattacctcagtaagagttttttagtaaggagagaaaatggaagcagtaagcccaggtaattttgaagagtggaaacaacacccagttactaaacgtctgatgaagatgttagctaacgatagggaaatgatgaaagaaggattggttaacaattcttatgacgatcaagaggaagttaaaggtagatgccgagcaatcgcaattatccttaatatagagtatgaagatttatacgagtcaaaagaaactagagaggttataaatgagcaatgattctggaattaatcccgtaggttggcgagttcttgtaaagccccaggaagttaaaaaggtatccaaaggtggaattattttaactactgagactactgaagcacgagaacaaatgggcaatacaactggtattgttatagcaatgggtgaccaatgttatgccgatgaacctgcaccttggtgtaaagttggggataagattatatttgccaaatacgctggactgttgtatttaggcaaagacggaaacaattaccgtatgattaacgataaagacattacgggaaccttggatgctgatgtagacttggtagatccttatttagctaaaacttaagttgacacttaaacaaagataggagtaagatatgagcgatgatgcaaatgttactagtaacaatgaactagccgcagaaatttttcatgaggctgaatcccaaggatgggttccaaaagaacgttttcgtggtaatgaagctgattgggttgatgcagatgtgtttgtaaagagaggtcgtgagattcttcctattcttagaaagaacaacgagaaccttgtaaaagatttacaaagcactaaacaacaactacaagaatttaaactagcagcggaagagtttaagaagtttcaaaaagaagcttttgaacgcaaagctcaagattacgagagacgcattgaagaaattaaagaaagccgtgcccaagctattagtgatggggatggaaagaaagttaacgctctagatgatgccttagatcaagctaaggaagaactagtagaagctaaacaagccgttaaagatgcagatagagttcctgtaactccacctacacctactattgaacctgagttacaaacttggttagacagtaacaagtggtttggtgaagataaaagaatgacaactattgcaaacggattaggtgaaagcattcgactagagtttccaagtcttaaaggacaaccttttttagacaagcttgatgaagtgttagcagaagagtttcctaataagtttggtacaaagaaaagtcctagcagtagagtagagtctggatcgggtaggcaaagtcgcacaagcggcagtaatgctcaatcgtatgataatcttcctgctgaagcaaaagcagcttgtgatcggtttgtaaaacaaaagcttatgacccgtgaacagtatgtagctgattttgattggtcttaatttaaagtaaacttagaaaggaaatagatatgccaagagcactaaatgagtttgaaaaacgtgatcgtctagtagagaagttggaagaaagaaaagcagcaatagaagctcctactcctgctacagatggtanaactcgtaaaagacgcaacacttttaatggcacagaagccaagataagtgttagacaacaaattgaaggataccacttacatgtctttacagacgtaggaggtagaattcaagaagcactagataatggntatgaatttgtaacccctaccgaagtaggtggtgtgagtgaaaacgtagttagccgtaatggtgacctcggagaaagaattaggtatcttgtaaatcctcgtgctgaaggctcagaacaatacggataccttatgaagattaggcaagaatggtatgaggaagatcaagccgaacttcaagctaaaaataatacgattgattcttctattcgtagaggtaagattactggagaaaatccagcattctatgtacctacaggtggaataaaacttaacaattaatttaaaggagtcttaaatggctaacgtttcccgccctcgtggtctgtctccagttggaactgtaactggcgcaccattcaacgagcaaggccaattgtttgcaattgctaacgatgctactaacacctacgctattggtgacttagtaacatacgctgg

SEQ ID NO: 751 - DNA, 4000 bp, Escherichia coli
  misc_feature (1968)..(1974): n is a, c, g, or t
  misc_feature (1976)..(1985): n is a, c, g, or t
  misc_feature (1987)..(1988): n is a, c, g, or t
  misc_feature (1990)..(1997): n is a, c, g, or t
  misc_feature (2045)..(2064): n is a, c, g, or t
  misc_feature (2066)..(2072): n is a, c, g, or t
  misc_feature (2074)..(2074): n is a, c, g, or t
  misc_feature (2122)..(2151): n is a, c, g, or t
  misc_feature (2199)..(2213): n is a, c, g, or t
  misc_feature (2215)..(2226): n is a, c, g, or t
  misc_feature (2228)..(2228): n is a, c, g, or t
  misc_feature (2276)..(2299): n is a, c, g, or t
  misc_feature (2301)..(2306): n is a, c, g, or t
  misc_feature (2309)..(2309): n is a, c, g, or t
  misc_feature (2312)..(2312): n is a, c, g, or t
  misc_feature (2314)..(2314): n is a, c, g, or t
  misc_feature (2316)..(2317): n is a, c, g, or t
  misc_feature (2319)..(2319): n is a, c, g, or t
  misc_feature (2321)..(2322): n is a, c, g, or t
  misc_feature (2326)..(2326): n is a, c, g, or t
  misc_feature (2328)..(2331): n is a, c, g, or t
  misc_feature (2333)..(2333): n is a, c, g, or t
  misc_feature (2336)..(2337): n is a, c, g, or t
  misc_feature (2340)..(2342): n is a, c, g, or t
  misc_feature (2345)..(2346): n is a, c, g, or t
  misc_feature (2349)..(2349): n is a, c, g, or t
  misc_feature (2351)..(2351): n is a, c, g, or t
  misc_feature (2353)..(2362): n is a, c, g, or t
  misc_feature (2365)..(2369): n is a, c, g, or t
  misc_feature (2371)..(2383): n is a, c, g, or t
  misc_feature (2386)..(2386): n is a, c, g, or t
  misc_feature (2389)..(2389): n is a, c, g, or t
  misc_feature (2391)..(2391): n is a, c, g, or t
  misc_feature (2393)..(2394): n is a, c, g, or t
  misc_feature (2396)..(2396): n is a, c, g, or t
  misc_feature (2398)..(2399): n is a, c, g, or t
  misc_feature (2403)..(2403): n is a, c, g, or t
  misc_feature (2405)..(2408): n is a, c, g, or t
  misc_feature (2410)..(2410): n is a, c, g, or t
  misc_feature (2413)..(2414): n is a, c, g, or t
  misc_feature (2417)..(2419): n is a, c, g, or t
  misc_feature (2422)..(2423): n is a, c, g, or t
  misc_feature (2426)..(2426): n is a, c, g, or t
  misc_feature (2429)..(2437): n is a, c, g, or t
  misc_feature (2439)..(2451): n is a, c, g, or t
  misc_feature (2453)..(2456): n is a, c, g, or t
  misc_feature (2458)..(2458): n is a, c, g, or t
  misc_feature (2506)..(2512): n is a, c, g, or t
  misc_feature (2515)..(2520): n is a, c, g, or t
  misc_feature (2523)..(2523): n is a, c, g, or t
  misc_feature (2525)..(2534): n is a, c, g, or t
  misc_feature (2536)..(2536): n is a, c, g, or t
  misc_feature (2539)..(2539): n is a, c, g, or t
  misc_feature (2542)..(2542): n is a, c, g, or t
  misc_feature (2544)..(2544): n is a, c, g, or t
  misc_feature (2546)..(2547): n is a, c, g, or t
  misc_feature (2549)..(2549): n is a, c, g, or t
  misc_feature (2551)..(2552): n is a, c, g, or t
  misc_feature (2556)..(2561): n is a, c, g, or t
  misc_feature (2563)..(2563): n is a, c, g, or t
  misc_feature (2566)..(2567): n is a, c, g, or t
  misc_feature (2571)..(2572): n is a, c, g, or t
  misc_feature (2575)..(2579): n is a, c, g, or t
  misc_feature (2581)..(2581): n is a, c, g, or t
  misc_feature (2583)..(2585): n is a, c, g, or t
  misc_feature (2587)..(2597): n is a, c, g, or t
  misc_feature (2599)..(2605): n is a, c, g, or t
  misc_feature (2607)..(2609): n is a, c, g, or t
  misc_feature (2612)..(2613): n is a, c, g, or t
  misc_feature (2616)..(2616): n is a, c, g, or t
  misc_feature (2619)..(2629): n is a, c, g, or t
  misc_feature (2633)..(2633): n is a, c, g, or t
  misc_feature (2635)..(2640): n is a, c, g, or t
  misc_feature (2643)..(2644): n is a, c, g, or t
  misc_feature (2647)..(2649): n is a, c, g, or t
  misc_feature (2652)..(2653): n is a, c, g, or t
  misc_feature (2656)..(2657): n is a, c, g, or t
  misc_feature (2660)..(2660): n is a, c, g, or t
  misc_feature (2662)..(2668): n is a, c, g, or t
  misc_feature (2670)..(2679): n is a, c, g, or t
  misc_feature (2681)..(2687): n is a, c, g, or t
  misc_feature (2689)..(2691): n is a, c, g, or t
  misc_feature (2696)..(2706): n is a, c, g, or t
  misc_feature (2710)..(2717): n is a, c, g, or t
  misc_feature (2720)..(2721): n is a, c, g, or t
  misc_feature (2724)..(2726): n is a, c, g, or t
  misc_feature (2730)..(2734): n is a, c, g, or t
  misc_feature (2736)..(2737): n is a, c, g, or t
  misc_feature (2740)..(2741): n is a, c, g, or t
  misc_feature (2743)..(2744): n is a, c, g, or t
  misc_feature (2746)..(2747): n is a, c, g, or t
  misc_feature (2749)..(2756): n is a, c, g, or t
  misc_feature (2759)..(2766): n is a, c, g, or t
  misc_feature (2771)..(2771): n is a, c, g, or t
  misc_feature (2773)..(2784): n is a, c, g, or t
  misc_feature (2786)..(2786): n is a, c, g, or t
  misc_feature (2788)..(2795): n is a, c, g, or t
  misc_feature (2797)..(2797): n is a, c, g, or t
  misc_feature (2802)..(2802): n is a, c, g, or t
  misc_feature (2804)..(2805): n is a, c, g, or t
  misc_feature (2810)..(2810): n is a, c, g, or t
  misc_feature (2812)..(2812): n is a, c, g, or t
  misc_feature (2814)..(2818): n is a, c, g, or t
  misc_feature (2820)..(2826): n is a, c, g, or t
  misc_feature (2828)..(2828): n is a, c, g, or t
  misc_feature (2830)..(2835): n is a, c, g, or t
  misc_feature (2837)..(2842): n is a, c, g, or t
  misc_feature (2844)..(2844): n is a, c, g, or t
  misc_feature (2847)..(2852): n is a, c, g, or t
  misc_feature (2854)..(2860): n is a, c, g, or t
  misc_feature (2862)..(2862): n is a, c, g, or t
  misc_feature (2864)..(2865): n is a, c, g, or t
  misc_feature (2867)..(2868): n is a, c, g, or t
  misc_feature (2871)..(2876): n is a, c, g, or t
  misc_feature (2878)..(2881): n is a, c, g, or t
  misc_feature (2883)..(2884): n is a, c, g, or t
  misc_feature (2886)..(2888): n is a, c, g, or t
  misc_feature (2890)..(2894): n is a, c, g, or t
  misc_feature (2896)..(2913): n is a, c, g, or t
  misc_feature (2915)..(2921): n is a, c, g, or t
  misc_feature (2924)..(2924): n is a, c, g, or t
  misc_feature (2927)..(2929): n is a, c, g, or t
  misc_feature (2934)..(2934): n is a, c, g, or t
  misc_feature (2936)..(2937): n is a, c, g, or t
  misc_feature (2939)..(2942): n is a, c, g, or t
  misc_feature (2944)..(2945): n is a, c, g, or t
  misc_feature (2948)..(2953): n is a, c, g, or t
  misc_feature (2955)..(2958): n is a, c, g, or t
  misc_feature (2960)..(2962): n is a, c, g, or t
  misc_feature (2964)..(2964): n is a, c, g, or t
  misc_feature (2966)..(2974): n is a, c, g, or t
  misc_feature (2976)..(2983): n is a, c, g, or t
  misc_feature (2985)..(2997): n is a, c, g, or t
  misc_feature (3000)..(3014): n is a, c, g, or t
  misc_feature (3016)..(3030): n is a, c, g, or t
  misc_feature (3032)..(3037): n is a, c, g, or t
  misc_feature (3039)..(3040): n is a, c, g, or t
  misc_feature (3042)..(3049): n is a, c, g, or t
  misc_feature (3052)..(3053): n is a, c, g, or t
  misc_feature (3055)..(3069): n is a, c, g, or t
  misc_feature (3071)..(3074): n is a, c, g, or t
  misc_feature (3076)..(3087): n is a, c, g, or t
  misc_feature (3089)..(3091): n is a, c, g, or t
  misc_feature (3093)..(3098): n is a, c, g, or t
  misc_feature (3100)..(3101): n is a, c, g, or t
  misc_feature (3103)..(3105): n is a, c, g, or t
  misc_feature (3108)..(3112): n is a, c, g, or t
  misc_feature (3114)..(3116): n is a, c, g, or t
  misc_feature (3118)..(3119): n is a, c, g, or t
  misc_feature (3121)..(3134): n is a, c, g, or t
  misc_feature (3136)..(3138): n is a, c, g, or t
  misc_feature (3140)..(3151): n is a, c, g, or t
  misc_feature (3154)..(3154): n is a, c, g, or t
  misc_feature (3156)..(3161): n is a, c, g, or t
  misc_feature (3163)..(3168): n is a, c, g, or t
  misc_feature (3170)..(3176): n is a, c, g, or t
  misc_feature (3178)..(3189): n is a, c, g, or t
  misc_feature (3192)..(3192): n is a, c, g, or t
  misc_feature (3197)..(3205): n is a, c, g, or t
  misc_feature (3207)..(3211): n is a, c, g, or t
  misc_feature (3213)..(3214): n is a, c, g, or t
  misc_feature (3217)..(3221): n is a, c, g, or t
  misc_feature (3223)..(3229): n is a, c, g, or t
  misc_feature (3231)..(3238): n is a, c, g, or t
  misc_feature (3240)..(3242): n is a, c, g, or t
  misc_feature (3244)..(3244): n is a, c, g, or t
  misc_feature (3246)..(3246): n is a, c, g, or t
  misc_feature (3248)..(3248): n is a, c, g, or t
  misc_feature (3250)..(3250): n is a, c, g, or t
  misc_feature (3252)..(3258): n is a, c, g, or t
  misc_feature (3260)..(3264): n is a, c, g, or t
  misc_feature (3266)..(3283): n is a, c, g, or t
  misc_feature (3285)..(3289): n is a, c, g, or t
  misc_feature (3291)..(3292): n is a, c, g, or t
  misc_feature (3294)..(3295): n is a, c, g, or t
  misc_feature (3297)..(3299): n is a, c, g, or t
  misc_feature (3301)..(3304): n is a, c, g, or t
  misc_feature (3307)..(3308): n is a, c, g, or t
  misc_feature (3310)..(3314): n is a, c, g, or t
  misc_feature (3316)..(3320): n is a, c, g, or t
  misc_feature (3324)..(3324): n is a, c, g, or t
  misc_feature (3326)..(3335): n is a, c, g, or t
  misc_feature (3339)..(3341): n is a, c, g, or t
  misc_feature (3343)..(3347): n is a, c, g, or t
  misc_feature (3349)..(3350): n is a, c, g, or t
  misc_feature (3352)..(3355): n is a, c, g, or t
  misc_feature (3357)..(3358): n is a, c, g, or t
  misc_feature (3360)..(3360): n is a, c, g, or t
  misc_feature (3362)..(3362): n is a, c, g, or t
  misc_feature (3364)..(3364): n is a, c, g, or t
  misc_feature (3366)..(3366): n is a, c, g, or t
  misc_feature (3368)..(3376): n is a, c, g, or t
  misc_feature (3378)..(3380): n is a, c, g, or t
  misc_feature (3383)..(3386): n is a, c, g, or t
  misc_feature (3389)..(3398): n is a, c, g, or t
  misc_feature (3400)..(3404): n is a, c, g, or t
  misc_feature (3406)..(3412): n is a, c, g, or t
  misc_feature (3415)..(3416): n is a, c, g, or t
  misc_feature (3421)..(3421): n is a, c, g, or t
  misc_feature (3423)..(3423): n is a, c, g, or t
  misc_feature (3426)..(3429): n is a, c, g, or t
  misc_feature (3431)..(3433): n is a, c, g, or t
  misc_feature (3435)..(3438): n is a, c, g, or t
  misc_feature (3440)..(3442): n is a, c, g, or t
  misc_feature (3444)..(3446): n is a, c, g, or t
  misc_feature (3448)..(3451): n is a, c, g, or t
  misc_feature (3453)..(3457): n is a, c, g, or t
  misc_feature (3460)..(3467): n is a, c, g, or t
  misc_feature (3469)..(3473): n is a, c, g, or t
  misc_feature (3475)..(3475): n is a, c, g, or t
  misc_feature (3477)..(3478): n is a, c, g, or t
  misc_feature (3480)..(3481): n is a, c, g, or t
  misc_feature (3486)..(3489): n is a, c, g, or t
  misc_feature (3492)..(3493): n is a, c, g, or t
  misc_feature (3496)..(3496): n is a, c, g, or t
  misc_feature (3498)..(3514): n is a, c, g, or t
  misc_feature (3516)..(3520): n is a, c, g, or t
  misc_feature (3522)..(3524): n is a, c, g, or t
  misc_feature (3527)..(3535): n is a, c, g, or t
  misc_feature (3537)..(3540): n is a, c, g, or t
  misc_feature (3542)..(3548): n is a, c, g, or t
  misc_feature (3550)..(3552): n is a, c, g, or t
  misc_feature (3554)..(3555): n is a, c, g, or t
  misc_feature (3557)..(3562): n is a, c, g, or t
  misc_feature (3565)..(3566): n is a, c, g, or t
  misc_feature (3569)..(3571): n is a, c, g, or t
  misc_feature (3573)..(3578): n is a, c, g, or t
  misc_feature (3580)..(3581): n is a, c, g, or t
  misc_feature (3583)..(3588): n is a, c, g, or t
  misc_feature (3590)..(3590): n is a, c, g, or t
  misc_feature (3592)..(3594): n is a, c, g, or t
  misc_feature (3596)..(3602): n is a, c, g, or t
  misc_feature (3605)..(3607): n is a, c, g, or t
  misc_feature (3609)..(3609): n is a, c, g, or t
  misc_feature (3611)..(3611): n is a, c, g, or t
  misc_feature (3613)..(3615): n is a, c, g, or t
  misc_feature (3618)..(3628): n is a, c, g, or t
  misc_feature (3630)..(3630): n is a, c, g, or t
  misc_feature (3632)..(3632): n is a, c, g, or t
  misc_feature (3634)..(3643): n is a, c, g, or t
  misc_feature (3645)..(3648): n is a, c, g, or t
  misc_feature (3650)..(3653): n is a, c, g, or t
  misc_feature (3655)..(3661): n is a, c, g, or t
  misc_feature (3663)..(3663): n is a, c, g, or t
  misc_feature (3666)..(3668): n is a, c, g, or t
  misc_feature (3670)..(3675): n is a, c, g, or t
  misc_feature (3677)..(3678): n is a, c, g, or t
  misc_feature (3680)..(3680): n is a, c, g, or t
  misc_feature (3683)..(3688): n is a, c, g, or t
  misc_feature (3692)..(3699): n is a, c, g, or t
  misc_feature (3701)..(3707): n is a, c, g, or t
  misc_feature (3709)..(3710): n is a, c, g, or t
  misc_feature (3712)..(3719): n is a, c, g, or t
  misc_feature (3721)..(3727): n is a, c, g, or t
  misc_feature (3729)..(3732): n is a, c, g, or t
  misc_feature (3734)..(3735): n is a, c, g, or t
  misc_feature (3737)..(3745): n is a, c, g, or t
  misc_feature (3750)..(3750): n is a, c, g, or t
  misc_feature (3752)..(3759): n is a, c, g, or t
  misc_feature (3761)..(3763): n is a, c, g, or t
  misc_feature (3765)..(3776): n is a, c, g, or t
  misc_feature (3778)..(3780): n is a, c, g, or t
  misc_feature (3782)..(3783): n is a, c, g, or t
  misc_feature (3785)..(3787): n is a, c, g, or t
  misc_feature (3789)..(3790): n is a, c, g, or t
  misc_feature (3793)..(3793): n is a, c, g, or t
  misc_feature (3795)..(3800): n is a, c, g, or t
  misc_feature (3802)..(3804): n is a, c, g, or t
  misc_feature (3806)..(3807): n is a, c, g, or t
  misc_feature (3809)..(3809): n is a, c, g, or t
  misc_feature (3812)..(3812): n is a, c, g, or t
  misc_feature (3814)..(3818): n is a, c, g, or t
  misc_feature (3820)..(3820): n is a, c, g, or t
  misc_feature (3822)..(3826): n is a, c, g, or t
  misc_feature (3829)..(3838): n is a, c, g, or t
  misc_feature (3841)..(3841): n is a, c, g, or t
  misc_feature (3843)..(3844): n is a, c, g, or t
  misc_feature (3848)..(3850): n is a, c, g, or t
  misc_feature (3852)..(3856): n is a, c, g, or t
  misc_feature (3858)..(3858): n is a, c, g, or t
  misc_feature (3860)..(3864): n is a, c, g, or t
  misc_feature (3866)..(3870): n is a, c, g, or t
  misc_feature (3872)..(3873): n is a, c, g, or t
  misc_feature (3875)..(3879): n is a, c, g, or t
  misc_feature (3882)..(3886): n is a, c, g, or t
  misc_feature (3888)..(3889): n is a, c, g, or t
  misc_feature (3891)..(3892): n is a, c, g, or t
  misc_feature (3894)..(3897): n is a, c, g, or t
  misc_feature (3900)..(3902): n is a, c, g, or t
  misc_feature (3904)..(3915): n is a, c, g, or t
  misc_feature (3918)..(3926): n is a, c, g, or t
  misc_feature (3928)..(3929): n is a, c, g, or t
  misc_feature (3931)..(3935): n is a, c, g, or t
  misc_feature (3938)..(3938): n is a, c, g, or t
  misc_feature (3940)..(3940): n is a, c, g, or t
  misc_feature (3943)..(3944): n is a, c, g, or t
  misc_feature (3946)..(3949): n is a, c, g, or t
  misc_feature (3952)..(3957): n is a, c, g, or t
  misc_feature (3960)..(3961): n is a, c, g, or t
  misc_feature (3963)..(3969): n is a, c, g, or t
  misc_feature (3971)..(3984): n is a, c, g, or t
  misc_feature (3986)..(3986): n is a, c, g, or t
  misc_feature (3988)..(3989): n is a, c, g, or t
  misc_feature (3991)..(3993): n is a, c, g, or t
  misc_feature (3995)..(4000): n is a, c, g, or t
gaggtacttgggtatgaatgacagacgattaaagaattcgcagaaactgtttagagaaaattattttaagtaataatttgtttgtatttgtgacattcgtagtagcgaacgttgtttccataagagaataatcggtatttatttgcaaagtgatgctgactgtggagcgaatggtgatgtgatgaagaggtttaataaatagaaactgcttggaaaaatgtatctaacgaggtgatgtataaaccggaagttttttcctattgcaaaaaaaatctgaataatacagagttgtatgatttgagtcgcattctttcaatatctttagattatgtaaaaaatccggctaaaaagaacatgtttgtatgtgaaagatgaggtgaaaagtaggatttattttgataattcaatggaaaggttgtgttgtatacactggaagagtgagttacgaagtggtcatgccattatggaacagaaatatgatcgatttcatactaaatgattttatgattacaaatctgattttgaaacactttaataaaagaatgaattatgattaagaaaacactttatttcgggaatccggtttatctatcgttacgaaatgcacagttaatcattaaactgcctgatgttgaaaagacaatagctttgcctgaagtcttgaaaaaacaggcggaagtgacgaagcctatagaggatattggaataattgtgttggataacaaacaaattaccattacttccggtgtgttggaggctttgcttgaaaataattgctcggtaatcacttgtaatagtaagagtatgccggtcggactaatgcttcctctttatggaaataccacgcagaatgagcgttttcgtaaacaattggatgcttcacttccattgaaaaagcaactctggcagcaaactattcaagcgaagatcaacaaccaggcatctgtactcaaagattgtatgaacgaagaagtaaagtgtatgcgtgtgtgggcggctgacgtgcgtagcggtgatcctgataacttggaagcgcgtgctgcagcgtattattggaaattcttatttgctggcattgactgttttacgcgagatcgtgagggtgtttctcctaataacctattgaattacggatatgctattcttcgtgcagtagtggctcgtgggttggtaataagtggtttgcttcctactttgggcatccatcatcacaatcgatataatgcttattgtttggctgatgatataatggaaccttatcgtccttatgtggatgaattagtatttaacttgacacaggagtatggaaaagatgtggagttgacaaaagacataaaagcacggttgctgactgttccgacattggaagtggtaattggaggtaaacgtagtccgttgatggttgccgtaggacaaaccacttcctcactttacaaatgtttcaatggagaaattcgtcgaatagcttatcctgaacgataatggatcgctttagtgaatatcgtattatgtgggtacttgttttttttgatttgccgactgagacgaagaaagaaaagaaggcttatgcggactttagaaagaatctgcaaaaggatggttttactatgtttcaattttccatttatgtgcgtcactgtgctagtagtgaaaatgctacagtacatataaaaagagttaaatctttcctcccggagtttggacatgtcggaatcatgtgtattaccgataaacagtttggtaatatagaacttttttatggaaagaaaatgcagaatgttaatacgcctggacaacaattagagttattttaaaaaacaaaatctcgcattaatgcgagattttgtgctggaaacagactttttttcttttctaattttctttttaacttgttggaaatcattttgttatataaaatatgttgtttccaatggttcaaagatactaatttgaaagcaaatcacaacnnnnnnntnnnnnnnnnntnntnnnnnnnngttgtttccaatggttcaaagatactaatttgaaagcaaatcacaacnnnnnnnnnnnnnnnnnnnntnnnnnnntngttgtttccaatggttcaaagatactaatttgaaagcaaatcacaacnnnnnnnnnnnnnnnnnnnnnnnnnnnnnngttgtttccaatggttcaaagatactaatttgaaagcaaatcacaacnnnnnnnnnnnnnnntnnnnnnnnnnnntngttgtttccaatggttcaaagatactaatttgaaagcaaatcacaacnnnnnnnnnnnnnnnnnnnnnnnntnnnnnnttnttncnanngntnnaaanannnnanttnnaannnaanncanancnnnnnnnnnntcnnnnncnnnnnnnnnnnnnttnttncnanngntnnaaanannnnanttnnaannnaanncanaannnnnnnnntnnnnnnnnnnnnncnnnngngttgtttccaatggttcaaagatactaatttgaaagcaaatcacaacnnnnnnntcnnnnnncantnnnnnnnnnngnttnttncnanngntnnaaannnnnnanttnnaaannaannnnnancnnnannnnnnnnnnnannnnnnngnnntgnnttnttnnnnnnnnnnnaaanannnnnnttnnaannnaanncannacncnnnnnnntnnnnnnnnnntnnnnnnngnnnttttnnnnnnnnnnnaaannnnnnnnttnnaannnaaannnnnanntgnntnnanntnnnnnnnnatnnnnnnnngtttntnnnnnnnnnnnnanannnnnnnntnaaaanannacaanancnnnnntnnnnnnngnannnnnntnnnnnngnttnnnnnnannnnnnnanannanntannnnnnannnnannannnannnnncnnnnnnnnnnnnnnnnnngnnnnnnnttnttnnnattgntnnannnnanntannnnnnannnnannncnannnnnnnnnannnnnnnnannnnnnnnnnnnnttnnnnnnnnnnnnnnnannnnnnnnnnnnnnnannnnnnannannnnnnnngtnntnnnnnnnnnnnnnnnannnntnnnnnnnnnnnntnnnannnnnntnntnnnaannnnnannncnncnnnnnnnnnnnnnntnnncnnnnnnnnnnnnttntnnnnnntnnnnnnannnnnnnannnnnnnnnnnnacnacaannnnnnnnnannnnntnnatnnnnntnnnnnnntnnnnnnnntnnnananananannnnnnngnnnnnannnnnnnnnnnnnnnnnnannnnntnncnntnnntnnnnttnntnnnnntnnnnnaaantnnnnnnnnnnaaannnannnnnanngnnnngnntntntncntnnnnnnnnntnnnttnnnntcnnnnnnnnnnannnnntnnnnnnnaanncaaancnaannnnannnannnnannntnnnannnntnnnnnttnnnnnnnntnnnnnanannannttaannnnaanncanannnnnnnnnnnnnnnnntnnnnntnnnttnnnnnnnnntnnnntnnnnnnntnnnannannnnnnttnnaannnannnnnnannannnnnnantnnntnnnnnnnttnnntntntnnnttnnnnnnnnnnnananannnnnnnnnnannnnannnnannnnnnntnatnnnannnnnncnntnttnnnnnngttnnnnnnnntnnnnnnntnntnnnnnnnnannnnnnnannnnannannnnnnnnntttgntnnnnnnnntnnntnnnnnnnnnnnntnnntnnannntnntangnnnnnnannnannanaangnnnnngntnnnnnatnnnnnnnnnnttntnntttnnntnnnnnanannnnntnnnnngnnannnnnaannnnnannanntnnnnttnnntnnnnnnnnnnnngtnnnnnnnnntnntnnnnnaanantannannnnaannnnnnacnncnnnnnnngnnnnnnnnnnnnnnangnntnnntnnnnnn

SEQ ID NO: 752 - DNA, 4000 bp, Escherichia coli
  misc_feature (1985)..(1985): n is a, c, g, or t
  misc_feature (2002)..(2002): n is a, c, g, or t
tgcaacacgaaccggcgcgtttaccgctcttgttaccagcctttatgatggcgttattccgggctggtttgcgctgatcatgacgccgcttggtatgatgctggcctcggttgtcggggtccatccggtgatcagcagcacggcatttctggcggtgtttagcggtggtcatgccgatgtgcatccggcattattgatgcaggcgcatctaatcggatggggcgcgggaacgatgagttcggttgcgtcactttcggtgattaccggtgccaatctgtttcgagtgcgatcgcgtgatttggttcttgggccgaatttatggacagctttggcctatgcggtcgttggcggggtggcattatgtttggtaaatatggtgatctagccaatcataaagtgatgattgtaaaacagcacgaaacggattttgcggagcgtcggggatgaagaaatcaataattgtgattggcggcggcattgttggcgttgcggcggctttacagcttcagcttgatgggcatcaggtacgcttgatcgaccggcgacagccgggccgcgaaacctcatatggcaatgctggcgtattgtcggattcgtcggttgtcgtgctgaacaatccggggcttatcaaggcattgccaaaattgcttttgaaccggtcgaatggtctttggtacaatccttttttcgtgttgcggcggcttggctggttcgtccggtttctggcgcattgccgtccgtcgcatgtcaaacatgccgcccatgccttgcgggcgttgctgcaattatcgttaggccagcataaaaaatggatcaaggccgctggcgttgagcatctgcttcgtcatggcggtggctggtttaaactgttccgaaccgaaaaaggctttgccaattatgcggctgaaatcgaaatcatgcgcgaggtcggggtttcattttcggtctttgatcgcgagcaaatccggcaaatcgaacccgggcttgcgccaatctaccacaagggcgtgctgatggatgagacctgtgccgtgtccagccccgctgatctgaccgatgcttatcttgcgttattcaaagcggccggcggtgttgttgattgcgtgaccataaccggtctggcgcgcggtgatgatggttggcaggtgcgaggtgacaatgatacatcatttcacagtgatgatgttgtgctggccgcaggggcatggtcggccgaaattgctggctggcttggctatgatattccgatggcttgggaacggggctatcacctgcatttcgaagctggcgatcagccaatggtcacaaggcccgttcttgatgttgaaggtggctttgttgtcgcgccaatgcggcagggtttgcgggtgacatcaggcgttgaattgaccgatcgtgacgccccacccaattttgggcaaatcacccgatcagctgccttggcgggcgaggcggtcaagctcggcaagcagatcgaagacacgccatggatggggcggcgaccaacgcttgttgattcgctgccaatgattggtgccgcaccgcgccatgatgggctgtggttcaatttcgggcatcatcatattggtctgtcgatggcacccggatcggcattgctattggcagccttgataaaagagacgccgccgccgattgacccggcaccttttcgggcggatcgattttcgatttgaacaggtgattggtcgccagcggcgcgtgtttttcagcgttttggcagcagcttgatcattttggctgggtgattctggtcgttttcagattcagtaggtttgtgactgcgattaagccccgacaactgcatggtttgccttttcgtttatcaaccggcaaacaaacacgaaatcgcaggaagctattcaaaagtagaattattttttccaatacatctttttttggccttgcaacattgggttggataaacgacattttccttggcaaacctaatttattgattgataaantactggttcacgctaantttgcccaccacaaaatcggcgggcaaagccgatttcgataacttggaggaaataaatgtctgatttgaacagaagaaaattcctgcgtggttcagcagtagccggtgcggctgcggttggttcacttgcagcgccgtctatcgcgaatgcggcacctgtgactttgaaaatgcaagcagcctggggcggcggtattttccttgaaaatgcaaaatcatatgttgatcgcgtgcatgcaatggctggtaaagatctgaaaattgatcttctgtcagttaacgctgttgtgaaaacaagccagatgcaggacgctgtgcatcgcggtgttcttgacgctgcgcattatgtcccagcttactggtattcaaaatcaaagacagcttcattgtttggaactggcccatgttttggttggtcttcacaagaagttctcggctggtgccattatggcggcggcatggagctgttcaatgagctgatgggtaagcttggcctgaatgttgtttcattcttcaacagcccaatgccagcacagccacttggttggtttaaagaagaaatcaaagacgcttcacagatgagcggcctgaaataccggactgttggtctggctgcggacgttttgatggaaatgggcatgtctgttgttcagttgcctggtggtgaaatccagccagcaatgaaatctggcctgattgatgcggccgagttcaacaacccgacatctgaccgtgactttggtatgcaggatgtgtcgaaagactatcatctggcatcattccaccagtcacaggaattctttgaagtgaccttcaacaagaagaagttcaactcgcttccatcagagctgcagtcaattctgcaatatgcttctgaggcagagaattcaaacttctactggaacaacacaaagcgttattcagatgatttgatcaagctacagaacgaaagtggcgttcgggttcaccggacaccagattcagtgatgcaagcccagctcaaagcatgggatgttgttgttgatcgtttgtcagctgaagatgagttcttcgccaaagtcattgcttcgcaaaaagcatatgccaaggacgtgatgaactatctgaacctgaaccagcctgattacaagctggcttataatcaccatttcggctagaccgtcgcggtttgaaatatcatgtccagaaggccgcttgcggccttctggatttattgttcgcatgttctggagacatggatgacacaatttgtttatgccattgaaagcttgagtatctggtttggccgtgcctttggctggtgcattctggtgctgacgttttcagtgtcttatgaagttttcgttcgttatgttttgaacgctcccaccgtttgggcgtttgacatgatgattcaaatgtatggggcgctgttcttgatggcggggccatatgcgttagcgcaggacacccatgtccgcggcgatgttctttaccggctatttccggtgaaatggcaggcccgcgttgattttgttctctatttgattttcttcttccccggcatgctggcgctattctggtttggctgggaaatcgcttcggacagctggcgctacaaagaagtcagctggaattcgccggcgcgtattcagatctatttcttcaaaaccttgatcccgcttgccggtgtgttgctgatcttgcaaggcacggccgaattggtgcgctgttggaaagccatgaaaaccggtgtctggatggaccggcttgatgacgtcaaggaaaccgaagacagattgattgaacaggctgagcggaattaaccgctcgcccctttgccaacctttttggttgaaaagagtgataagaaatgaccaatcctgaaattgccattgtgatgctgtgcctgtttattttgctggtactgcttggattcccgattgcctttacccttcttgcgatgggcatcggatttggctattacgcctattataccgaaggcgcgacaagctttgc

SEQ ID NO: 753 - DNA, 4000 bp, Escherichia coli
  misc_feature (50)..(50): n is a, c, g, or t
  misc_feature (176)..(176): n is a, c, g, or t
  misc_feature (179)..(179): n is a, c, g, or t
  misc_feature (297)..(297): n is a, c, g, or t
  misc_feature (341)..(341): n is a, c, g, or t
  misc_feature (350)..(350): n is a, c, g, or t
  misc_feature (361)..(361): n is a, c, g, or t
  misc_feature (365)..(365): n is a, c, g, or t
  misc_feature (410)..(410): n is a, c, g, or t
  misc_feature (458)..(458): n is a, c, g, or t
  misc_feature (471)..(471): n is a, c, g, or t
  misc_feature (486)..(486): n is a, c, g, or t
  misc_feature (561)..(561): n is a, c, g, or t
  misc_feature (572)..(572): n is a, c, g, or t
  misc_feature (578)..(578): n is a, c, g, or t
  misc_feature (582)..(582): n is a, c, g, or t
  misc_feature (1161)..(1161): n is a, c, g, or t
  misc_feature (1531)..(1531): n is a, c, g, or t
  misc_feature (1988)..(1988): n is a, c, g, or t
  misc_feature (2437)..(2437): n is a, c, g, or t
  misc_feature (2470)..(2470): n is a, c, g, or t
  misc_feature (2722)..(2722): n is a, c, g, or t
  misc_feature (2851)..(2851): n is a, c, g, or t
  misc_feature (3607)..(3607): n is a, c, g, or t
atgtggataattttaaagaaataattttaatgtatgatgaattaacaccnccagaattatttgaaagttcagtggcattattaaaaatctcagctgaaactcaactggatagtgatttgcaattcattaaatggattaaaacaggagatgaagcagccaaaattagatcagatgcnttnattcaagaagcatatgaatttcaaaatttaggtttagtagaatttcaaacagctaagatgggcataaaacattatgtcggaggagaaaaatttgaacaaccacaaggtgtttcagcanaaaaagtagtacaagtatcagaaaaaatgaaagagagatgtganggagaattnagaaatgagtnaggngaatttgattccaatgaaatagaaatagaatggttcaattgtaanaacaatgcagaagaatggaaaatggaccatctaccataaattaagatnttaaaattagagnaattcagatttttgnaataaattcaaaatagaatacaattcttctagtaaatgagatttttctaaagaagtaggttttgaaaatttaatnggaaatgtcanagtcancatntcttgatcagtgtgagaaattccaacaaaatgagatttattattaatagtagcaagaaaatcattccatttttgtaaatgagtgtatacacgagtaacattttgttccacttcagaaatagtcgtattcaaatcagtgtcaaataatttgaatttaacaagaggaatcataatcataccacctaaaatttgatcatgattttttattttagataaaataacatcctcaggattttttattgaagaaagatcaccataatcaggatcaaaataacctgcaatcaattttgtagagtcataaattctaaaatatccatcttcaaattctaatttccacacagtcaagaaaataattctaaaaaactaactactaaacttttatgataaggtataatgtgtttgataatccaggcatgcaaataattagaatattttaattatttttatctattaattctaatgccttttgtaaagatatttcaagttcattaattcgtgttctaagttcgatattttcatccctcaaagaatctctttctttagtaagtatttcattaagatccataaagaaatgaaaaangacaacctatttctatattacacatttctaatagtcacaaaaaacaagtgattgatagaaattaaaatgtataagaatttactaatttttcatccaatgttttgatttcaaaaatatcttttaaaaaatatttttgttttacatgcttgttgcaaagtaatacagatgatttagaatcaccaacatgatatacagtaagattaattggtttttcattacagcatattctacttactgcaattccagtttcttgtattgccatttcaaaccagattaatttttgaattttattaagatgacgaattgattgtaaagttaaagtttgttttttaatttgtcgtaaaatttttcttatttcaggggataaatnctctaacaacaaagggaataaaaatacggtttagataagtttatcagatttaaaaataattaaaaccaaaaaataatttcttagaaatataataaaaattgtcaataatgtcattaaaaaagaatttagtaaagataattaaataaacttgaaattaaataaagagtatgacaatttcaaaagaaaatagagaatttgtagatagtttaattgattattacattagtgaatcagaatcatatagacaaattgcagaaaactttctgccagaaattgaatcaattccagatacagcatttggcatcattactggatgtgtttattcaggatttttacaagcatatcaaaatcagcaacaaacacccagtttagaagacattaaagagttcaatcaaatgataaaaaacaaggcattattaatcaaaaaatcaatttcaggctcaatgaacaaagaagnagataaggaaaaaatctaaaagattagaattaagcgtaaatctacaaaaatatacaaaatcataataaaattaattgtaaaaatcagtacagtttaattggaattattaaaaaattgcattatgaagattgatggtagtaaaattatttttggtttaggagtagcatcagctgtagcaactgcagtaatttcattgtatttttcaattcgttaaagataaatcataaagattaagccaaaaggcattgtcagcaataaatgaatttaaaattacacagattgtagataatggtcaaatgatacaattaacattaattgaaaatgtttccacagaacctatttcacaaaaacaaatgattattgaaaacgtttctaaaaaattggatgcagagacaaaagaacaagtaatgccattgttagaagcaatcttacaagcacaaccaacagtnaatatgaaatcatatcaacaaacacaaatcacnatagccatgccaaaatcaagatatgataatatgggcagacctcaagtgggtaatgtaatagatgttaatttgaaaaaaatttaaagttttgaattaacttcatctaaagtatgcaacggtaatgaacaagaaaagtttttacaaataaaaacagaagtattatcttcaaaagattttccagtaaagaaaggatattcagagagattttttaattgatcaggattttgaattgtcaccataaaagaattaggnaaataatttgtaaataatgatttacaaatctcagaattttcagaattaataatagtgatttcaacaggtttttccaaatacaaagaaagagtatttagcaaatatccaaatccaaatggattttcagcngcaatttgtgcctgagattccattattttgatagcaatatcaagaaaagattgctcttgagacaaatgatacaatctcaacattacaaaagaagaaacagaattaccagaaggcaaagataaatcataattactctttggacgaataattaatttctcatgatcatcagaagtcataaagaaactattattttcagaatcccagaaatgatcaattagatgattaccaagagttaatgcaagtttaagatatttagaattaggttcaatttcaaatacatccaacaatgcattaacaaaataagagtaatcttcaagataaccattaatttttgcaatgccatttttgtaagttctcaataatttaccatcaacaaacagatttttttctataaaggaaatacaatttttagcagcatttagatatcttacatcatttgtaacacgataaccttttgcaaaagcagttatcattaatgaattccaagaaactaaaactttatcatccaatccaggagtaattctttttgatcttacttgcaataatttttttgaacaagaattaattatttcatgtactttttgttctgaaattccaaaattaaatgcaactgtagaagggttaagattattacaaagaatactatttccttcccaattgccaccatcagttacatcaaaataaagacaaaagagatcagcatcatctccaagaatttctttaatttcacgtttagtccaaacataaaatttaccntctacaccttcagaatctgcatcatatgcagaataaaatccaccttcagaagaagtcatgtcacgtaaaataaaatcaagagttttttgtaaaacatcaaggtagaatggatctttagtaatttgatatgcttcacagtaatttacaggcatcaaggcattatcataaagcattttttcaaaatgaggaactaaccattttgtatcagtagaatatctatgaaatccacctccaatttgatcaaaaataccaccctttgccattttgtttagagtctttaatgcaaattcagtaaattttggtaaattagccatctgtgcatatctaaacaaaaatgaaatgtttgcagcatttggaaatttaggggcagagccaaatccaccatatgtagga

SEQ ID NO: 754 - DNA, 4000 bp, Escherichia coli
  misc_feature (476)..(476): n is a, c, g, or t
  misc_feature (1124)..(1124): n is a, c, g, or t
  misc_feature (1982)..(1982): n is a, c, g, or t
  misc_feature (1988)..(1988): n is a, c, g, or t
  misc_feature (3814)..(3814): n is a, c, g, or t
ttgttttttagcaaatcgtatggcttgattggccgtgttgattgattgagttattttttcgcagctcctgcgaaggctctggctgatacgcttgctcccagccaattcaacacccttgtccttcaggaacccgttcaggtgctggaataaatcctcgggttttaactttttcatcatagcctttgcgcaccagaacaaatgttaacttatcacaagcgcaaatctttgcaaaaaaaatgcgggaacgttccattcagtttaatggattttgtttccatggccatgggataacttgcgcatcttcagcccatttctgccactccttagcgaggctttctgcacgctttggaaatttgtgtgccacatttctcatttcgctgcgatcctctttcaggttgtaaagttcccagtctgagttggatgcatgagagaggttgtttttgcggactaacttccaatcgccaacccttacggcncaattggcttcgtgttcccaaaagagctttcgatccttgaggcgttggcccttgatgacaggcaaaagactcgttccctgcatgggctgtatggcgttcccaccttcattcagtgggtaggtagctcccgcggcatccatgaacgtagccatgatatcgatgatgtgaccgggctcgtgtgtgatgcttccgggttgcttgatttgattgggccagtgcatgatcagaggggttgcaatgcctccttcatgaacccagtgcttgtattcgcgaaaaggcgtattggatacgttcgcccagtgctggccgtaggctatgtaggtgtcggctgggccaggcatgacctcaggtcctcctctaaccggcaggccttcacgtgttttcataggaggccaaagtttgggttgaagttcgtccgcacccatcggcttggtatcgggaatggctccgacccagcgatcgttgatatcacgacctcttcccatgccctcggcacatcctccattgtcctgtaggtagcatatcaatgtattgtcgagtgcgtcttgcgcttttaagtatgccacaattcggccgataccctgatccatgcgatcgaccatggcagcgtagacttccatgcagcgctcttcccacggtttattctcnacttgctcccagtcgcctgcaccggggcttaaaatggtatcagatggaatcaggccgagttggatcagcctttcatagcgcctatgtcgggtgaatgaatagcctcggcgatagacccccttgtaagcttcaatatcttcaggtagggcatgcatgggccaatgagctgctgtgtaggaaagataaaggaaaaagggtttatcagtgggtgaacgatggtgtttttccaggaagttgatggcgttatcggtgatggcatcggtatagtagtaggtctctggcttgtattcggaatcattttccggagtgatgaaggtattctgacggcacaaagtgttggggtcgtaaaaactgcctgcaccaatgatcgttccatagaattgatcaaagcctcgctgtagcggccaggtatgctttggtccatcgggaagggtgtgggtggtgacatgccacttgccgctcatataagtggcatacccgttgattcttaaagcttcggcaagggtgaggcagttttggttcaacccggtttgataacccggtaagccttgattttgaagcatgtggccgacaccggtctggtgagcataaagaccagttaaaagagacgcccgggttgggcagcagcgagcaccattgtaaaattgagagaagcgcatgccattggctgcgagtcgatcgaggtttgaggttcggatttcaccgccatagcagcccagatcagagtatcccatgtcatcagccataatcagcaagatgttcggattggagccagcttgcagtgcacacgcctgctgtagccagagcaatgccatcatgccagtaaataggatcaatggagccgaaccgatcatgggnatgacnctaccctgcatgaagcgtggtggcagcacaaggatgaagcctcatggattggtttaaacattgaagtcatgaggtccttgaggcaaaaaactgatctgctgtccgtgacagcgaagagcttgaattgataccatgcccaagaaccaattgactgaaaaagaagtctttgaacttctacagaacgtcctatcacaaaccactcaggactcaaacctggcacaaaaaattctggatgccatccgcaaggaaatggaacgaaaacgtcaatctgctgcgttccatgagttttgtcgtcgttgcccgctgcccgatctcaaggtagagacgctcaaggaagtcagtcagcgatttgaagataactttggaagggatttggtggactttgccatcgatgaagaagaggggctgctgaacgtggaactcaacctgcctaccgggtcccttatgagctcaattggtatcaacgacctgccttgggaggagcaggaactggaaccagaggtcaagataaagattgtgccttttccggtggtcatgcccggagataaggaactggtttggatgctgggacgtcgagaaactatgacgccacaggaagggcttcgcgccctgcttgaggtccaggccgatttttgggaatcgcgcagtgggcaattgcaacttcgcaagggagctgaacgcaccttccctgaattcatgcagcgtgtcccagctaagctgctcaacgaggcaggtttgaggcgccattataaggatgccgaggccataaccgtcatgagacgagagcttccttgaggcgatgaaaaaggcgtgatccatcctgcgatggccgcattgactggtggtgtgtttgtgagagtctcagcacaagggttgatccctaggagaaagtgctgggtcagttttgtaggatttgtatgaaggttacttcacattggttgatgaattctcgatgaaaagccgaccgcgtattggcgaggtggacaccctcgattttttgaccgagccacctcatgctattgacttttccgatcaagtcatgcccagcgtgctatccacaccgtggctgatctggtttcttgagcacactgctcgccagttgatgctgccccatcttgagcagtcagaaagcacggtgggtgccagggtagaggttgagcacctggctcctacgccaatgggaaaaatggttcgttgtcaggccaaactcatttttgcagaccagcggctgttttcctttgagctgagagcttgggatgatcaggacctcatcgctcgcggaacacataagttgaaagtcattcgtaaacagcgattggctgatgtcatcgaagcgaagcaaaagggcagatgatggcacaaggcaaacatcctaacactttagcagtatctgctcaatgaagggacctgattcctgtcgtccaaatctcagcgatccctcggcctttctctggtccaggggattcctcacggcatgcctcgtgctcttaggtcattatttttgtttgagaggtgatgctttgccctctgaggtggtttgtgatggacaatacaagggccatctgcagggcgttgccctcgatgaacagtttatctattggtcgcacactgtgacactggtcaagtcggatttggagggcaaacttgtcaagcaggtagaggtcgcctcacatcatggagacctgactttggctcagggaaaactatatgtggcagtggagcttggagcctttaaccaactggctggggcatcagaaccatgggtttacatctatgatcccatcgatttgcgtttgcttgagcgcattgaggtgccgcagctagtncacggttgcggggcgattagttaccacgatgaccggtttctgttggccggcggcttgcctgagtcttacagccagaactatctattcgaatttgatagcaggctgaattttatcgcgcggcatgaattggccagtggttataccaaactcgggattcagactctggcgcgtgttgagggtcactgg

SEQ ID NO: 755 - DNA, 4000 bp, Escherichia coli
  misc_feature (1)..(1): n is a, c, g, or t
  misc_feature (3)..(3): n is a, c, g, or t
  misc_feature (5)..(5): n is a, c, g, or t
  misc_feature (7)..(8): n is a, c, g, or t
  misc_feature (11)..(16): n is a, c, g, or t
  misc_feature (18)..(22): n is a, c, g, or t
  misc_feature (24)..(26): n is a, c, g, or t
  misc_feature (28)..(28): n is a, c, g, or t
  misc_feature (30)..(30): n is a, c, g, or t
  misc_feature (32)..(32): n is a, c, g, or t
  misc_feature (34)..(38): n is a, c, g, or t
  misc_feature (40)..(40): n is a, c, g, or t
  misc_feature (42)..(48): n is a, c, g, or t
  misc_feature (52)..(55): n is a, c, g, or t
  misc_feature (57)..(61): n is a, c, g, or t
  misc_feature (64)..(65): n is a, c, g, or t
  misc_feature (67)..(69): n is a, c, g, or t
  misc_feature (71)..(71): n is a, c, g, or t
  misc_feature (73)..(73): n is a, c, g, or t
  misc_feature (76)..(77): n is a, c, g, or t
  misc_feature (79)..(81): n is a, c, g, or t
  misc_feature (83)..(83): n is a, c, g, or t
  misc_feature (86)..(88): n is a, c, g, or t
  misc_feature (90)..(91): n is a, c, g, or t
  misc_feature (93)..(94): n is a, c, g, or t
  misc_feature (97)..(99): n is a, c, g, or t
  misc_feature (104)..(104): n is a, c, g, or t
  misc_feature (106)..(107): n is a, c, g, or t
  misc_feature (109)..(116): n is a, c, g, or t
  misc_feature (118)..(119): n is a, c, g, or t
  misc_feature (121)..(122): n is a, c, g, or t
  misc_feature (126)..(130): n is a, c, g, or t
  misc_feature (132)..(132): n is a, c, g, or t
  misc_feature (134)..(135): n is a, c, g, or t
  misc_feature (137)..(137): n is a, c, g, or t
  misc_feature (139)..(142): n is a, c, g, or t
  misc_feature (144)..(145): n is a, c, g, or t
  misc_feature (147)..(147): n is a, c, g, or t
  misc_feature (149)..(149): n is a, c, g, or t
  misc_feature (151)..(152): n is a, c, g, or t
  misc_feature (154)..(156): n is a, c, g, or t
  misc_feature (158)..(158): n is a, c, g, or t
  misc_feature (160)..(161): n is a, c, g, or t
  misc_feature (163)..(163): n is a, c, g, or t
  misc_feature (166)..(172): n is a, c, g, or t
  misc_feature (177)..(178): n is a, c, g, or t
  misc_feature (180)..(183): n is a, c, g, or t
  misc_feature (187)..(190): n is a, c, g, or t
  misc_feature (193)..(196): n is a, c, g, or t
  misc_feature (199)..(201): n is a, c, g, or t
  misc_feature (203)..(203): n is a, c, g, or t
  misc_feature (205)..(206): n is a, c, g, or t
  misc_feature (208)..(211): n is a, c, g, or t
  misc_feature (214)..(216): n is a, c, g, or t
  misc_feature (219)..(220): n is a, c, g, or t
  misc_feature (222)..(222): n is a, c, g, or t
  misc_feature (225)..(229): n is a, c, g, or t
  misc_feature (231)..(240): n is a, c, g, or t
  misc_feature (244)..(245): n is a, c, g, or t
  misc_feature (247)..(249): n is a, c, g, or t
  misc_feature (251)..(254): n is a, c, g, or t
  misc_feature (258)..(260): n is a, c, g, or t
  misc_feature (262)..(262): n is a, c, g, or t
  misc_feature (265)..(267): n is a, c, g, or t
  misc_feature (270)..(275): n is a, c, g, or t
  misc_feature (280)..(285): n is a, c, g, or t
  misc_feature (288)..(288): n is a, c, g, or t
  misc_feature (292)..(292): n is a, c, g, or t
  misc_feature (295)..(296): n is a, c, g, or t
  misc_feature (301)..(307): n is a, c, g, or t
  misc_feature (312)..(315): n is a, c, g, or t
  misc_feature (317)..(319): n is a, c, g, or t
  misc_feature (321)..(322): n is a, c, g, or t
  misc_feature (324)..(325): n is a, c, g, or t
  misc_feature (327)..(328): n is a, c, g, or t
  misc_feature (331)..(335): n is a, c, g, or t
  misc_feature (337)..(345): n is a, c, g, or t
  misc_feature (347)..(351): n is a, c, g, or t
  misc_feature (353)..(364): n is a, c, g, or t
  misc_feature (367)..(379): n is a, c, g, or t
  misc_feature (381)..(388): n is a, c, g, or t
  misc_feature (391)..(393): n is a, c, g, or t
  misc_feature (397)..(400): n is a, c, g, or t
  misc_feature (406)..(409): n is a, c, g, or t
  misc_feature (412)..(420): n is a, c, g, or t
  misc_feature (422)..(422): n is a, c, g, or t
  misc_feature (424)..(431): n is a, c, g, or t
  misc_feature (433)..(433): n is a, c, g, or t
  misc_feature (438)..(440): n is a, c, g, or t
  misc_feature (446)..(453): n is a, c, g, or t
  misc_feature (458)..(463): n is a, c, g, or t
  misc_feature (466)..(470): n is a, c, g, or t
  misc_feature (473)..(475): n is a, c, g, or t
  misc_feature (481)..(481): n is a, c, g, or t
  misc_feature (486)..(498): n is a, c, g, or t
  misc_feature (503)..(509): n is a, c, g, or t
  misc_feature (512)..(512): n is a, c, g, or t
  misc_feature (515)..(519): n is a, c, g, or t
  misc_feature (521)..(521): n is a, c, g, or t
  misc_feature (525)..(526): n is a, c, g, or t
  misc_feature (529)..(530): n is a, c, g, or t
  misc_feature (533)..(536): n is a, c, g, or t
  misc_feature (539)..(539): n is a, c, g, or t
  misc_feature (550)..(553): n is a, c, g, or t
  misc_feature (557)..(557): n is a, c, g, or t
  misc_feature (560)..(561): n is a, c, g, or t
  misc_feature (565)..(568): n is a, c, g, or t
  misc_feature (572)..(574): n is a, c, g, or t
  misc_feature (577)..(577): n is a, c, g, or t
  misc_feature (580)..(581): n is a, c, g, or t
  misc_feature (584)..(590): n is a, c, g, or t
  misc_feature (594)..(596): n is a, c, g, or t
  misc_feature (598)..(599): n is a, c, g, or t
  misc_feature (602)..(607): n is a, c, g, or t
  misc_feature (613)..(617): n is a, c, g, or t
  misc_feature (623)..(626): n is a, c, g, or t
  misc_feature (629)..(633): n is a, c, g, or t
  misc_feature (636)..(646): n is a, c, g, or t
  misc_feature (649)..(653): n is a, c, g, or t
  misc_feature (656)..(660): n is a, c, g, or t
  misc_feature (663)..(664): n is a, c, g, or t
  misc_feature (667)..(671): n is a, c, g, or t
  misc_feature (677)..(678): n is a, c, g, or t
  misc_feature (682)..(683): n is a, c, g, or t
  misc_feature (687)..(700): n is a, c, g, or t
  misc_feature (708)..(711): n is a, c, g, or t
  misc_feature (724)..(726): n is a, c, g, or t
  misc_feature (728)..(729): n is a, c, g, or t
  misc_feature (732)..(736): n is a, c, g, or t
  misc_feature (739)..(739): n is a, c, g, or t
  misc_feature (742)..(750): n is a, c, g, or t
  misc_feature (752)..(755): n is a, c, g, or t
  misc_feature (758)..(759): n is a, c, g, or t
  misc_feature (761)..(762): n is a, c, g, or t
  misc_feature (765)..(768): n is a, c, g, or t
  misc_feature (770)..(772): n is a, c, g, or t
  misc_feature (774)..(775): n is a, c, g, or t
  misc_feature (778)..(781): n is a, c, g, or t
  misc_feature (784)..(787): n is a, c, g, or t
  misc_feature (790)..(792): n is a, c, g, or t
  misc_feature (796)..(797): n is a, c, g, or t
  misc_feature (800)..(805): n is a, c, g, or t
  misc_feature (810)..(812): n is a, c, g, or t
  misc_feature (815)..(816): n is a, c, g, or t
  misc_feature (824)..(827): n is a, c, g, or t
  misc_feature (832)..(837): n is a, c, g, or t
  misc_feature (840)..(844): n is a, c, g, or t
  misc_feature (848)..(849): n is a, c, g, or t
  misc_feature (853)..(855): n is a, c, g, or t
  misc_feature (858)..(867): n is a, c, g, or t
  misc_feature (870)..(874): n is a, c, g, or t
  misc_feature (877)..(894): n is a, c, g, or t
  misc_feature (897)..(903): n is a, c, g, or t
  misc_feature (907)..(909): n is a, c, g, or t
  misc_feature (912)..(914): n is a, c, g, or t
  misc_feature (917)..(919): n is a, c, g, or t
  misc_feature (922)..(924): n is a, c, g, or t
  misc_feature (929)..(929): n is a, c, g, or t
  misc_feature (932)..(932): n is a, c, g, or t
  misc_feature (935)..(938): n is a, c, g, or t
  misc_feature (942)..(943): n is a, c, g, or t
  misc_feature (946)..(946): n is a, c, g, or t
  misc_feature (949)..(949): n is a, c, g, or t
  misc_feature (953)..(958): n is a, c, g, or t
  misc_feature (962)..(964): n is a, c, g, or t
  misc_feature (967)..(973): n is a, c, g, or t
  misc_feature (976)..(977): n is a, c, g, or t
  misc_feature (980)..(981): n is a, c, g, or t
  misc_feature (984)..(985): n is a, c, g, or t
  misc_feature (988)..(991): n is a, c, g, or t
  misc_feature (994)..(995): n is a, c, g, or t
  misc_feature (999)..(1006): n is a, c, g, or t
  misc_feature (1009)..(1010): n is a, c, g, or t
  misc_feature (1012)..(1016): n is a, c, g, or t
  misc_feature (1021)..(1021): n is a, c, g, or t
  misc_feature (1026)..(1030): n is a, c, g, or t
  misc_feature (1033)..(1034): n is a, c, g, or t
  misc_feature (1038)..(1038): n is a, c, g, or t
  misc_feature (1041)..(1041): n is a, c, g, or t
  misc_feature (1046)..(1049): n is a, c, g, or t
  misc_feature (1053)..(1058): n is a, c, g, or t
  misc_feature (1063)..(1064): n is a, c, g, or t
  misc_feature (1067)..(1067): n is a, c, g, or t
  misc_feature (1071)..(1071): n is a, c, g, or t
  misc_feature (1076)..(1078): n is a, c, g, or t
  misc_feature (1081)..(1083): n is a, c, g, or t
  misc_feature (1087)..(1087): n is a, c, g, or t
  misc_feature (1090)..(1095): n is a, c, g, or t
  misc_feature (1098)..(1103): n is a, c, g, or t
  misc_feature (1107)..(1107): n is a, c, g, or t
  misc_feature (1111)..(1114): n is a, c, g, or t
  misc_feature (1119)..(1120): n is a, c, g, or t
  misc_feature (1123)..(1123): n is a, c, g, or t
  misc_feature (1127)..(1147): n is a, c, g, or t
  misc_feature (1150)..(1152): n is a, c, g, or t
  misc_feature (1156)..(1159): n is a, c, g, or t
  misc_feature (1161)..(1161): n is a, c, g, or t
  misc_feature (1165)..(1165): n is a, c, g, or t
  misc_feature (1168)..(1175): n is a, c, g, or t
  misc_feature (1178)..(1183): n is a, c, g, or t
  misc_feature (1186)..(1188): n is a, c, g, or t
  misc_feature (1191)..(1194): n is a, c, g, or t
  misc_feature (1197)..(1201): n is a, c, g, or t
  misc_feature (1208)..(1210): n is a, c, g, or t
  misc_feature (1213)..(1213): n is a, c, g, or t
  misc_feature (1216)..(1217): n is a, c, g, or t
  misc_feature (1221)..(1224): n is a, c, g, or t
  misc_feature (1226)..(1228): n is a, c, g, or t
  misc_feature (1234)..(1237): n is a, c, g, or t
  misc_feature (1241)..(1241): n is a, c, g, or t
  misc_feature (1244)..(1246): n is a, c, g, or t
  misc_feature (1248)..(1251): n is a, c, g, or t
  misc_feature (1254)..(1257): n is a, c, g, or t
  misc_feature (1261)..(1261): n is a, c, g, or t
  misc_feature (1264)..(1268): n is a, c, g, or t
  misc_feature (1273)..(1289): n is a, c, g, or t
  misc_feature (1293)..(1293): n is a, c, g, or t
  misc_feature (1298)..(1301): n is a, c, g, or t
  misc_feature (1304)..(1307): n is a, c, g, or t
  misc_feature (1309)..(1310): n is a, c, g, or t
  misc_feature (1315)..(1315): n is a, c, g, or t
  misc_feature (1320)..(1322): n is a, c, g, or t
  misc_feature (1328)..(1338): n is a, c, g, or t
  misc_feature (1342)..(1344): n is a, c, g, or t
  misc_feature (1349)..(1354): n is a, c, g, or t
  misc_feature (1358)..(1369): n is a, c, g, or t
  misc_feature (1374)..(1379): n is a, c, g, or t
  misc_feature (1382)..(1383): n is a, c, g, or t
  misc_feature (1386)..(1387): n is a, c, g, or t
  misc_feature (1389)..(1390): n is a, c, g, or t
  misc_feature (1392)..(1392): n is a, c, g, or t
  misc_feature (1394)..(1396): n is a, c, g, or t
  misc_feature (1398)..(1399): n is a, c, g, or t
  misc_feature (1403)..(1403): n is a, c, g, or t
  misc_feature (1408)..(1408): n is a, c, g, or t
  misc_feature (1411)..(1411): n is a, c, g, or t
  misc_feature (1418)..(1418): n is a, c, g, or t
  misc_feature (1422)..(1422): n is a, c, g, or t
  misc_feature (1985)..(1985): n is a, c, g, or t
  misc_feature (2356)..(2356): n is a, c, g, or t
  misc_feature (2776)..(2776): n is a, c, g, or t
  misc_feature (2911)..(2911): n is a, c, g, or t
  misc_feature (3656)..(3656): n is a, c, g, or t
  misc_feature (3665)..(3665): n is a, c, g, or t
  misc_feature (3680)..(3680): n is a, c, g, or t
  misc_feature (3686)..(3686): n is a, c, g, or t
  misc_feature (3695)..(3695): n is a, c, g, or t
ntncntnnaannnnnntnnnnncnnnangnancnnnnntngnnnnnnntttnnnnannnnnttnnannngntnggnngnnntnccnnntnncnnttnnnttttngnntnnnnnnnncnntnncccnnnnnangnngnannnntnntnangnnannngntnntnaannnnnnnatttnntnnnnaaannnnaannnnaannntnanngnnnnaannnaanngnaannnnnannnnnnnnnntttnnannnannnnaaannngnaannnaannnnnnaaaannnnnnccntaanttnntaaannnnnnnggggnnnnannncnntnngnnttnnnnncnnnnnnnnncnnnnngnnnnnnnnnnnnggnnnnnnnnnnnnntnnnnnnnnaannnaaannnnaatttnnnnaannnnnnnnntngnnnnnnnngnttttnnncctttnnnnnnnnaaaannnnnnccnnnnnccnnntttttnccggnnnnnnnnnnnnnaaaannnnnnnttnaannnnngnaaannggnnccnnnnaanttggaattttnnnngggnttnncccnnnngttnnnggnaannccnnnnnnnaaannntnnaannnnnnaaaaannnnnttcccnnnnttnnnnnccnnnnnnnnnnnccnnnnnaannnnnttnnggnnnnnaaaaanngggnntttnnnnnnnnnnnnnnttaaaaannnntaaaaaggccggnnntnnttnnnnnccnggnnnnnnnnncnnnnttnntnnggnnnnannncnnaannnnttnnnnccnnnaaannttnnnnnnaaaannnggnnggaaattnnnnttaannnnnnccnnnnngggnncccnnnaannnnnnnnnnaannnnnggnnnnnnnnnnnnnnnnnnggnnnnnnnaaannnccnnnggnnnttnnnaaccnttnaannnnaaannggnggntttnnnnnntttnnnccnnnnnnnttnnttnnttnnaannnnccnntttnnnnnnnnggnntnnnnnggccnggggnnnnnggnngggnggnccttnnnntttnnnnnnttggnnggntttnccttnnnaannncccnaannnnnnggnnnnnngggntaannnnggaannaantttnnnnnnnnnnnnnnnnnnnnnggnnnaaannnncngggnggnnnnnnnnttnnnnnnaannnaannnnaannnnnggggggnnnttnggnnaaannnntnnnccaaannnntttnttnnnannnnaannnntttnggnnnnnccccnnnnnnnnnnnnnnnnntttnccggnnnnaannnnannaattntttgnnntttttnnnnnnnnnnncaannntgggnnnnnntttnnnnnnnnnnnnaaccnnnnnnttnngtnncnntnannnannttanttaanctntttaaancttnccaataagcatcaaaaagctctaaatttgagtttttttcaggatctttttcgagctaattttgtgttttaaaagagcattaaactttattttaattttatttaggctaagctatattagtcgccaaaatatcaataaagttaaatagttagacctatcaattacccgtgatctagcgaaccaaataaagccaataattcattttaagcaattttaatgccgcagaatacactgttttcgcggttcgctggattagtgaatcagaaatctgggctagaaagccaaataccatacaagggaggagttaaatggatccgcaaatgatggtagaattaggcgctctgacgatcgttggtggcgcagccctgattgctggtatagcggaggatcttgaatccgacgttggttcacagagtaacccgaattcgcaagtacagttagccccccagatgggttatctgcacaggctttataacaaagcgatttccggtgagccagcttcttatccgttctacgcagcgatcggagcggctactacgttatcggtcttatctgtcactggangtggcagtctgatcggcgtcttcttcgctcttgtagccggtgctttcattactgcattgatacacggcgtttatgccacgacgtcctatgtgggcagactggcgagtcaatcgcgatttgggcaaccaatctacttggatgtcctgcgaacgcacacgcctgtgataatggcacacggcttcatagcgaatttttgcgtcctattgttaacgtggatattgatttcagaaaacttgagtccgttcccctttgtcgtgcttgcatttatttggggaattgctcttggaggcgtaggttccgcagtgggcgacgtccaccttggaactgataggtactatcaagacaggccttatggctctggcgtcaacgcngctcattcgggtagcgtggtgcgcaaagccgaatcaggcctaaggaattcgatagattgcgcgtggttctgctccaaatttggaggaccactcacagggctgggcttcggcctcgtcgtttaccttcacttctggaaggaagtcgtggtaagggattggtggtcggcagtcgctggagtaataatcgtcgtgatcttcatcatcatgaacacgtacctcgaacgctactctagacagcgatacggcacttacaaagaagaaatagaggcggagtgatgcacgatgtttgatcttttactctgggtatggattatactcggcgggattctgatcggtgcaggcgtccactttataccggtcggcggcgctcctgcggctatgtcgcaggcaacgggtgtcggaaccggtacgacgatgctngctgctgcgtcaggtctcacaggactcatcggggcaggctcagcctactacttgcaccccggagattttgcttacaccatagtcatggggggtgtgagtgcagcgttgatgctcgcgattttagcgtttatcgcnaacgttatgtacgtttttggggcaggtgtaccgctcgcatcagctaaagtgaaatacgaccccattacgaaatggcgtcaggacctgtacgtatcacgtgggacggaaggccacggatctccgatggtcagtttcatcagtggtatcataggggcgttcttagccggcgtcggcggcgcgcttgtgtactttgcgctggctgaaacgtacaaagcgattccagggttttctgcgacatttggcagctattcagctccctactacgtgtcgctcgcagcagccttcgctattgggatattcttcctcaactgcgtgatggcgtcgtacaacatcggcggcacgatagagggcttccacgatcctaagtttaagcgcttaccaaagtcagtcgtcgcaagtcttgttgtatcagcagtcggcggtctttttgcgctgcttataactgtcatgttgccaggagggatctgacatggctgaaggtgaaaaatcgccgcgtcagctgatggccatcggcgttttaggtggtctgatctgcatttacatcgctcattatctcaacagcgggacgaactccgcttggttttcgttcatcgctgcacttggcgctatacttgcagtgtactatggagcagacgcagtgaggcgagtagcgagctatgggctcggtaccggcgtaccgtcgatagccatgctgtctttcggagctggtcaaatagcagtgctgctcggtctcgcagtcgcattnaattacaanatagtagtagcgggncctatnatcgcactnattttggcggcgattataggccttgttaacggagtgatggcgaggcgcgttatcaaaatgaacatcgccataatggaaatgtcgatgatggaaatcgcaatggcagcgtccctggttattctcggtttgagtacagcgatcgctggtagcttcacgttcaacgcgatcatgagctacgtagttgcatcagggttcatcattgcagtattcatcgtcggcgcgatggcaatgttccatccgtttaacgcatgcctaggtcccgacgagagacaactgcgaacgctcaatcttgcactgtcgacagg

SEQ ID NO: 756 - DNA, 4000 bp, Escherichia coli
  misc_feature (543)..(543): n is a, c, g, or t
  misc_feature (929)..(929): n is a, c, g, or t
  misc_feature (1235)..(1235): n is a, c, g, or t
  misc_feature (1622)..(1622): n is a, c, g, or t
  misc_feature (1727)..(1727): n is a, c, g, or t
  misc_feature (1988)..(1988): n is a, c, g, or t
  misc_feature (2056)..(2056): n is a, c, g, or t
  misc_feature (2142)..(2142): n is a, c, g, or t
  misc_feature (2641)..(2641): n is a, c, g, or t
  misc_feature (2977)..(2977): n is a, c, g, or t
  misc_feature (3613)..(3613): n is a, c, g, or t
gcaataaaatttcagtacaaggaacaggaatgggaataccatcaaccttaatttatgctacagaactcattacagaatatggtgtaaaaaatttaattagagttggttctgcaggctcatatcaaaaagatataaaaattagagacattgttttggcaatgacagcctctaccaattctggtttaaataccatccgttttaacggagcagattttgcgccagcagcaagtttccagctttttcaaaaagctgtagccacagcatcacaaaaaaatatacctataaaagcgggtggaattttaagttctgatgagttttatgcagatgattttgatagttacaaaaaatgggcagaatatggtgttttatgtgtagaaatggaaacttctggtttgtacacagttgcagcaaaatacaatgtaaatgcactatctattttaacaatttcagatagtttggtaaccaaagaaagaaccacagcagatgaaagagaacaaacctttaaagaaatgatagaaattgctttagaattggcatagttancagtttaggtgattttgttaaagaatgaaacaaaattgtatcgagaacacatgaaacaatcattaatacaaaaatacaacattccaggaccaagatatactagttatccaactgtaccttattggaacaaagcaggaattcaaaaacaagattggatacaatcttttcaaaaatcgtttaaagaaagtaaccagtctgaagggataagtgtatacattcatttaccattttgtgagagtttgtgtactttttgtgcgtgtcataaacacattacaaaacgtcatgaagtagaggaggagtatattgaaactcttttaaaagagtggaaattatatatggctttgttacacgaaaaacccattgtaaaagagttgcatttaggaggnggtacacctacttttttttcaaaagaaaacttacaatttttaatgaatggtattttttctagcgcagaaaaacatccagaacacgaattcagtttcgaaggtcatccaaataatactaccaaagagcaattacaaacgttgtttgattgtggttttacacgagtaagttttggtgtgcaagattataatgaaaaagtacagaaagccattcatcgaattcaaccttttgaagcagtagaacaagttacaaaatggtctagagaaattggatatacttctgtaagtcacgatttaatttttggtttnccatttcaaaccaaagaaaacgtaattcataccatcaacaaaacaaaagagctacagccagatagaatttcattttacagttatgcacatgtgccttgggtaaaaggcgtaggtcaaagaggttttaacgaaaatgatttgccaaaagacgaagaaaaaagagctttgtatgaattaggaaaagaactttttgcaaccttgggttatcaagaaattgggatggatcattttgcattaaaaacagatagcttgtataaggcaaccgtcaataaaaccatccatagaaattttatgggatacacagccagtaaaacccagttaatgattggtttaggaatgtctgctatatctgattcttggtatgcatttgcacaaaatgtaaaaacngtaaaagagtatcaacaattggtaaatgcgggcgaaattccaatttttagaggccatttattaactgaagaagatagggttatcagaaaacatattttaaatatnatgtgtcatttttccacttcgtgggaaaaagagactatgcaaattaaaaatataaaaaagcatttagcattattaaaagaaatggaaaatgatggtttggttaaaattgaaaaaaataaagtaatcataccagaaaaagcaagaccctttgtaagaaatatttgcatggcatttgatgtacatttattagaaaataaacccaaaacacaattattttctatgactatttagtaaaattatttgaatttaaataattaattntgagtgttttatggttttacacaacagcgcgttcagtaaatatgataaatgtcatattttaaaattantaacaaagttatttttgaactattaaattatcaggcaagatatgagcgtaatataccttctactaacactaagtattttagtggcnatagtattttttatcgcatttatttattcagtaaagagaggtcagtatgatgattcatacacgccctctgttcgtatgctgtttgatgatgaattagtgaaagaatcaacagaaaaatcaactaaagtttaaattatattatatggaaatgcaacaattttattacgacaataagatcgtaaaaaagtttatctacgcaacgctactttggggtatagtaggttttacggtcgggttaatgctggcttttatgtttttattcccaaactatacagagggaatttcgtggttaagttttggtcgtttaagacctttgcatacaaatgcagtaatttttgcctttgtagggaatgccatttttgcgggtgtttattattcgctacagcgtttattaaaaaccagaatggccagtaattttttaagtaactttaatttttggggttggcaattaattattgttgcagcagctattacacttcctttagggtattcaacttcnaaagagtatgcagaattagagtggcctatagatatagccattgctttagtttgggtagcttttggtgtaaacatgatttggaccatcttaaaaagaagacaacgtcacttatatgtggctatttggttttatttagcaacatttgtaacagttgcagttttacatatttttaatagtttagagttaccagttactgccttaaaatcttattctgtttacgcaggtgtacaagatgcactcgtacaatggtggtatggccataatgcagttgcatttttcttaacaacaccatttttaggattaatgtattattttgttcctaaggcagctaacagncctgtgtattcttatagactttctattgtacacttttggtctttaatctttatatatatttgggcaggaccacaccatttattgtattctgctttaccagattgggcacaaaatttaggtgtagcattttctgtaatgttaattgcgccatcttggggaggtatgattaatggtttattaaccttaagaggtgcttgggataaagtgcgtacagacccagttttaaaatttatggtggtggcaattacaggttatggtatggcaacttttgaaggacccatgttatcattaaaaaatgtaaatgcaattgcacacttttctgactggattattgcacacgttcacgttggtgccttagcatggaatggtttcttagcatttggaatgttatactggatgataccaaaattgtttaaaacaaaattatattctacaggtttagcaaacgtacacttttgggtaggtactttaggaatcatattatacgcattaccaatgtatgtagctggttttgtacaagcttctatgtggaaacaatttaatccagatggtactttaacatatggtaactttttagaaaccgtaaacgaaattatacccatgtattggatgcgtgccattggtggtagtatgtanattttaggtgcacttattatgttgtacaatgtggtaagaacagttagatctggtagtgctgtgaaagatgagttagcagaagcaccagctttaaagaaagtatctaaacacagaacaaaaggagaaggatatcatacttggttagaaagaaaacctattaaattaaccatttatgcaacaattgctattttaattggtggagctgtacagattataccaacattgttagtaaaatcgaacattccaaccattagtagtgtaaaaccatatacacctttagaattagaaggtagagatttatatataagagaaggttgtgtggggtgtcactctcaaatgattagaccttttagaagtgaagtagaacgttatggagaatactctaaa

SEQ ID NO: 757 - DNA, 4000 bp, Escherichia coli
  misc_feature (2)..(14): n is a, c, g, or t
  misc_feature (16)..(17): n is a, c, g, or t
  misc_feature (19)..(21): n is a, c, g, or t
  misc_feature (23)..(24): n is a, c, g, or t
  misc_feature (26)..(29): n is a, c, g, or t
  misc_feature (33)..(33): n is a, c, g, or t
  misc_feature (35)..(35): n is a, c, g, or t
  misc_feature (37)..(39): n is a, c, g, or t
  misc_feature (42)..(44): n is a, c, g, or t
  misc_feature (47)..(48): n is a, c, g, or t
  misc_feature (50)..(50): n is a, c, g, or t
  misc_feature (53)..(55): n is a, c, g, or t
  misc_feature (57)..(59): n is a, c, g, or t
  misc_feature (61)..(61): n is a, c, g, or t
  misc_feature (63)..(64): n is a, c, g, or t
  misc_feature (66)..(68): n is a, c, g, or t
  misc_feature (71)..(71): n is a, c, g, or t
  misc_feature (73)..(73): n is a, c, g, or t
  misc_feature (75)..(77): n is a, c, g, or t
  misc_feature (81)..(81): n is a, c, g, or t
  misc_feature (85)..(85): n is a, c, g, or t
  misc_feature (96)..(105): n is a, c, g, or t
  misc_feature (108)..(110): n is a, c, g, or t
  misc_feature (113)..(114): n is a, c, g, or t
  misc_feature (118)..(118): n is a, c, g, or t
  misc_feature (122)..(124): n is a, c, g, or t
  misc_feature (127)..(128): n is a, c, g, or t
  misc_feature (131)..(135): n is a, c, g, or t
  misc_feature (138)..(138): n is a, c, g, or t
  misc_feature (142)..(142): n is a, c, g, or t
  misc_feature (145)..(147): n is a, c, g, or t
  misc_feature (151)..(154): n is a, c, g, or t
  misc_feature (162)..(168): n is a, c, g, or t
  misc_feature (171)..(171): n is a, c, g, or t
  misc_feature (174)..(183): n is a, c, g, or t
  misc_feature (186)..(194): n is a, c, g, or t
  misc_feature (198)..(209): n is a, c, g, or t
  misc_feature (216)..(219): n is a, c, g, or t
  misc_feature (224)..(225): n is a, c, g, or t
  misc_feature (229)..(232): n is a, c, g, or t
  misc_feature (235)..(237): n is a, c, g, or t
  misc_feature (242)..(252): n is a, c, g, or t
  misc_feature (263)..(263): n is a, c, g, or t
  misc_feature (266)..(266): n is a, c, g, or t
  misc_feature (273)..(275): n is a, c, g, or t
  misc_feature (278)..(289): n is a, c, g, or t
  misc_feature (293)..(293): n is a, c, g, or t
  misc_feature (393)..(393): n is a, c, g, or t
  misc_feature (405)..(405): n is a, c, g, or t
  misc_feature (855)..(855): n is a, c, g, or t
  misc_feature (870)..(870): n is a, c, g, or t
  misc_feature (873)..(873): n is a, c, g, or t
  misc_feature (1205)..(1205): n is a, c, g, or t
  misc_feature (1216)..(1218): n is a, c, g, or t
  misc_feature (1220)..(1220): n is a, c, g, or t
  misc_feature (1419)..(1419): n is a, c, g, or t
  misc_feature (1433)..(1433): n is a, c, g, or t
  misc_feature (1435)..(1435): n is a, c, g, or t
  misc_feature (1985)..(1985): n is a, c, g, or t
  misc_feature (1989)..(1991): n is a, c, g, or t
  misc_feature (2220)..(2220): n is a, c, g, or t
  misc_feature (2460)..(2460): n is a, c, g, or t
  misc_feature (2466)..(2466): n is a, c, g, or t
  misc_feature (2922)..(2922): n is a, c, g, or t
  misc_feature (2927)..(2928): n is a, c, g, or t
  misc_feature (2935)..(2935): n is a, c, g, or t
  misc_feature (2941)..(2942): n is a, c, g, or t
  misc_feature (2945)..(2952): n is a, c, g, or t
  misc_feature (2954)..(2954): n is a, c, g, or t
  misc_feature (2956)..(2956): n is a, c, g, or t
  misc_feature (2960)..(2960): n is a, c, g, or t
  misc_feature (2963)..(2966): n is a, c, g, or t
  misc_feature (2968)..(2973): n is a, c, g, or t
  misc_feature (2975)..(2977): n is a, c, g, or t
  misc_feature (2979)..(2981): n is a, c, g, or t
  misc_feature (2984)..(2987): n is a, c, g, or t
  misc_feature (2989)..(2999): n is a, c, g, or t
  misc_feature (3002)..(3010): n is a, c, g, or t
  misc_feature (3012)..(3012): n is a, c, g, or t
  misc_feature (3015)..(3022): n is a, c, g, or t
  misc_feature (3024)..(3033): n is a, c, g, or t
  misc_feature (3035)..(3035): n is a, c, g, or t
  misc_feature (3037)..(3038): n is a, c, g, or t
  misc_feature (3040)..(3040): n is a, c, g, or t
  misc_feature (3042)..(3045): n is a, c, g, or t
  misc_feature (3047)..(3051): n is a, c, g, or t
  misc_feature (3053)..(3053): n is a, c, g, or t
  misc_feature (3055)..(3060): n is a, c, g, or t
  misc_feature (3062)..(3067): n is a, c, g, or t
  misc_feature (3069)..(3102): n is a, c, g, or t
  misc_feature (3104)..(3104): n is a, c, g, or t
  misc_feature (3106)..(3123): n is a, c, g, or t
  misc_feature (3125)..(3128): n is a, c, g, or t
  misc_feature (3130)..(3134): n is a, c, g, or t
  misc_feature (3136)..(3138): n is a, c, g, or t
  misc_feature (3140)..(3141): n is a, c, g, or t
  misc_feature (3143)..(3143): n is a, c, g, or t
  misc_feature (3145)..(3145): n is a, c, g, or t
  misc_feature (3147)..(3161): n is a, c, g, or t
  misc_feature (3163)..(3163): n is a, c, g, or t
  misc_feature (3165)..(3191): n is a, c, g, or t
  misc_feature (3193)..(3197): n is a, c, g, or t
  misc_feature (3199)..(3199): n is a, c, g, or t
  misc_feature (3201)..(3205): n is a, c, g, or t
  misc_feature (3207)..(3209): n is a, c, g, or t
  misc_feature (3211)..(3237): n is a, c, g, or t
  misc_feature (3239)..(3287): n is a, c, g, or t
  misc_feature (3289)..(3291): n is a, c, g, or t
  misc_feature (3293)..(3297): n is a, c, g, or t
  misc_feature (3299)..(3331): n is a, c, g, or t
  misc_feature (3333)..(3336): n is a, c, g, or t
  misc_feature (3338)..(3351): n is a, c, g, or t
  misc_feature (3353)..(3358): n is a, c, g, or t
  misc_feature (3360)..(3373): n is a, c, g, or t
  misc_feature (3375)..(3396): n is a, c, g, or t
  misc_feature (3398)..(3403): n is a, c, g, or t
  misc_feature (3405)..(3412): n is a, c, g, or t
  misc_feature (3414)..(3414): n is a, c, g, or t
  misc_feature (3416)..(3418): n is a, c, g, or t
  misc_feature (3422)..(3430): n is a, c, g, or t
  misc_feature (3432)..(3433): n is a, c, g, or t
  misc_feature (3436)..(3447): n is a, c, g, or t
  misc_feature (3449)..(3450): n is a, c, g, or t
  misc_feature (3453)..(3464): n is a, c, g, or t
  misc_feature (3466)..(3467): n is a, c, g, or t
  misc_feature (3469)..(3472): n is a, c, g, or t
  misc_feature (3474)..(3489): n is a, c, g, or t
  misc_feature (3491)..(3497): n is a, c, g, or t
  misc_feature (3499)..(3511): n is a, c, g, or t
  misc_feature (3513)..(3527): n is a, c, g, or t
  misc_feature (3530)..(3533): n is a, c, g, or t
  misc_feature (3535)..(3540): n is a, c, g, or t
  misc_feature (3542)..(3552): n is a, c, g, or t
  misc_feature (3555)..(3562): n is a, c, g, or t
  misc_feature (3564)..(3583): n is a, c, g, or t
  misc_feature (3585)..(3591): n is a, c, g, or t
  misc_feature (3593)..(3615): n is a, c, g, or t
  misc_feature (3617)..(3619): n is a, c, g, or t
  misc_feature (3621)..(3627): n is a, c, g, or t
  misc_feature (3629)..(3637): n is a, c, g, or t
  misc_feature (3639)..(3640): n is a, c, g, or t
  misc_feature (3643)..(3649): n is a, c, g, or t
  misc_feature (3651)..(3655): n is a, c, g, or t
  misc_feature (3657)..(3664): n is a, c, g, or t
  misc_feature (3667)..(3675): n is a, c, g, or t
  misc_feature (3677)..(3691): n is a, c, g, or t
  misc_feature (3693)..(3693): n is a, c, g, or t
  misc_feature (3695)..(3707): n is a, c, g, or t
  misc_feature (3709)..(3714): n is a, c, g, or t
  misc_feature (3716)..(3722): n is a, c, g, or t
  misc_feature (3724)..(3741): n is a, c, g, or t
  misc_feature (3743)..(3744): n is a, c, g, or t
  misc_feature (3746)..(3746): n is a, c, g, or t
  misc_feature (3749)..(3760): n is a, c, g, or t
  misc_feature (3762)..(3780): n is a, c, g, or t
  misc_feature (3782)..(3789): n is a, c, g, or t
  misc_feature (3791)..(3792): n is a, c, g, or t
  misc_feature (3794)..(3801): n is a, c, g, or t
  misc_feature (3803)..(3813): n is a, c, g, or t
  misc_feature (3815)..(3822): n is a, c, g, or t
  misc_feature (3826)..(3830): n is a, c, g, or t
  misc_feature (3832)..(3837): n is a, c, g, or t
  misc_feature (3840)..(3850): n is a, c, g, or t
  misc_feature (3852)..(3878): n is a, c, g, or t
  misc_feature (3880)..(3882): n is a, c, g, or t
  misc_feature (3884)..(3887): n is a, c, g, or t
  misc_feature (3891)..(3899): n is a, c, g, or t
  misc_feature (3901)..(3906): n is a, c, g, or t
  misc_feature (3908)..(3922): n is a, c, g, or t
  misc_feature (3924)..(3927): n is a, c, g, or t
  misc_feature (3929)..(3932): n is a, c, g, or t
  misc_feature (3934)..(3939): n is a, c, g, or t
  misc_feature (3941)..(3942): n is a, c, g, or t
  misc_feature (3944)..(3961): n is a, c, g, or t
  misc_feature (3963)..(3963): n is a, c, g, or t
  misc_feature (3965)..(3969): n is a, c, g, or t
  misc_feature (3971)..(3976): n is a, c, g, or t
  misc_feature (3981)..(3983): n is a, c, g, or t
  misc_feature (3986)..(3988): n is a, c, g, or t
  misc_feature (3990)..(3992): n is a, c, g, or t
  misc_feature (3994)..(3996): n is a, c, g, or t
  misc_feature (3999)..(4000): n is a, c, g, or t
gnnnnnnnnnnnnntnnannngnntnnnngggngnannnaannnaannanggnnntnnntntnnannnggnancnnngggncccnaaagggaaccnnnnnnnnnnttnnnggnncccnaaannnggnnaannnnnccngggnaannnaaannnnggggaaannnnnnnggnggnnnnnnnnnnttnnnnnnnnnaaannnnnnnnnnnncccgggnnnnggggnnaaannnnaannnaaccnnnnnnnnnnnggttccttccnaantttcccnnnggnnnnnnnnnnnnggangagtggttcccggtaaagcaaatgattagaggccgtgggagagaaattttctcatccttttctcaaactttaaatgggtacgttagcggggaatcttaanagttccccgctnaacatcgcggctacttgtgggccacttttggtaagcagaactggcgatgcgggatgaaccgagagccgcgttaaagctgcagactcgcgctaatgagatcccatgaaaggtgttggtcgttcaagacaaccggacggtggccatggaagtcggaagccgctaaggagtgtgtaacaactcaccggtcgaagctaccagccctgaaaatggaagcagcttaatcgcggggttcatacgcggcccggaggaggactttcgaaagagagaaactccttcggggtaggaaggcgtaatagcggggtagaaggttaggccttgcggctgactggacccgctattagtgcagatcttggtggtagtagcaaatactctagcgagagcctagaggaccgaagaggggaagggtttcatgtgaacagtaattgaacatgagtgagtcggtcctaagcncagcccgaaagggtnaantagtggggcgttgcgcgtgtctgtcttcggatgggcttgtcgtacccctagagcgaaagggaatccggttaatattccggaactactgagcggagcacagggataaccttcgggtcttcctttcaagagtggtaacacaaagtgtccagcagacgtcaaaactggcggcgggaagagttgtctcttctttgtaacaggcttagtaatgaacgagtccttggatcgggttcatcccacgataaggacgaaggcctgtaaaagtatcgcgtctcttgcggtatccgctgcgctagttatggcccttgaaaatgttggtcacactgtagtcctgnttccttcgggnnntnagggctgtgtctctcgctagtaaccgtacccataaccgcatcaggtccccaaggttaaaagcctctggtctttagaaaaatgtaggtaagggaagtcggcaaaactgatccgtaacttcgggataaggattggctctgccggtaggggagcaggggcttagcttgcgagctgtagttgttgtcgttctgggctgccttnacgggtagcctggntngtgacattacggcttcgcgggctttgcttgggcgccttcgggtgtcttacctggctctcactttaaccgtgagcagaactggcacggaccatgggaatccgactgtctaattaaaacaaagcatagagaaggccggtgaacggtgttgactctatgtgatttctgcccagtgctctgaatgttaaggcgcagaaatgcgttgaagcgcgagtaaacggcgggagtaactatgactctcttaaggtaaccaaatgcctcgtcatctaattagtgacgcgcatgaatggattaacgagattcccactgtccctacctactatctagcgaaaccacagccaagggaacgggcttggaagaattagcggggaaagaagaccctgttgagcttgactctagtctgattttgtgaagaggcatactgggtgtagtgtaagggggagcttaacggcgacaatgaaacacccctaccggtatcgcttctttgcttactcggtgagagcaggggcttattctctgaataagcgcgtcttgctgtaagtgttggggttantgtnnnagcagtagctctgggacgactgtgaccgaggacagcgtcaggttgggagtttgactggggcggtacatccatcaaaacgtaacgtgggtgtcctaaggttgactcagacagaacagaaatctgtcgtagagtaaaagggcaaaagttggcttgatcttgccgttcagtaagcggaaagactgcaaaagcatggcctatcgatcctttagtttgcttcggcggctcaggntaaatgaggctagaggtgtcagaaaagttaccacagggataactggcttgtggcggccaagcgttcatagcgacgtcgctttttgatccttcgatgtcggctcttcctatcattgagaagcagaattctccaagtgttggattgttcacccactaacagggaacgtgagctgggtttagaccgtcgtgagacaggttagttttaccctactaatgagaagtagattttagcgcgagtcanttaaangacgggcgttaaaagactatcgcgatggaagccggggaaagtacgagaggaacgcttcggccagacctctggtctcgcagttacttgaaaaaatagtgctgcaaggctacgtctgcgggattataactgaatgcctctaagttagcatcccttccagtctcagcgatagtgtttgggttgaagagcgggttggttggcatatggacggggttgtcgggagtggtgtcttcggatgccgtttctgcagtcctgttcaggcttaccctttgacgcgtggatgagtaaggctatgcttgtcccgagtctgttggactctgtagttaagtacccgttctgctaccctgcaccccttgcatacgactttgcttcggccgtagtgatgtacttatgagagtagttttcacactacgatctattgagttttagctactgctgacggtgcttttttggtggggntaatnnaaagttngcgtcnnttnnnnnnnnantnttgnatnnnntnnnnnntnnnannnatnnnnannnnnnnnnnntgnnnnnnnnnanggnnnnnnnntnnnnnnnnnnangnntnannnngnnnnnantnnnnnntnnnnnngnnnnnnnnnnnnnnnnnnnnnnnnnnnnnnnnnncncnnnnnnnnnnnnnnnnnngnnnntnnnnncnnntnnangngnnnnnnnnnnnnnnntncnnnnnnnnnnnnnnnnnnnnnnnnnnngnnnnnangnnnnntnnncnnnnnnnnnnnnnnnnnnnnnnnnnnncnnnnnnnnnnnnnnnnnnnnnnnnnnnnnnnnnnnnnnnnnnnnnnnnncnnnannnnntnnnnnnnnnnnnnnnnnnnnnnnnnnnnnnnnntnnnntnnnnnnnnnnnnnntnnnnnngnnnnnnnnnnnnnntnnnnnnnnnnnnnnnnnnnnnngnnnnnntnnnnnnnnantnnngggnnnnnnnnntnnttnnnnnnnnnnnngnnaannnnnnnnnnnntnngnnnngnnnnnnnnnnnnnnnnannnnnnnannnnnnnnnnnnngnnnnnnnnnnnnnnnttnnnntnnnnnntnnnnnnnnnnnagnnnnnnnntnnnnnnnnnnnnnnnnnnnntnnnnnnntnnnnnnnnnnnnnnnnnnnnnnngnnntnnnnnnnannnnnnnnngnnttnnnnnnntnnnnnannnnnnnnttnnnnnnnnntnnnnnnnnnnnnnnntnannnnnnnnnnnnnannnnnntnnnnnnnannnnnnnnnnnnnnnnnnanntntcnnnnnnnnnnnnannnnnnnnnnnnnnnnnnntnnnnnnnntnntnnnnnnnntnnnnnnnnnnntnnnnnnnntttnnnnntnnnnnnttnnnnnnnnnnntnnnnnnnnnnnnnnnnnnnnnnnnnnntnnntnnnntttnnnnnnnnntnnnnnntnnnnnnnnnnnnnnncnnnntnnnnannnnnntnncnnnnnnnnnnnnnnnnnncnannnnnannnnnnctttnnnatnnntnnnannnttnn

SEQ ID NO: 758 - DNA, 4000 bp, Escherichia coli
  misc_feature (1236)..(1236): n is a, c, g, or t
  misc_feature (1238)..(1238): n is a, c, g, or t
  misc_feature (1245)..(1245): n is a, c, g, or t
  misc_feature (1249)..(1249): n is a, c, g, or t
  misc_feature (1251)..(1251): n is a, c, g, or t
  misc_feature (1256)..(1256): n is a, c, g, or t
  misc_feature (1338)..(1338): n is a, c, g, or t
  misc_feature (1358)..(1358): n is a, c, g, or t
  misc_feature (1484)..(1484): n is a, c, g, or t
  misc_feature (1595)..(1595): n is a, c, g, or t
  misc_feature (1604)..(1604): n is a, c, g, or t
  misc_feature (1631)..(1632): n is a, c, g, or t
  misc_feature (1634)..(1634): n is a, c, g, or t
  misc_feature (1667)..(1667): n is a, c, g, or t
  misc_feature (1682)..(1682): n is a, c, g, or t
  misc_feature (1691)..(1691): n is a, c, g, or t
  misc_feature (1727)..(1727): n is a, c, g, or t
  misc_feature (1760)..(1760): n is a, c, g, or t
  misc_feature (1778)..(1778): n is a, c, g, or t
  misc_feature (1784)..(1784): n is a, c, g, or t
  misc_feature (1811)..(1811): n is a, c, g, or t
  misc_feature (1817)..(1817): n is a, c, g, or t
  misc_feature (1838)..(1838): n is a, c, g, or t
  misc_feature (1880)..(1880): n is a, c, g, or t
  misc_feature (1928)..(1928): n is a, c, g, or t
  misc_feature (1937)..(1937): n is a, c, g, or t
  misc_feature (1985)..(1985): n is a, c, g, or t
  misc_feature (1988)..(1988): n is a, c, g, or t
  misc_feature (1991)..(1991): n is a, c, g, or t
  misc_feature (3101)..(3101): n is a, c, g, or t
gaagaagttgatccagaacttttggaaaaattaatttgggctgaattgcgtgatggccatgcggaagggattctgtttttaggagaacaattactggaggaacgttttgatggaaaaagaggaaggatcgatttttatttggaaggttccaggccaactttgacagcatcagttgttgaatctgttgcttctgcgatggatgatttagcagcttcacttccggtagttattgatagttcctgttcggcgttttgtgcaaactcggtcaacattaaaccccttgatctggaagaacattttctttatggctcagaagattatcgtttgatagactttttcctgccggtattccccccattctttgtctttttctttacatttctcattacgacaattaccttccagcgcgagcgtttacgtggaacacttgagaggttattgattgcacctgtgtcttttgctcaaattgtgatgggttacataggtggatttattattttttccggctgtcaggcagtaatcatattgacatttatactaacactgatgagcttcaagataacgctctcacaggtcggagcaataactattttgactttgctgatgctcctgatttcacttgtcctgggtttgctggcttcattccttgcggcaaacgagtttcaggcggtgcaattcatcccgctagttattttgccgcagatatttttaagtgacatgatttggagtattgatagttttcctgtattttttcagtggatttcactcgctttgccgttaacacacgcaaacgtagcgatgcgaaacgttttgttgaaacagcaaaatctttgggattcctggccccaactgcttactctgagtggatttttcctgggtattctcctcttccttgtccttgtctcaagtcggcaacaaaactctgcctgaactttgtttgctcaaagtgggacattctgtcctgcatgagacattttagcaggtgtcactcgtcaagttttagagtctgttagtcatattggtaattattttagattatattcccaatattcttggtctttgaattgctgtatttacagactaatgtaaataaactttatttttatcctactttttggaggaagcatgaagaacaaggaaacaaccagcggtcgtcgcggttttttaaaaggagttgtagttgccggttcaggtgcggctgtagcaatcacagcatcaaagatgatttcaccggancnagtcgangctncncccgnaaaagaagataactcttcgaaaggttatcatctgagtgagcatattaacgcttattataaaacgacttcattttaggtttgnggactgctaagcatttgccnggctaaggttcaggtcaaaatgctgctaaacgtcaacaaacaaacaacaggcattatagtaatggagaaacaacaatgaaattaatcagaaaaaaagctgagaatcaggaacaggcgcaaggagtntcagcaggttttaaggggtcttcggttgaccgtagaacctttttgcgtaattccggtttagcggcaggaggcacggcactgacgtcgatgctcacgccgggaatgatgaanaaggcacangccgcctcaggtagtgcagcgggaggnnanattgagaaaattcgctcaatatgtacccattgngcggtaggttgcggngtttatgcngaagttcaaaatggtgtctggactggacaggagccngcatttgatcatccaatcagtctgggtgctcantgtgctaaaggagctgcngtacgngaacatggacatggcgaacgccggctnaagtanccgatgaaacttgttggtggncagtggaaacgtgtttcctggaatcaggccattgatgaggtnggtgatcaaatgatgcagatccgtgaaaaatcaggaccggattcggtntactggctnggttcagcgaagttcaacaatgaacaatcctatctgttcagaaagttngcngcnatgtggggcacgaataatgtggatcaccaagctcggatttgtcactcaactacagttgcaggtgtagcaaatacatggggctacggtgcgatgactaactccctcaatgatattcataacagtaaatcgatgctggttattggtggaaatccatcagaagcacatccggtttcaatgctgcatatttttaaagcaaaagaaaagggagcaaaactgctggtgattgacccgcgtttcacgcgtaccgcagtacatgctgatcattatgtacgcatcaggccaggaagtgatgtggcaataatctgggggatgatgtggcatatttttaataatggctgggaggatcaggaatatatcgatcaacgtgttttcggaatggaagatgtaaaagcagaagttgaaaaatggactcctgctgaagtagaacgcgttaccggtgctgatgaagcaacggtcaaaaaagctgctgaaataatggcgaagaattcaccgggaactttcatctggtgtatgggcggaacacagcacacgattggaaataataatacacgtgcttattgcgcgtttcaactggcattgggtaacattggtaaagcaggcggcggagcaaatattttccgcggacacgacaatgtgcagggtgctactgacttttgtattctttcgcatagtctgccgggttattacggcttgtcagccggagcctggaaacattggtcgcgtgtttgggatctggattttaactgggttaaatcacgttttgaccaacaggcctatgaaggtggtaaatcacccatgcataccaaaggtattccggtttcacgctggatagacggggtgcttgaagataaagaaaatattactcagaaagacaacatcagggccatggtcctctggggtcacgcaccaaacagtcaaactcgtggtaaggaaatgaaaaccgccatggagaagttggacttgatggtgatcattgatccatatccaacagtttcggctgtgatgcacgaccgcaaggatggagtatatctccttccggcctcgacacagtttgaaacatacggttctcttaccgcttccaaccgctcactgcagtggcgtgacagagtnatcgctcctctgtttgaatctcttccggatcatacgatcatgtataagtttgcccggaaatttggtttcgataaagaattcacgaaaaatatcaaagttgtcaatgaagagccttatatcgaggatattacccgtgagttcaacggaggtatgtggaccatcggttacacaggtcaaagtccggagcgtttgaaacttcaacagaaaaactggcatacctttaatacaacttcactgaaagcagaaggtggacctgttgatggagaatattacggactgccgtggccgtgttgggggactccggaaatgaaacatcctggaacaccaaacctttatgatccaagtaaaccagttgcggaaggcggtcttaacttccgtgcacgtttcggtgttgagcatgaaggtgtgaatttgctggcggaaggttcgtttccagtaggtaatgagttacgagacggccatccggaatttagtatggctatgctagaaagactcggttgggactcagatttaacagctgcggaaaaagcagcgatagcaaaagttgccggcagcaagaccaactggaaaacagatctttccggtggaattcagcgcgttgcaatcaaacatggttgcgcaccattcggaaatgcaaaggccagagtgaaggtctggacattcccggatcctgtgcctgttcatagagaaccgctctataccagccgtcgggatttggtggctaagtatccaacttatgaggatcggaaaagtcattaccgcctgccaacccgttacgaaagcatacagtccacagatcataccggacagtatccgttgattttaaccagcggtcgtctggttgagtatgaaggtggaggtgatgaatctcgatcaaatccttggctggcagaactaca

SEQ ID NO: 759 - DNA, 4000 bp, Escherichia coli
  misc_feature (437)..(437): n is a, c, g, or t
  misc_feature (492)..(492): n is a, c, g, or t
  misc_feature (494)..(495): n is a, c, g, or t
  misc_feature (498)..(499): n is a, c, g, or t
  misc_feature (502)..(503): n is a, c, g, or t
  misc_feature (506)..(506): n is a, c, g, or t
  misc_feature (509)..(510): n is a, c, g, or t
  misc_feature (512)..(516): n is a, c, g, or t
  misc_feature (520)..(521): n is a, c, g, or t
  misc_feature (523)..(524): n is a, c, g, or t
  misc_feature (527)..(527): n is a, c, g, or t
  misc_feature (529)..(529): n is a, c, g, or t
  misc_feature (531)..(531): n is a, c, g, or t
  misc_feature (536)..(536): n is a, c, g, or t
  misc_feature (543)..(544): n is a, c, g, or t
  misc_feature (547)..(548): n is a, c, g, or t
  misc_feature (551)..(555): n is a, c, g, or t
  misc_feature (558)..(560): n is a, c, g, or t
  misc_feature (562)..(564): n is a, c, g, or t
  misc_feature (566)..(569): n is a, c, g, or t
  misc_feature (573)..(573): n is a, c, g, or t
  misc_feature (575)..(577): n is a, c, g, or t
  misc_feature (581)..(581): n is a, c, g, or t
  misc_feature (584)..(585): n is a, c, g, or t
  misc_feature (587)..(587): n is a, c, g, or t
  misc_feature (589)..(591): n is a, c, g, or t
  misc_feature (593)..(596): n is a, c, g, or t
  misc_feature (599)..(603): n is a, c, g, or t
  misc_feature (605)..(607): n is a, c, g, or t
  misc_feature (609)..(610): n is a, c, g, or t
  misc_feature (613)..(615): n is a, c, g, or t
  misc_feature (617)..(618): n is a, c, g, or t
  misc_feature (620)..(620): n is a, c, g, or t
  misc_feature (622)..(623): n is a, c, g, or t
  misc_feature (625)..(631): n is a, c, g, or t
  misc_feature (633)..(635): n is a, c, g, or t
  misc_feature (637)..(639): n is a, c, g, or t
  misc_feature (641)..(643): n is a, c, g, or t
  misc_feature (645)..(646): n is a, c, g, or t
  misc_feature (648)..(656): n is a, c, g, or t
  misc_feature (658)..(658): n is a, c, g, or t
  misc_feature (661)..(661): n is a, c, g, or t
  misc_feature (669)..(684): n is a, c, g, or t
  misc_feature (687)..(696): n is a, c, g, or t
  misc_feature (698)..(699): n is a, c, g, or t
  misc_feature (702)..(719): n is a, c, g, or t
  misc_feature (721)..(726): n is a, c, g, or t
  misc_feature (729)..(732): n is a, c, g, or t
  misc_feature (734)..(738): n is a, c, g, or t
  misc_feature (740)..(741): n is a, c, g, or t
  misc_feature (746)..(747): n is a, c, g, or t
  misc_feature (752)..(753): n is a, c, g, or t
  misc_feature (755)..(755): n is a, c, g, or t
  misc_feature (757)..(757): n is a, c, g, or t
  misc_feature (764)..(764): n is a, c, g, or t
  misc_feature (770)..(771): n is a, c, g, or t
  misc_feature (795)..(796): n is a, c, g, or t
  misc_feature (798)..(798): n is a, c, g, or t
  misc_feature (801)..(801): n is a, c, g, or t
  misc_feature (807)..(807): n is a, c, g, or t
  misc_feature (814)..(814): n is a, c, g, or t
  misc_feature (819)..(819): n is a, c, g, or t
  misc_feature (822)..(822): n is a, c, g, or t
  misc_feature (827)..(830): n is a, c, g, or t
  misc_feature (832)..(832): n is a, c, g, or t
  misc_feature (834)..(835): n is a, c, g, or t
  misc_feature (839)..(839): n is a, c, g, or t
  misc_feature (847)..(847): n is a, c, g, or t
  misc_feature (850)..(851): n is a, c, g, or t
  misc_feature (855)..(855): n is a, c, g, or t
  misc_feature (857)..(858): n is a, c, g, or t
  misc_feature (860)..(864): n is a, c, g, or t
  misc_feature (866)..(868): n is a, c, g, or t
  misc_feature (870)..(870): n is a, c, g, or t
  misc_feature (877)..(877): n is a, c, g, or t
  misc_feature (879)..(879): n is a, c, g, or t
  misc_feature (881)..(881): n is a, c, g, or t
  misc_feature (884)..(884): n is a, c, g, or t
  misc_feature (886)..(886): n is a, c, g, or t
  misc_feature (888)..(889): n is a, c, g, or t
  misc_feature (891)..(893): n is a, c, g, or t
  misc_feature (895)..(895): n is a, c, g, or t
  misc_feature (897)..(897): n is a, c, g, or t
  misc_feature (901)..(901): n is a, c, g, or t
  misc_feature (904)..(904): n is a, c, g, or t
  misc_feature (906)..(906): n is a, c, g, or t
  misc_feature (909)..(910): n is a, c, g, or t
  misc_feature (912)..(914): n is a, c, g, or t
  misc_feature (916)..(921): n is a, c, g, or t
  misc_feature (923)..(923): n is a, c, g, or t
  misc_feature (925)..(926): n is a, c, g, or t
  misc_feature (929)..(930): n is a, c, g, or t
  misc_feature (932)..(933): n is a, c, g, or t
  misc_feature (936)..(942): n is a, c, g, or t
  misc_feature (944)..(944): n is a, c, g, or t
  misc_feature (947)..(949): n is a, c, g, or t
  misc_feature (953)..(953): n is a, c, g, or t
  misc_feature (956)..(956): n is a, c, g, or t
  misc_feature (958)..(960): n is a, c, g, or t
  misc_feature (963)..(963): n is a, c, g, or t
  misc_feature (966)..(966): n is a, c, g, or t
  misc_feature (3847)..(3847): n is a, c, g, or t
  misc_feature (3850)..(3852): n is a, c, g, or t
  misc_feature (3854)..(3854): n is a, c, g, or t
  misc_feature (3857)..(3861): n is a, c, g, or t
  misc_feature (3863)..(3872): n is a, c, g, or t
  misc_feature (3874)..(3875): n is a, c, g, or t
  misc_feature (3877)..(3884): n is a, c, g, or t
  misc_feature (3886)..(3891): n is a, c, g, or t
  misc_feature (3893)..(3894): n is a, c, g, or t
  misc_feature (3897)..(3899): n is a, c, g, or t
  misc_feature (3901)..(3905): n is a, c, g, or t
  misc_feature (3909)..(3919): n is a, c, g, or t
  misc_feature (3921)..(3922): n is a, c, g, or t
  misc_feature (3924)..(3929): n is a, c, g, or t
  misc_feature (3931)..(3932): n is a, c, g, or t
  misc_feature (3934)..(3937): n is a, c, g, or t
  misc_feature (3939)..(3941): n is a, c, g, or t
  misc_feature (3943)..(3945): n is a, c, g, or t
  misc_feature (3947)..(3947): n is a, c, g, or t
  misc_feature (3949)..(3949): n is a, c, g, or t
  misc_feature (3952)..(3952): n is a, c, g, or t
  misc_feature (3955)..(3955): n is a, c, g, or t
  misc_feature (3958)..(3962): n is a, c, g, or t
  misc_feature (3965)..(3968): n is a, c, g, or t
  misc_feature (3971)..(3976): n is a, c, g, or t
  misc_feature (3979)..(3980): n is a, c, g, or t
  misc_feature (3982)..(3982): n is a, c, g, or t
  misc_feature (3984)..(3985): n is a, c, g, or t
  misc_feature (3987)..(3987): n is a, c, g, or t
  misc_feature (3989)..(3994): n is a, c, g, or t
  misc_feature (3996)..(3996): n is a, c, g, or t
  misc_feature (3998)..(4000): n is a, c, g, or t
gcgttggatggcgagttgcgcgaggatacatttgagcacgcgggaaatctggcagagctgcacgctaggaacaacaaccttgccggctcaggcataccgaaatccatcgccaagatgtcaaagctcgcgtcgttgaaattgagcggaaatcgtcgactcggaaacggagcaccgctgtccgatgcaatcggagaatgtttctcactgaaaattctagacatatcggcgaccggacacgcgggtgagacaaatcccacacttttcgcgtcgatgcggtatctctcttccttgaatctcgcctcgaacgactttcaaggacagattccatcctcgttgcgttcagccggctacttgaggcgactagaattacaaaacaatagattcaccggcgaaattcctggttggctcgtgtcgtcgctcgacaacttggagcacgncgatttgagcggcaatagtctgacgggaagaattccgagagcgttctacgaaaangnnganngcnncgncgnngnnnnncccnngnntcntncngcgtncggaaannganncgnnnnncannngnnngnnnnacgncnnngtcnganncngnnntnnnnccnnnnncnnncnnccnnnanncnanncnnnnnnncnnngnnncnnnanncnnnnnnnnnanccntcgcgccnnnnnnnnnnnnnnnntcnnnnnnnnnnannctnnnnnnnnnnnnnnnnnnannnnnnccnnnnannnnngnnggaanngaganngnangaggagncagatnngaaagagagagagaggaaaaatannancancgcagnaggtacntcgancgnacaannnngnanntganggaaaagnaannggcnanngnnnnntnnntncgtttgngntncgngntnnannngncntcgncangnctnntnnncnnnnnnangnnatnngnnacnnnnnnnanaannnaagngangnnnagngangtgaagtgtagagttgttgagttgtttagtacattaaattacgcgcgcctttcaccttttgatgggatctgatacgcgagttcactggcgagttcgtcgacgtgcgcgacgaaaggatcctcgagcgcgtcgaattcagaatcaccagccgcccggaacgcacctacgtttgatgagtgctcgttctccacgcgaaacacgttccacattgcgcgtctcacaatttcgacgccagccaaaccagtgacgagagcctgcgctgaaagcgtcgccagaggtaagcccggcacggcggcaaacaagctcgccgatcgccccataatgttaaatactaccgcggtaatccacgccgccttggactttacgagagtacgtcgaggtaaaatctcaaagtaccacttattcgttcgattgaacgatacgactgtccaatccatgacaaagtcccacgtcagcgagtacaacacgcttgcgctcgtcgccaggtacgcgattatccatcgcatcgacgtgtgatcgctcgatgtcgtggctgcgccaaagcgcaaccagatggctacaattgcgaggctatatttacctccgttcaaaatgtgcgcttttgccgagccgcctcgcttgagcacgattgaatctcgagctcttcgaacgcactgagcgagacgccaccattggggtagtgtcgccgctatcgcgcgcgttgacgtcgcttctgacgcaataccgaacgtaatgatcaaatccgcaatcgcagtagactgggacgtaagttgatctgctatgaagaagtctgggaacaccacagcgcgccagggagccgtcacggtccgagcaacgtgtctcgcgagaaaacgcctagtctgcatcggcggctgaataaaccacaactttggatcgtcggcccacttccaagaagacggcaccggaacgacgaaaaatgcaaacagcgaaatcgtgaagggtcccacccattccgtcgaggcgcgccccgaggaccaaaggatcgtactcgtcatcaaaatcgaaacgagcatcagccacggaagaacagtggcgagaatcgcatgttcggcgcgcagacccgttttaccgaccgatctgaaaaagatgagctcccagtgcacggagaggcgttgccagcagtaaacagtaggtccccacaggagagattggccgaaaactaaaagagctcctctcaacgtgacaaaagcttcgagctcgcgttggcatcgtgcatccgtactctcgagaccgcacgtgacgactagataccacaggggaatgagaagcgtggggaaagctaaaccccagaagaacccacctgaaaagaataaaagagggttcccagcgctatcgcgctctaagttgacctttgtaccgtcgtctttgatgcgtttgcctgtttctctcaacttgccgagcagttcgatgcgttcttttcgttgaatggtgtgactgtgcaacgtctttgaatcgaaccgcacaagtccagtcttagacgcctcaatgcgacgaagtagagcgtgacacgtgagaaaggcgtcttcgcacagtttcgtcatcgttttacactgaaacgtcgtctccttcaagtcgggccagaaggcgagctcgttacaagcagtgcaataaatgccactcgtgcgcgtcctggattctttgtccatcttctttgtgatttttctcaccgccacggcgtttagcgtgctgaaattttgaatcatgcaaacgctataataaatctcgcgcacgtcatgcaacagcgcgcggacagtcatctctctagatttaagattttgagctgaattgcctttctttgaatccacaagcgccatggcggctcgtttgacgcccgacttttcatcgatgttggcgcgctcgtccgcaaaaagagcgtataaatccgtgccgctcatcgtcgtgagcgaaccggctctgctgtgtccgccacttctcgccttcacgtcggcagcatttatattcttctcttccacaaggtcgttatcattcatagtcgggctcgactgggcgctgtcgtggtggttgtcttcgtcttccacttgagacacgcgcgggctcacgactggagttgccgtattcaaagccgcatcaatcacgtcgatccgtttacacgccaacgccaacgctcgagcttgcatttcgaccagcatttcgtaaaatctattgcacttgtttgcctgcgcgtcgagcgcgtcgtaaaactctcgcaagacgtcgggtacgcccaaaccggcatcctccaacgtgctcttcaccttgagcatcggttcgtactccatcgagagagacgcccacagctcctccagagccgttctctcattttctgatttatcatcctcgatgagttctgtgaacaaccgcggcgcgttcgcgtactgactccaagctacgtccatgctgtttcgacgcccgtcgtccatggattcgcgattgctataaaagtgttcctcggtcgacgtgttcccgggcgacgccagctccgcccgagctttcgcctcattcacgtacgccttgagcgtttcgtattcgatgtacatcgtggaccattcgctcacgcgatacctcgcgagggtcttactaaatccaaccatggtggcgctgccgccggcaggactcaaggagtccttgagtcaagttgtaaaatccttggacgacgacgacgacgacgacggatgagtcgacgacgacgtcgacgagaggtacctcacggacgtctgcgtttacgtccacgcgcgcgcgtgaggtttcgcgtcgtgtgcgcgtgcgcgcgcgcgtgtgtcgtcgcgctcgctcgtgaggggtcgccgggagaagcgaggaggccaagggtcggtgttcctagagttgtttcactactacnagnnncnggnnnnngnnnnnnnnnncnntnnnnnnnntnnnnnntnnctnnntnnnnntgannnnnnnnnnntnncnnnnnngnntnnnnannncnnngncntcntcntcnnnnncgnnnncgnnnnnnacnntnanngngnnnnnncncnnn

SEQ ID NO: 760 - DNA, 4000 bp, Escherichia coli
  misc_feature (1985)..(1985): n is a, c, g, or t
  misc_feature (1987)..(1987): n is a, c, g, or t
  misc_feature (1992)..(1993): n is a, c, g, or t
  misc_feature (2030)..(2030): n is a, c, g, or t
aaaaaaaggggcgaggatgccgtcaccgtttccagggacctgatcgggcagcatacccacggcctcgccacgtttgaggcaacgcaacaaggcgcgaacgccactcaaatcggcaggaaccgacctcaccactcctcggttacgagcctcgcgcaaaagtcgatcgagcgcttggcttttggcaggtttaaatagcactgtcatgggaaggtgttgggcgatatagcgggggatgacttcaaagcttccgaggtgcggcgtcatcacaagcaaaccacgttgttcgagtcgggccgatgcgatggcctgcgtcagcaccgtttggctggggctttcacaatgggcaaataagcgttcgtctggccaaaaccacaaggcgggtaattcggcaacaaggcgacctgtatgggcgcggacccgatccggcataaaacctgtaacgtcatagcccgcaatcgacaaatgtttgagcgacttttgccgataagatttggagacgacccaagccaatcgaccgatcaaggcaccgagcgcccaaagcatttgcaagggccaaagcgataagcattggaacaataaacgtagcatggtatttaccgataagcgctataatcgcacttgccgagttaatgacaacttgcggggcacacaaataccgctaaagcgtcgccgcttcaaagggaagttggctacgcccaacaacctggaggcaatggcatgagcaaaagttatttttttacctcggaatcggtctccgagggtcatcccgacaaagtgtcggatcagatttcagatgcaattcttgatgcgatttttgcacaggatccacgctcgcgggtagcagcggagaccttgtgcaacaccggcttggtcgtgcttgccggcgagatcaccacgggcgccaatgttgactacatccaggttgcacgcgacaccatcaaaaggattggctacgacaacaccgagtacggcatcgattacaagggttgcgcagtgttggtggcctacgacaagcaaagccaggacatcgcgcaaggggtcgatgagggacgcgggcttgatcttgaacaaggtgccggcgatcaagggcttatgtttggttatgcctgcgacgagacaccggttttgatgcccgcagccattcattacgcgcatcgccttgtcgaaaggcaggctcagctacgacgagatggtcgtctaccctggctcaggcccgatgcaaaaagccaggttaccctgcgctacgtcgatgacaagccgcatagtgttgacaccgtggtcttatccacgcagcatgcccccgatatagcctacgaccaattgcgtgaagcagtgatcgaggaaattatcaaaccggtccttcccaaagcattgctgcaaggcgaggtgaagtatttggtcaacccgacaggacgctttgttgtcggtggccctcagggcgactgcggtctaactgggcgaaaaatcattgttgacacttacgggggcgcggcgccccatggcggcggtgcattttcaggcaaagatccttcaaaagtcgatcgttcggctgcctatgccgcccgttatgttgctaagaacgttgtcgccgctggccttgcgagccgctgccagattcaggtcagctatgccatcggtgtggcacagcccacatcgatcatggtgaccacttttggaaccggaaaaattagcgacgagcgccttgaggcgcttattgccaaacatttcgacctaaggcccaagggtattgtgcaaatgcttgaccttcttcgacctatctatcaaaaaacggctgcgtatggtcactttggccgtgacgagcccgagttcagttgggaaaagaccgataaagctcaagcgcttcgcgccgacgcgggcctttaagccttggatcaacaagacctttaagaaccaagccaaccatcgataaaccctcaggcctggggtttatcgatcgattgattccgaatcgcgctataatttcngnctcgnnatgaatgcccgaggagcgttgcgaggtgtgtccatcngctgacacccccaggctcgggcaggttgctcagtttgggtgactttgcaacggcgctcgcccactttgttttttgaaaaggagggcgcagcatgagcgctgtagccagtcaagttattcctcaccccgccatcaaacatccagccatcggatcatttactgatttcgttgttgctgacctgtcattggccgaatggggccggaaagaaattcgcattgctgagaccgaaatgcctggtcttatggcgattcgcgatgagtttgccgcttctaaacccttaaagggcgcaagaatcactggatcgcttcacatgacgattcagacagcagttctcattgagaccttggttgccttgggtgccgaagttcgttgggcttcttgcaatattttttccacccaggaccatgcagcggctgcgattgctgcggcaaggattcctgtgtttgcccacaagggcgagaccttggcggaatactgggactacacccatcgaattttcgaatgggccgacggcggcagtaccaacatgattttggatgacggcggcgacgctaccttactactacatcttggcgccaaagcagcaagcgataagagccttctcgaacatccaggcagcgaagaagaggccgctctttttgcttcgatcaagtcgacattggctaaggacccaggtttttatcagcgacatctgagcgctgtgattggtgtgaccgaagagacaaccaccggcgtgaagcgtctttatcaaatggcagagcgcggcgagcttgctttccgggccatcaatgtcaatgactcagtgaccaagagcaagttcgataatttatatggctgtcgcgagtccttggtcgatgggatcaagcgcgctaccgatgtcatgatcgctggcaaagtcgcggtggttgcaggctatggcgacgtgggcaaaggttcggctcaggccttgcgtgctttgtcagcgcaggtttggatcactgaaatcgatccaatttgtgctttgcaagcagccatggaaggttatcgaatcgtaaccatggacgatgcctgcgatcaagccgatatttttgtcactgcaaccggtaacaaggatgttattactcgcgagcatatggctcgtatgaaggatcaggccattgtttgcaacatcggtcacttcgataacgaaatcgatgtcgctggtcttaaagaatgccgctgggaaaatatcaaaccacaggtcgaccatgtgattttccccgatggcaaacgcatcattttgttggccgagggtcgattggttaaccttggttgcggcactggacatccctcgtatgtgatgagctcctcatttgctaatcaagtgattgctcaaatcgaactgttccagtctaaagaccgctatgaaactggcaaggtttatgtgctgcccaaacatctggatgaaaaggtcgcccgcttgcagcttaaaaagctcggcgcgaaacttaccgagctgaccgcagatcaggcaagctacattggtgttgacgcgcagggaccttataagcccgagacttatcgatactaagcttatagcgtctaaaaagccctagggactcgagaggtatcgatgcgacttgaccaggccttgcagcaacgaggcctggttgcatcacgctcagcggcttcgcgactgattcaagccggcgccgtctcggtcgatggcaagccggcgaccaaggcctctgttgaggtgtttgagcaatcctcgattgaactttcgccatcgccggaaaccgaattcgtctcgcgtgccggcgccaagcttgcgggtgtttttcgagccaggcctgagctcaacgcccaaggctattgggtcgactttggtcagagcactgggggttttaccgattgtttgctcagacaaggtgctgagcgcgtgttgggctttgatgtggggcacaagcaattaagcacgaagctgcgtgaggactcccgagtttgttgcg

SEQ ID NO: 761 - DNA, 4000 bp, Escherichia coli
  misc_feature (19)..(19): n is a, c, g, or t
  misc_feature (169)..(169): n is a, c, g, or t
  misc_feature (235)..(235): n is a, c, g, or t
  misc_feature (1708)..(1708): n is a, c, g, or t
  misc_feature (1714)..(1714): n is a, c, g, or t
  misc_feature (1789)..(1789): n is a, c, g, or t
  misc_feature (2843)..(2843): n is a, c, g, or t
  misc_feature (3200)..(3200): n is a, c, g, or t
  misc_feature (3209)..(3209): n is a, c, g, or t
  misc_feature (3216)..(3216): n is a, c, g, or t
  misc_feature (3223)..(3223): n is a, c, g, or t
attaattgtgatcggtggnaatagcggtgattttaccggtgttaatatgaaagccggaaccattatggtcttagggcagttagggcagcgacccggcgccagtatgattcgagggactattttctcaacacagtcggtacaattgttacctacatttacctataacacnacctataagccaacctttttaaaacgatatctgatttatttaaagaagttaggttttacgattgangatgcttatctgaatggtaaatatcaaagctggagcggtgattctctggaactgaataagggtgaaattttattgttttcggaataatggtcgtcacccgtacggtctagaaataatttttcagcccgtttaaaaaaaccggttaaagactgaaggtctttaaccggttttttgttttcctagtctttccagatatcaataatattagtgaagtcatcagtccagcttttaaggccaaaatataagggcattttttgccagtgaccaagattgctctggcgtaagggctctaagacttgtttgtttttagccatgacaacccagtcagtagcgacgactaatggcggtgggttttgaggcttgaactcttgtatgagtgccggtattttcatggtttgtgaatggtcagataagactttctttagggctaaatgtcggttggtaatgtgaaaggctaaaataccattgggtttgattttggagaaatataaatcaaaggcttcttgggttaataaatgcgtaggaatggcgtcggagctaaaggcatcaataataagtaggtctaggcgctggtccggttctttttcaattgacaagcgtgcatcgccgactttcatggtgattttatggccgcaatttctcaggtaggtaaagtattttgggttctcagcaacgtcaacaatccccgggtctaactcataaaatatccagtcttgctcctttttagcgtaacaggacagcgtgccagcaccaaggccaacgacggcaatattccaggcgttattttggtcgttatattctgcaaagagttgaccaataggtccttgccgactgaaataagttaacggtgtttgttgtaggtggcgtggtaatcgttgtgcgccgtgtttagtggtgccgtgatagaactcacggtacttttcaggttgccccttctcattgagtagcgtactgtctctgaccgacatgacaccaaagaaagttctttcttgaaaaagtgtgcttgataataccccgtggagacccatggtaaaaaagatgagcacagcggtagataaggcaagagtggtcggacggtctcggaaactgtagtttaatccagccaataaaatgagtgcggcgccaatcggatcaatatattgtcctaagtcatcgctcgtaaagtaaatgctaagtccggtaatgaaaatgaccagagggaaaagtgcatccatacccaattgttgtagccaagggcgttctgatcggcgtaaccgcggtctgagcatcagtgctgcaatgatcataatagggtattcgtagaccgaatcaaaaataaatggcgcgatgaaggtgttgaacatacctcccagcatgcccgcaaaggacataatgagataaaaatcagttaaaaaacgggtgtgaggtcgattcttagccaactcgccgtgacacaccataatggctaaaaagaaggcggctaaatgcagggcnaaattnacccaatatggcaaaactgcggggttaattaatgagtaggcgataaaggggagtaataccaagggttgaatgagnaccatgaagccatggaccttagccccccatttggaaaagacgataacaaaagaaagcaaatacagcgtgagtggaatgacccagagtaagggaactgaggcaatatcggtactaatgaaattagtcagaccgagtaataaacttgaagggactaacgccagtattaaccaatataattttttctggagcgttaatgcgggtacctcttcttctggattgactgttttttcggtgagttcttgatgttttttagagactttccaaaaaagagccccacaacttagaataagtgtacataagagtaaataaccaccgccccagtatagtttctggttttcaagaccaatgccgggttcaatgaagaaggggtagcctaataaggcaattaagctaccaatattactggcagcatagagaaaataggggtctttacttgaacttaggccaatgtttgagaaccatttttggatcagtgttgaggtcgttgaaacaacaaagaagggtaacccaatggcaagaaaaagagttgaaattaaccaaaaagtagggtcgctttctgtgggtgggttgatattgtccggtaaacccagcggtagggccatgaggctgataaggagtacaccggcatggaccagaatttgtttggaagcgacgagccgtgtcgatagaaagtgcgcatagagataacccaaaaataacagactttggtaaaacaccatacaagtgttccatacggccggggatccgcccagtaaaggaagcagtattttgccaaacatgggctgtaatacaaacattagcgaggcactgacaaatagcgtggtagcaaataagaagacagtggcagcgttatttttagatgggttattcataatgttaaggtgaatgacgtttttttaagaatcagagtgttatcaacaacgatatccaagagcatatagttgctggaaaaaggggttaaataaggcttatagatgcatcgaccatattcaagcacaacctgtaataataatgcatttattgattcaaaataaagcagtatcagttaatttancggggattaatgattattattcatataatgctggaattttattgtctggtattcttcggctgttctgttgccatatttaagagaggagttgtcagcgttagtcagttttttaaagggagtgatggtcgctattggttgacgatattaagtaaaaaggcaaggtttacggtgattttatggcgtcgacatgttgttgaaaggtaaagattctttagcggttcgttttattgtgttctttgggaactgtcataaactatttccatggttagcccttgaaataaaggatctagccacaagtagaaatttaatgcgtatttgccagaactgataggtttctttcaagagttaattatcttnggacaacangatgacntttaganttaatgatgaagcaccgaactttgttgcacaaacaacccaaggagaaattaattttcattaatggttggggcgagttggggagtgttattttcacatcctaaagatttcacaccggtttgtaccactgagttaggttatctggcaggtttggaaggtgcgtttttgcagagaaattgtaagatcattgggttaactgttgactgtttaataacgtatgctgagtgggtcaaggatatagaagaaacacaaggaaatagtgttaattatccggtgattgctgatattgatttagccgtcgcaaaattatacaacatgcttcttgctgatgaatcagggcgttccgaagggcgtaccgcgcaaatcaatgcgactgttagatctgtatttattattgatcctgataaaaagattaaattaatattggtttatcctatgacgacgggtcgtaatttcgatgagattacccgagtgcattgattcaatgcagctaacaaaaaagtataaagtggcgaccccggtaattagtccgacagtttcccttggtaatgacactactacatcttatcgcaatggattaaataagattacggtgttgttaatacccaaaaatgtagggtttttgcacaagaaacaataacctttgaagaacatagctgggatccgggtaatctattcgcgtataatgataaaattgcaacgttaggctattttatgacatacagtatttatctttcgggtgaaattcattcaaattggcgagagcaaattcaagtcgg

SEQ ID NO: 762 - DNA, 4000 bp, Escherichia coli
  misc_feature (13)..(13): n is a, c, g, or t
  misc_feature (38)..(38): n is a, c, g, or t
  misc_feature (44)..(44): n is a, c, g, or t
  misc_feature (47)..(47): n is a, c, g, or t
  misc_feature (52)..(52): n is a, c, g, or t
  misc_feature (55)..(55): n is a, c, g, or t
  misc_feature (58)..(58): n is a, c, g, or t
  misc_feature (62)..(62): n is a, c, g, or t
  misc_feature (83)..(84): n is a, c, g, or t
  misc_feature (98)..(99): n is a, c, g, or t
  misc_feature (102)..(103): n is a, c, g, or t
  misc_feature (114)..(114): n is a, c, g, or t
  misc_feature (116)..(117): n is a, c, g, or t
  misc_feature (125)..(125): n is a, c, g, or t
  misc_feature (132)..(132): n is a, c, g, or t
  misc_feature (135)..(135): n is a, c, g, or t
  misc_feature (148)..(148): n is a, c, g, or t
  misc_feature (154)..(154): n is a, c, g, or t
  misc_feature (158)..(158): n is a, c, g, or t
  misc_feature (167)..(167): n is a, c, g, or t
  misc_feature (190)..(190): n is a, c, g, or t
  misc_feature (193)..(193): n is a, c, g, or t
  misc_feature (206)..(206): n is a, c, g, or t
  misc_feature (208)..(208): n is a, c, g, or t
  misc_feature (216)..(216): n is a, c, g, or t
  misc_feature (219)..(219): n is a, c, g, or t
  misc_feature (227)..(227): n is a, c, g, or t
  misc_feature (245)..(245): n is a, c, g, or t
  misc_feature (247)..(247): n is a, c, g, or t
  misc_feature (249)..(250): n is a, c, g, or t
  misc_feature (257)..(257): n is a, c, g, or t
  misc_feature (269)..(270): n is a, c, g, or t
  misc_feature (277)..(277): n is a, c, g, or t
  misc_feature (280)..(280): n is a, c, g, or t
  misc_feature (282)..(282): n is a, c, g, or t
  misc_feature (289)..(289): n is a, c, g, or t
  misc_feature (292)..(292): n is a, c, g, or t
  misc_feature (299)..(299): n is a, c, g, or t
  misc_feature (302)..(302): n is a, c, g, or t
  misc_feature (315)..(316): n is a, c, g, or t
  misc_feature (335)..(335): n is a, c, g, or t
  misc_feature (354)..(354): n is a, c, g, or t
  misc_feature (364)..(364): n is a, c, g, or t
  misc_feature (372)..(373): n is a, c, g, or t
  misc_feature (392)..(392): n is a, c, g, or t
  misc_feature (396)..(396): n is a, c, g, or t
  misc_feature (407)..(407): n is a, c, g, or t
  misc_feature (419)..(420): n is a, c, g, or t
  misc_feature (429)..(429): n is a, c, g, or t
  misc_feature (439)..(439): n is a, c, g, or t
  misc_feature (445)..(446): n is a, c, g, or t
  misc_feature (467)..(467): n is a, c, g, or t
  misc_feature (470)..(470): n is a, c, g, or t
  misc_feature (480)..(481): n is a, c, g, or t
  misc_feature (734)..(734): n is a, c, g, or t
  misc_feature (767)..(767): n is a, c, g, or t
  misc_feature (813)..(813): n is a, c, g, or t
  misc_feature (849)..(849): n is a, c, g, or t
  misc_feature (863)..(863): n is a, c, g, or t
  misc_feature (971)..(971): n is a, c, g, or t
  misc_feature (1662)..(1662): n is a, c, g, or t
  misc_feature (1668)..(1668): n is a, c, g, or t
  misc_feature (2630)..(2630): n is a, c, g, or t
  misc_feature (2656)..(2656): n is a, c, g, or t
  misc_feature (3774)..(3774): n is a, c, g, or t
  misc_feature (3927)..(3927): n is a, c, g, or t
  misc_feature (3939)..(3939): n is a, c, g, or t
cggcaaagagaantgccgccggaagaagaatcttgttntttctnatnactcnatnatntttnaattgtggcgcggggatggannggccccgcaccggnntanncttcttgattngnnttttttcngtggttngangatagcctcacgngctacncgtngtctttttntttcatcgtgatgtcattatggngtnaaacaaactcacngncgtcgaanccngtgggaancgaaccctgcggagatgngntnnccgcagncctctcggacanncgccggnganangccgagnggnaggtgtngancagggattttacnntgtcgttcccgtcggggcngcccgaaacgatgacctcnaacatgtcgntctgtttnnggcccaggaggacacgtcncgtntcctccctttnctcgtctgttgnnggtggatcntgtaccacgnggcggnnggcttcgcccatctgttcaanacnaaccccctgnncaagcgagcggcccaaaaggggcagctcttcggtgtcgtcttcatcctcgtcataatccggctcctccgcgtccgcatccgggaaagattcatcgtacagcggaaagtcgatttccagaggttcgttaggctccccctcgggagcgacaccgaacacttcatccaggtcttccggcggaatctgccgggggtgttcgggtacattcgtgggcacaaatatatcggctttttccgtaactttttcagtttcagnttctacggcagcttgtggccgggagtggcgcgngtcgaggacaaagcggctcctgccgatgatctcctgccggcagggngtgtcttcggcaacgatcccgtctgccggttcgttncgttccatccgccncaggcggaaaaacgcccacaaggcataccccacggcaaagaggggcagcagccacaacgccccgttcatcgctcctccgctttgggttgccgggaggccacggcctcncgctcctcgaaaagccgctcgatggtttcccggttatcgtccaggtgcgccttgagaaccttgtccacgtaggccgtgatcgtcacgtcgccacgaccgatgacacgggtgatctcgcggatacgctcgtgatacgacggacgtatcttcacgtgcttgttaccggcgaaaggcagccgcagcaggcagatgtaacgggccaggtactcggcctcgggggtggggacagtccccacggcgacctcccccgaagggccgtcggggacgataagggttttcatcctgcgccggtagcggcacacgcggaagatgaagggcacggcgacgcaaaggacggccgccaggataacagataaaataattgctttgtctgacatgatggattgtttttaataggttgtaaatattgggttcataactaaaaaatatcggagttccgtttcttgtagagttccgaaatttcctcctgataggtcgcgaaatgctgctccagcacattgtccaggtagctatacagcgagagttcgttcttaccgataacctgcactatccgggttatacgctcgtgaaactccttgcggatatacaccgttttgccgcttcgggtattggagggggcgttccggataaaaagacgctcgtaatcctggcctttccctcttcggcggcgtccctcctctttcgtagccgncgaggnggcggcctcgccggacggttccgatagagccgatgcctcctcctctttttccggcgtgtaaggatgtaatggccggtttcggcttttggcctggctgatgatgaaggaagcgtccaaaccgtcgtcatgttcttttccgctcataagatcctactttaacagttcgatcaattcatccacgagtttatccaggttgctgccccggatcaaagaacggtctgccgggaagagcgtggagcggaagacagagcgacggctggcgttctgctcacgacgaaaacgcttggtgtcaggcaggaaggtcttcagaacaggaagacccagctctttcattaccgcctcgtaaacctgatataactctgtcttttcacgtccgtccaccatgttccatagcatatacagccctttcatccgggacttctcgcggcccatgatatgctcctttaccacaaccgcgtaattcagggtgctttccatgacaacccggtcggcactgatcggggcgacgagataatccattccggccagggaatgaatcagatcctcgttattgatcgtaccgggaaggtcgaagaacacataatcgaaatcaccttgcggcaggaggtagtcggcatcggccaacgcctctttcgtgttgctttccacgacaggataggctttcttttgaagccgggtgaattgttcgtaagctaacctcttgtaatgttcgtcttcgagggcaagcttcaggtcacgttcccgcatctccacgatggagtgttggggataatcgcagtcgatgaccgcgacattgaaaccctttacatagtgcaggtaagaggctgccagcaccgtgagggtggttttgcccgctccgcctttctgggtggagaaggccacgaatttcgttttctctttcattgttccatgcgtttttagttatacaatcgggtaatcgttcatctcttcacgtatccggncaagtgacggcatgagattttatgcnggtatgccggcacgcatatatgctggtgcgctggcaggctgttacgccggtatgccggtgcatgggcgcgtgtccgattttatactcatgcgcaaccgcatttgcttatccggacaaagacccgctttttcctctgcacacgatgttttctgcatccgtccacacgtgtgcggacagggggatgtgtcattgcccgtatccgttctcacgtgcaaagtaaacccttaaaaacacgggttgtatgctctttttccgctatggccgcgtgtggcgtcaaagtggacgcaagtggcgtaatcgcttatggcacaagtgattgaataggtcggtatctttgcctcgtgaacgatcccgacgctaatgaagccgtccttgccccgttttacggcggctctttcaatgttctgtccgcgagcgggcagaaggtatttgcaaagggcaaatagcaagctgtgttttctgctgcacgattctcgttttgcagcagaaaacagcttgcccgcaagggggagaaagcacctccggagtcggtgcttttcagaagggcggcaggccgcgaagggatcggaattttcaggaaccggtggggctctggcctctccttaaaatttcgatgcgatggaaaagaacagaaagccccgagggggcaaagggggacgacccgcgaaaaacgacccggccgtttaccgcttttcggtaaacttttcagccgtggaacatgcccgtttcctcgacctttacgagcagtccgggctattgtccaaagccgcttttatcaaagcgagagtgttcaacgaggcgttccgggtggtaaagaccgaccggggaacgctcgaatacgtggcgaagctgaccgctttccacgcccaattccgtgccgtgggaacgaattacaaccaggtggtgaaggagctgcacgcgcatttttccgagaagaaaacactcgcgctgctctataaactggagagagcgacacgtgaactggcggccgtcgggcagcaggtcgtgtcgctctccgaagagttcaaacagcgatggtagccaatatcaccaccggaaaagacgtgtacggcgcgctggcgtacaaccaggagaaagtcgatcggggcgacgggaangtactgctgacccacatcgtgagggagccggcggatgggcgcttcaacgtggccgcgacggcagaagacctcctgcgctggatgccctcgcactaccggacggaaaaacccgtcgtgcacgtatcgctcaacccggctcccgaagaccgcctngacgacgggcanctcgcggagatagccggggcctacatggagcgcatgggctggggaggacaaccttatatcg

SEQ ID NO: 763 - DNA, 4000 bp, Escherichia coli
  misc_feature (1970)..(1970): n is a, c, g, or t
  misc_feature (1987)..(1987): n is a, c, g, or t
  misc_feature (1989)..(1989): n is a, c, g, or t
  misc_feature (1991)..(1991): n is a, c, g, or t
  misc_feature (2020)..(2020): n is a, c, g, or t
  misc_feature (2039)..(2039): n is a, c, g, or t
  misc_feature (3175)..(3175): n is a, c, g, or t
  misc_feature (3742)..(3742): n is a, c, g, or t
ggtcgtaagattagagatgcatttatagctgaaccaggacatttattggttgccgccgactactcacaaattgaattacgtttgttagcacatactgctaatcttcctaccatgaagaaagcattttctgatggtgtagatattcattcgttaacggcatctgagatttttaatgtaaagctatcagagatggacgcgtcaactaggcggcgagctaaagctataaactttggtattatttatggaatttcagcatttggtttagctaataatctaggcatatcacgcacagaagcgagtgaatatatcaaaaattactttaaaaaatttcctggtatcaaagattatatggagaatgctaaggatgaggctagggaatatggttatgtaaaaaccctttttggacgtaaatgtcacgttaaaggaattaaagataggaatcctgctataaggggctttgctgaacgacaagccattaatgccccaattcagggctctgctgcggatataatccgtcgagctatgataagaattcctaataatattaaagccatagatgattcaaaaatgttattacaggtgcatgatgaacttatttttgaggtgcctgaagcaaatgcaaatgaactaattaaaatagttacaacaacaatgcaaaatgcggcaatgcctgctgttgatatatctgttccattggttgtagaagcgcatgctgcaaaaaattggaatgatgctcactaaggaatttaaaatatgacatttattgtcttggtccgtcatggacaatcagaatggaaccttcaaaatcgttttactggatgggttgacgttggtctcaccaatgcaggagtaaacgaggctattaaatcaggtgatttgatagctaaagaaggcattatatttgaccgagcttttacaagccttcaacgcagggccattaaaacactttggttgtccttagaagccgcaaatcaacttcatttaccggtaatcaaagactggaggttaaatgagcggcattatggatctcttactgggtgtaataaacaagaaacaagatctaaatacggcgatgagcaagtccatatttggagaagaagttttgatataccacctccaaaaattgacaaacaaaataaatatcatccaatccatgactcaaaatacagtaatgtagaccctgaagtacttccaactggagagagtttgaaaatgacctgcgaccgcgtattgccctacttttcatcttcaattgcacctttcataaacgataagaaaaacttaattatttcagcacatggaaatagcttaagggcgatattaaaagacctttttaaagttaacgatatagaaattcctaattacgaatttcctacaggaaatcctcttttaattgaatttggttctgacattaatacaatagtctctgctcgatacttggatgctgagcgcgctaaagtacttccggagatttaaactggttaatcatgttaaatggatgaaaattgcgcttgatttatcaaaaaagcagttaggaaagactggtgaaaacccttcagtaggctgcattatagtaaaaaataataaagtaattgcaagcggggtaacatcagatgggggaaggccccatggcgaaacaaacgcacttcagattgctggaggtgaggcgaggggctcaacggtttatgtaactcttgagccatgttctcattatggccagactgcaccgtgtgttaatgctttaatcctagcaggtataaaaagctgtgtaattgcaattattgatccagacaccagagtaaattggcgtggagcggcacttcttcaggaagctggaatagatactattgtaggtgtttgtgaacatgaagcttataaggtcaattctgatttttttaaaagacataacattcatggaccaaataaaactatacacttataaatttatataatttaatttagatatggcnggtttgcctttcataancnanccttcattaagtttttgttaatatatttntgcaaaatctttactatgngcacaaaagctattgaaatgataattgaaccaggggctgaaaagttaatcaagcagatggggaaacgtttaaaaacaaaggcacgttcaaaggtaatcaatttaatacttaatcatattaaagaagtatatcataattcagaaataacagggtggttctctgaaattcgattttcaacagataaaagaacaactattcgcatcagttcagaaaatgcagattatttaaattctatatctcaggtggtatctcaaggccgtcctaccgtaacattagagctagtttactttgcagctgctaacctttcacgcgaagacttagagagtttagtttaatatttttaggctatgttcaagttttaagttaaacctaggctttctttgagcgcaagctcttgaggcatccctactgaatgaaacccaccatcaacatgatgagtttcaccagtacaagaaagtccaaggtcagaaagaagatacaaagctgcgcccgcaacccccatcggatctgtgttgtcctgaagtgaactagcagccttgttaaacctgaacatgtgtctccctgatccaatacccgcagctgcgagtgtttttattggcccggcggatatggcatttaccctaatttgtcttggccctagatcagccgccatgtagcgcgtactcgcctctaaagctgcttttgctactcccattacattgtagttagggattactctttcagaaccaaggtatgtaagggttatcatagacccaccatcattcataatttcagcagcacgtcttcctgcatccacaaagctgtaagctgatatgtctaacgctgatttgaagccttcccgcgttgtattttctataaaacttccagctaattgatctttaccggcgaatgcaatggcatgaactaaaaaatcaattttaccccattctgtttcaagttttgaaaaagttgaatccattgttttatcgtttgtaacatcgcattcacaaagtattgaggagcctatggactcagcaagtggtttcacacgtcgtaaaagtgcttctccctgataagtaaaggcaagctccgccccttgagaagatagctgacgcgcaatagcccatgcaattgaatttttgttagcaactcccatnactaggccgcgctttcctgccattaaagtaccagttggaaaatgttgatctgccattatactatcctttgtagttgtagctgctaagtaaccaaaagtagcagtgtcatatataaattattattcaactttagtaaatattacacttccattcgtgccaccaaacccaaaactgttcgacattactgaagtcaaatcagtttcgatcattttagttacaatgttgaccttcggaagctcggggtccagctcagttatattgatagatggtgcaacaaaccctttatccatcatgatcaaactataaatagcttcctgaacccctgctgctcccaggctgtgcccagttaagcacttagtagctgatatgtagggacaatcgtctttaaaaactctactaattgcccctgtttcagcgacatcgcccactggcgtcgaagttgcatgagggttaatataatcgatttttgtaactccttttgttttagcgtcatctaatgccattctcattgctctttctgcaccttctcctgacggtgcaaccatatcatatccatcagatgttgcngcataacctgttatttctgcatatattttagcacctctcgcaatggcatgctcataatcttctaaaacaaccattcctgcgccaccagctataacaaagccgtcacggctaacatcaaatgctcttgaggcagtttctggagtgctattatatttactactcatagcacccatcgcatcaaatagtgaggacattgcccattcaacttcttcacctcctccggcaaacatgatatcttgtttcccccattgtatttgt

SEQ ID NO: 764 - DNA, 4000 bp, Escherichia coli
  misc_feature (105)..(105): n is a, c, g, or t
  misc_feature (322)..(322): n is a, c, g, or t
  misc_feature (433)..(433): n is a, c, g, or t
  misc_feature (439)..(439): n is a, c, g, or t
  misc_feature (442)..(442): n is a, c, g, or t
  misc_feature (766)..(766): n is a, c, g, or t
  misc_feature (1007)..(1007): n is a, c, g, or t
  misc_feature (1561)..(1561): n is a, c, g, or t
  misc_feature (1971)..(1971): n is a, c, g, or t
  misc_feature (3082)..(3082): n is a, c, g, or t
  misc_feature (3793)..(3793): n is a, c, g, or t
  misc_feature (3865)..(3865): n is a, c, g, or t
gcgattggttcaatcgattcgacttcgaggccggccatggtaagtgcatcggcaagctcatggcttgtccagtctggattcacgtaatgtcgaagccactgttcngaaaatttcataacaccctcaaaaaaccatgaattcagcttaacgatcaaactgctttaaaaatctaagatcgttttcgaaaaacaaacgaagatcggatacgccatagcgcagcatcgccaagcgttcaacccctgaaccgaaggcaaaaccaataaagcgctccgggtccagaccaacattgcggacaacctgaggatgaacctggccagagccngacacttcaagccagcgatccttgagcggtcctgatccaaaacgcatatcaatttcagctgaaggctcggtgaaaggaaaatatgagggacgaaagcgcacatcgatatcntcttgntcnaagaactgacgcaagaacatcgtgtacacactctttagatcagcaaagctaatgtcctcgtcgagccacaagccctcgaactgatgaaacatcggtgagtgtgtggcatcagagtcaacgcgataagtcttaccaggcgcaatgacgcgaatgggcggcttatgctgtcgcgcgtatcgaatctgcatcggcgaggtatgtgttcgcaaaagcagtccaccctcgacataaaaggtgtcgtgcatcgaacgcgctggatgatcctgaggcgtatttaatgcggtgaaattatagaaatcatcttcgatttctggaccgtcagcnacatcaaagcctatcgagcggaaaatcgtctcgatacgagcaatcgtgagcgttatcggatgtagaccaccatcctcacgccctcttcctggcaaggtcacatcgatcgaatctttttcaagttgggtatttaaatgttgctccgcaagcgctctttctctcgatttccaggcattctcgatcgattgcttcgctacattaagactgcgcccaagctccgtgcgagcctgcgtgtcaagcnctgcaaggcctttcatcatggcggttaaacgcccgtctcgacccaaaaatcgtgccttaacattggcaagttgtgcggcgtcttcacagcatgaaaagtcctcgcttgcttgctcgatcattgctgcgattgaaaccgcgtccggtaaagcattcatcggtcaattccttgggttgaagggcgagcttgcgcgatgttgggtatatcaaccgtctcatcgcaacaaaaagggccttccgaacaaacagaaggccccctctcatgactgggtcaatgtgaatcaggcagcgatggttgatctcacctgcgccacgatggaggcaaaagccgccttgtcgcgcactgccaaatcagccaggactttacgatccagtccaatcgaagctttattcaaaccgtgaataaatgccgagtaggtcatgccatgttcacgaaccgcagcgttaatccttgcgatccaaagcgcacgaaatacgcgtttgcgattacggcgatcgcggtaggcgtattgtccggcgcgcataaccgcctgtttggcgatgcggtaaacattnccgcgacgaccacggtagcccttagcagcagcaagtacttttttgtgacgtgctcgcgccgtcacaccacgtttaactcgaggcatttgcggactcctttacgcgtagggaagcattgcacgtacatgcgcaatatcaaccgccataacctctgcggatccacgcaactgtcgcttgttcttcgttgttttcttggtgaggatgtggcgcttgaaagcttgtccgcgtttgatcgaaccgcctggacgcacacgaaagcgcttggccgcgccccgcttggttttcattttgggcatgattgctccatcttcttaacgatccaaggtgtgctttgacatgcgttgcaaaaagcctcgcataacaacgcccttttaagaccctgaccgcgtctttttgtcgggctcagcganctgaacccaggcaacccataagtatacgctaaaacgcttactttttgcgcttgggtgcgataaccatcaccatttgacggccctcaagtttgggcatcgcttcgacctgaccgtgctgatctagatcggtccggatacgttcgaggagacggacaccaaactcctggtgggccatttcacgacctcggaaacgcatcgtgattttcgctttgtcgccttcttcgaggaatcgaatcaggttacgcaacttgaccatgtaatcaccgtcatcggtgccaggcctgaatttgatctctttgacttgaatcgtcttttgcttggactttgcctctgctgctcgtttctgttcctgatagcgaaacttgccatagtccatcaactttacgacgggtggtgaagcctgagcagcaatttccaccagatcgactgcggcctcgtcggccattcggagcgcttcttggattcggacgataccgagcgcttcattatccttcccgatcaaacggacttcgggaaccgttatttcaccgttaatacgatgggtacgttcagtagcgatgcttgcttctccggttcttgttgatctttgtctcgatgattaagcctgattaggcgttaaacaacttttgccaaggcgcttgatcgcttgcttgttacatcgtcgccaagcaaatcgatgaaggactcgaccgccatgacaccgaggtcaacgccacctctcgcacgcaccgacacttgtccagcctgacgctctttctcgccaactacgagcaaataggggatcttttgcaggctgttctcgcggattttatagttgatcttttcgttccgcaaatcggattcaactctaaatccttgttttttcagcctttgcgcaacattgtccgcgtatgaagcttggacctcagtaatactcatcacaacacattggaccggagccaaccacattggcagtgcgccggcgtgatgttcgatcaagataccaataaagcgctccatcgagccaacaatggctctgtgcagcataactgggtgctttcttgtgttgtcgatatcaacaaactcggcacccaagcgcatcggcatattgaaatctacctgcatcgtgccncactgccaaatacgtccaagcgcgtctttcagtgagtactcgatcttcggaccgtaaaaggcgccatcgccttcgctcaccataaaggtaacacctgaagcagtaagcgagtttgcaagtgcggcttcggctttgtcccaaagtgcatcactgccaacgcgtttcacaggtcgcgttgcgagcttgtaaatgatttgatcaaagccaaaatcggcatacaccgactgtaggagacgcgtgtagttggcacattcctgttgaatttgatcttcggtacagaaaatatgaccatcgtcttgaacaaaaccgcgcacacgcataatcccgtgcaaagcaccagagggctcattacgatgacaggcaccgaattcgccatagcgcaagggtaagtcccggtagctgcgtaagccagcgttatagacctgaacatggcctgggcaattcatcggtttgaccgcatagtcacggttttccgaggcggttgtgaacatggcgtctttgtaattttcccaatgacccgagcgctcccaaagcgaacgatcaagaacttgcggacaacggatctcctggtaaccgttgtcctgataaatccgacgcatgtactgctcgacctgctgccagaccgcaaagccacgcggatgccaaaacaccatccccggcgcatcgtcttgcagatggaacaaatcgagttctcgaccaaggcggcgatgntctcgcttttcggcctcggcaagcatgtgcaaataagcatcttgatcggtctgattgacccaggccgtaccntagatacgctgcaacatttcattgcgatggtcgccacgccagtatgcaccggcgaccttcatcaatttgaaaaccttcaatttaccggtcgatggcacatgcggcccgcggcacaagtcgataaagtcgccctcg

SEQ ID NO: 765 - DNA, 4000 bp, Escherichia coli
  misc_feature (819)..(819): n is a, c, g, or t
  misc_feature (1796)..(1796): n is a, c, g, or t
  misc_feature (1926)..(1926): n is a, c, g, or t
  misc_feature (2013)..(2013): n is a, c, g, or t
  misc_feature (2016)..(2016): n is a, c, g, or t
  misc_feature (2133)..(2133): n is a, c, g, or t
  misc_feature (2275)..(2277): n is a, c, g, or t
  misc_feature (2280)..(2280): n is a, c, g, or t
  misc_feature (2283)..(2283): n is a, c, g, or t
  misc_feature (2289)..(2289): n is a, c, g, or t
  misc_feature (2295)..(2299): n is a, c, g, or t
  misc_feature (2307)..(2310): n is a, c, g, or t
  misc_feature (2316)..(2316): n is a, c, g, or t
  misc_feature (2321)..(2321): n is a, c, g, or t
  misc_feature (2328)..(2328): n is a, c, g, or t
  misc_feature (2334)..(2334): n is a, c, g, or t
  misc_feature (2339)..(2340): n is a, c, g, or t
  misc_feature (2343)..(2343): n is a, c, g, or t
  misc_feature (2352)..(2352): n is a, c, g, or t
  misc_feature (2355)..(2355): n is a, c, g, or t
  misc_feature (2361)..(2361): n is a, c, g, or t
  misc_feature (2364)..(2364): n is a, c, g, or t
  misc_feature (2367)..(2367): n is a, c, g, or t
  misc_feature (2372)..(2374): n is a, c, g, or t
  misc_feature (2376)..(2376): n is a, c, g, or t
  misc_feature (2379)..(2379): n is a, c, g, or t
  misc_feature (2382)..(2382): n is a, c, g, or t
  misc_feature (2391)..(2391): n is a, c, g, or t
  misc_feature (2393)..(2394): n is a, c, g, or t
  misc_feature (2396)..(2397): n is a, c, g, or t
  misc_feature (2403)..(2403): n is a, c, g, or t
  misc_feature (2409)..(2409): n is a, c, g, or t
  misc_feature (2412)..(2412): n is a, c, g, or t
  misc_feature (2417)..(2417): n is a, c, g, or t
  misc_feature (2421)..(2424): n is a, c, g, or t
  misc_feature (2427)..(2427): n is a, c, g, or t
  misc_feature (2430)..(2433): n is a, c, g, or t
  misc_feature (2436)..(2436): n is a, c, g, or t
  misc_feature (2439)..(2439): n is a, c, g, or t
  misc_feature (2443)..(2443): n is a, c, g, or t
  misc_feature (2445)..(2445): n is a, c, g, or t
  misc_feature (2448)..(2448): n is a, c, g, or t
  misc_feature (2450)..(2451): n is a, c, g, or t
  misc_feature (2454)..(2460): n is a, c, g, or t
  misc_feature (2466)..(2466): n is a, c, g, or t
  misc_feature (2472)..(2472): n is a, c, g, or t
  misc_feature (2475)..(2477): n is a, c, g, or t
  misc_feature (2480)..(2480): n is a, c, g, or t
  misc_feature (2484)..(2484): n is a, c, g, or t
  misc_feature (2486)..(2486): n is a, c, g, or t
  misc_feature (2490)..(2490): n is a, c, g, or t
  misc_feature (2493)..(2493): n is a, c, g, or t
  misc_feature (2496)..(2496): n is a, c, g, or t
  misc_feature (2499)..(2499): n is a, c, g, or t
  misc_feature (2502)..(2502): n is a, c, g, or t
  misc_feature (2505)..(2505): n is a, c, g, or t
  misc_feature (2517)..(2517): n is a, c, g, or t
  misc_feature (2520)..(2520): n is a, c, g, or t
  misc_feature (2523)..(2523): n is a, c, g, or t
  misc_feature (2526)..(2526): n is a, c, g, or t
  misc_feature (2529)..(2529): n is a, c, g, or t
  misc_feature (2535)..(2535): n is a, c, g, or t
  misc_feature (2541)..(2541): n is a, c, g, or t
  misc_feature (2543)..(2544): n is a, c, g, or t
  misc_feature (2553)..(2553): n is a, c, g, or t
  misc_feature (2556)..(2556): n is a, c, g, or t
  misc_feature (2559)..(2559): n is a, c, g, or t
  misc_feature (2564)..(2564): n is a, c, g, or t
  misc_feature (2567)..(2567): n is a, c, g, or t
  misc_feature (2573)..(2574): n is a, c, g, or t
  misc_feature (2577)..(2577): n is a, c, g, or t
  misc_feature (2586)..(2586): n is a, c, g, or t
  misc_feature (2595)..(2595): n is a, c, g, or t
  misc_feature (2598)..(2598): n is a, c, g, or t
  misc_feature (2605)..(2607): n is a, c, g, or t
  misc_feature (2609)..(2610): n is a, c, g, or t
  misc_feature (2616)..(2617): n is a, c, g, or t
  misc_feature (2621)..(2622): n is a, c, g, or t
  misc_feature (2624)..(2624): n is a, c, g, or t
  misc_feature (2627)..(2628): n is a, c, g, or t
  misc_feature (2631)..(2632): n is a, c, g, or t
  misc_feature (2634)..(2634): n is a, c, g, or t
  misc_feature (2637)..(2642): n is a, c, g, or t
  misc_feature (2644)..(2648): n is a, c, g, or t
  misc_feature (2652)..(2652): n is a, c, g, or t
  misc_feature (2654)..(2654): n is a, c, g, or t
  misc_feature (2656)..(2657): n is a, c, g, or t
  misc_feature (2659)..(2662): n is a, c, g, or t
  misc_feature (2664)..(2665): n is a, c, g, or t
  misc_feature (2668)..(2675): n is a, c, g, or t
  misc_feature (2677)..(2678): n is a, c, g, or t
  misc_feature (2680)..(2680): n is a, c, g, or t
  misc_feature (2684)..(2685): n is a, c, g, or t
  misc_feature (2687)..(2688): n is a, c, g, or t
  misc_feature (2690)..(2692): n is a, c, g, or t
  misc_feature (2694)..(2694): n is a, c, g, or t
  misc_feature (2698)..(2698): n is a, c, g, or t
  misc_feature (2701)..(2701): n is a, c, g, or t
  misc_feature (2703)..(2703): n is a, c, g, or t
  misc_feature (2705)..(2706): n is a, c, g, or t
  misc_feature (2710)..(2711): n is a, c, g, or t
  misc_feature (2714)..(2714): n is a, c, g, or t
  misc_feature (2717)..(2718): n is a, c, g, or t
  misc_feature (2720)..(2723): n is a, c, g, or t
  misc_feature (2725)..(2725): n is a, c, g, or t
  misc_feature (2728)..(2728): n is a, c, g, or t
  misc_feature (2733)..(2734): n is a, c, g, or t
  misc_feature (2736)..(2745): n is a, c, g, or t
  misc_feature (2747)..(2747): n is a, c, g, or t
  misc_feature (2749)..(2749): n is a, c, g, or t
  misc_feature (2751)..(2752): n is a, c, g, or t
  misc_feature (2755)..(2755): n is a, c, g, or t
  misc_feature (3370)..(3371): n is a, c, g, or t
  misc_feature (3373)..(3377): n is a, c, g, or t
  misc_feature (3379)..(3382): n is a, c, g, or t
  misc_feature (3385)..(3385): n is a, c, g, or t
  misc_feature (3387)..(3389): n is a, c, g, or t
  misc_feature (3392)..(3393): n is a, c, g, or t
  misc_feature (3396)..(3396): n is a, c, g, or t
  misc_feature (3398)..(3399): n is a, c, g, or t
  misc_feature (3401)..(3406): n is a, c, g, or t
  misc_feature (3408)..(3408): n is a, c, g, or t
  misc_feature (3410)..(3410): n is a, c, g, or t
  misc_feature (3412)..(3413): n is a, c, g, or t
  misc_feature (3416)..(3417): n is a, c, g, or t
  misc_feature (3421)..(3423): n is a, c, g, or t
  misc_feature (3426)..(3426): n is a, c, g, or t
  misc_feature (3430)..(3431): n is a, c, g, or t
  misc_feature (3433)..(3435): n is a, c, g, or t
  misc_feature (3437)..(3440): n is a, c, g, or t
  misc_feature (3442)..(3442): n is a, c, g, or t
  misc_feature (3445)..(3446): n is a, c, g, or t
  misc_feature (3450)..(3454): n is a, c, g, or t
  misc_feature (3456)..(3456): n is a, c, g, or t
  misc_feature (3460)..(3460): n is a, c, g, or t
  misc_feature (3462)..(3465): n is a, c, g, or t
  misc_feature (3467)..(3468): n is a, c, g, or t
  misc_feature (3471)..(3471): n is a, c, g, or t
  misc_feature (3474)..(3474): n is a, c, g, or t
  misc_feature (3476)..(3476): n is a, c, g, or t
  misc_feature (3480)..(3480): n is a, c, g, or t
  misc_feature (3482)..(3482): n is a, c, g, or t
  misc_feature (3484)..(3484): n is a, c, g, or t
  misc_feature (3487)..(3488): n is a, c, g, or t
  misc_feature (3490)..(3491): n is a, c, g, or t
  misc_feature (3493)..(3495): n is a, c, g, or t
  misc_feature (3500)..(3504): n is a, c, g, or t
  misc_feature (3506)..(3506): n is a, c, g, or t
  misc_feature (3510)..(3513): n is a, c, g, or t
  misc_feature (3517)..(3517): n is a, c, g, or t
  misc_feature (3519)..(3522): n is a, c, g, or t
  misc_feature (3527)..(3527): n is a, c, g, or t
  misc_feature (3529)..(3530): n is a, c, g, or t
  misc_feature (3533)..(3533): n is a, c, g, or t
  misc_feature (3536)..(3536): n is a, c, g, or t
  misc_feature (3538)..(3540): n is a, c, g, or t
  misc_feature (3542)..(3544): n is a, c, g, or t
  misc_feature (3547)..(3549): n is a, c, g, or t
  misc_feature (3552)..(3554): n is a, c, g, or t
  misc_feature (3556)..(3559): n is a, c, g, or t
  misc_feature (3563)..(3563): n is a, c, g, or t
  misc_feature (3567)..(3569): n is a, c, g, or t
  misc_feature (3574)..(3577): n is a, c, g, or t
  misc_feature (3581)..(3582): n is a, c, g, or t
  misc_feature (3584)..(3585): n is a, c, g, or t
  misc_feature (3587)..(3591): n is a, c, g, or t
  misc_feature (3595)..(3595): n is a, c, g, or t
  misc_feature (3597)..(3600): n is a, c, g, or t
  misc_feature (3603)..(3603): n is a, c, g, or t
  misc_feature (3605)..(3605): n is a, c, g, or t
  misc_feature (3607)..(3608): n is a, c, g, or t
  misc_feature (3612)..(3612): n is a, c, g, or t
  misc_feature (3614)..(3614): n is a, c, g, or t
  misc_feature (3620)..(3620): n is a, c, g, or t
  misc_feature (3625)..(3625): n is a, c, g, or t
  misc_feature (3627)..(3628): n is a, c, g, or t
  misc_feature (3631)..(3638): n is a, c, g, or t
  misc_feature (3640)..(3641): n is a, c, g, or t
  misc_feature (3644)..(3645): n is a, c, g, or t
  misc_feature (3647)..(3647): n is a, c, g, or t
  misc_feature (3649)..(3652): n is a, c, g, or t
  misc_feature (3658)..(3659): n is a, c, g, or t
  misc_feature (3662)..(3664): n is a, c, g, or t
  misc_feature (3671)..(3671): n is a, c, g, or t
  misc_feature (3673)..(3673): n is a, c, g, or t
  misc_feature (3676)..(3676): n is a, c, g, or t
  misc_feature (3680)..(3680): n is a, c, g, or t
  misc_feature (3682)..(3683): n is a, c, g, or t
  misc_feature (3689)..(3689): n is a, c, g, or t
  misc_feature (3691)..(3693): n is a, c, g, or t
  misc_feature (3695)..(3695): n is a, c, g, or t
  misc_feature (3697)..(3697): n is a, c, g, or t
  misc_feature (3699)..(3700): n is a, c, g, or t
  misc_feature (3705)..(3710): n is a, c, g, or t
  misc_feature (3719)..(3719): n is a, c, g, or t
  misc_feature (3722)..(3723): n is a, c, g, or t
  misc_feature (3725)..(3726): n is a, c, g, or t
  misc_feature (3728)..(3731): n is a, c, g, or t
  misc_feature (3733)..(3735): n is a, c, g, or t
  misc_feature (3737)..(3738): n is a, c, g, or t
  misc_feature (3740)..(3742): n is a, c, g, or t
  misc_feature (3745)..(3752): n is a, c, g, or t
  misc_feature (3755)..(3755): n is a, c, g, or t
  misc_feature (3757)..(3757): n is a, c, g, or t
  misc_feature (3759)..(3762): n is a, c, g, or t
  misc_feature (3764)..(3768): n is a, c, g, or t
  misc_feature (3770)..(3776): n is a, c, g, or t
  misc_feature (3780)..(3780): n is a, c, g, or t
  misc_feature (3782)..(3782): n is a, c, g, or t
  misc_feature (3785)..(3785): n is a, c, g, or t
  misc_feature (3788)..(3788): n is a, c, g, or t
  misc_feature (3790)..(3797): n is a, c, g, or t
  misc_feature (3801)..(3802): n is a, c, g, or t
  misc_feature (3804)..(3808): n is a, c, g, or t
  misc_feature (3812)..(3816): n is a, c, g, or t
  misc_feature (3818)..(3818): n is a, c, g, or t
  misc_feature (3822)..(3822): n is a, c, g, or t
  misc_feature (3824)..(3826): n is a, c, g, or t
  misc_feature (3832)..(3834): n is a, c, g, or t
  misc_feature (3841)..(3842): n is a, c, g, or t
  misc_feature (3844)..(3845): n is a, c, g, or t
  misc_feature (3847)..(3847): n is a, c, g, or t
  misc_feature (3849)..(3849): n is a, c, g, or t
  misc_feature (3851)..(3851): n is a, c, g, or t
  misc_feature (3853)..(3855): n is a, c, g, or t
  misc_feature (3858)..(3860): n is a, c, g, or t
  misc_feature (3864)..(3864): n is a, c, g, or t
  misc_feature (3869)..(3869): n is a, c, g, or t
  misc_feature (3871)..(3871): n is a, c, g, or t
  misc_feature (3874)..(3877): n is a, c, g, or t
  misc_feature (3879)..(3879): n is a, c, g, or t
  misc_feature (3882)..(3882): n is a, c, g, or t
  misc_feature (3886)..(3887): n is a, c, g, or t
  misc_feature (3891)..(3891): n is a, c, g, or t
  misc_feature (3894)..(3894): n is a, c, g, or t
  misc_feature (3897)..(3897): n is a, c, g, or t
  misc_feature (3900)..(3901): n is a, c, g, or t
  misc_feature (3906)..(3908): n is a, c, g, or t
  misc_feature (3910)..(3910): n is a, c, g, or t
  misc_feature (3914)..(3915): n is a, c, g, or t
  misc_feature (3919)..(3919): n is a, c, g, or t
  misc_feature (3922)..(3923): n is a, c, g, or t
  misc_feature (3926)..(3931): n is a, c, g, or t
  misc_feature (3934)..(3941): n is a, c, g, or t
  misc_feature (3943)..(3943): n is a, c, g, or t
  misc_feature (3946)..(3946): n is a, c, g, or t
  misc_feature (3948)..(3949): n is a, c, g, or t
  misc_feature (3951)..(3954): n is a, c, g, or t
  misc_feature (3956)..(3958): n is a, c, g, or t
  misc_feature (3960)..(3961): n is a, c, g, or t
  misc_feature (3963)..(3963): n is a, c, g, or t
  misc_feature (3966)..(3968): n is a, c, g, or t
  misc_feature (3971)..(3971): n is a, c, g, or t
  misc_feature (3973)..(3976): n is a, c, g, or t
  misc_feature (3978)..(3981): n is a, c, g, or t
  misc_feature (3983)..(3983): n is a, c, g, or t
  misc_feature (3985)..(3985): n is a, c, g, or t
  misc_feature (3987)..(3987): n is a, c, g, or t
  misc_feature (3989)..(3989): n is a, c, g, or t
  misc_feature (3991)..(3995): n is a, c, g, or t
  misc_feature (3997)..(3997): n is a, c, g, or t
  misc_feature (3999)..(3999): n is a, c, g, or t
tacgctgacttagtggcagaagcgtgagcttaaatccgcttagtcggtaatataaatcttcacggaacagcttttgtgccaccgcctgctttagattgacgttggttgccgttactattctgacgttcaggtcgataggcgtgcttccacctatacgtactattttcttttcttggagcacacgcaatagctttgcctgaagttctagcggcatttcccctacctcgtccagaaatagggttcctccctccgcctgctcaaaatagcctttgcttatcttatgggcgccggtaaatgcgcctttttcgtgcccgaacagcatgtcctctgccaaagaagcgggtatagctgcgcaatttaaggcaacgaagggctgagtctccctagatgacgattcatgtatcacctttgcgatgatctctttgccggcgcccgtagggccattaacgagcaccggcacatcggtcttacccactttgcaggcgagttcgaatagggcaatgctgctgtcatcgacgaagacaaacggctgttcgtcatcgtatcttttgtcgacagtagattcgttttcaagctgtatcatgtttcggctccgctatgttgcttagactaagcaattactgggccaaaaaattaaatcctaattaaaacagaattttaagtctaattacgatgcggcttctccttgatttacagaaaaatgtccgcttttttacagcaagcctgtcctaaaaatgacaaaaggtattgcgccgttagagtgcgccgttccgaagggggtactagagggttgtgaaagtaatgaggtgagcctaaagngcggtttctatctgatatttttcgagtttttggattaacgtagttcgccctatctggagtaatttggctgccttcgagacatttccctcgctctgggtaagcgcgacacggataaggttcgattcgatatcgccaaggaggttttttgtggcgatgccttcttttggcaggctatccatcgactgagacagcctgacgattcgctcgacctcgctcacgggttggcttagtttagacgttgtctcttgccctagctgggccataaatacagggggaagtcctggctcgctagtctcgtcctcttgctcttctgctcgcagcagctccgccaattgaggcggcagatacgccgcaggaatcgtagccagctcaatgtcgggttcaggagagagtaccgagagccgcttgaccaaatttgcgagctctcgcacattgcccggccaccggtatctagacagcacttcgatgctcttaggcgtgaagctcatcttgcggtcgtctgaataaagcgaaatataataatgacaaagctcagcgatatcggtttgtcgatcgcgtaagggcggaataacaatgggtaccacgttgaggcgatagtaaaggtcttcgcgaaactctttgcgggcaaccatgccctcgagatcttgatgggtggcggcaatgagacgcacgtcaaaggggacagcgcgggaggcccccaccggcatgacttctcgctcttccaacacccggagaagtttaacctgcaaatcaagaggcatgtcgcctatctcatcgagaaaaagcgtcccttgatcggctaattgaaatcgaccaactctgtctgctatggcgcccgaaaacgctccttttttatgcccaaagagctcgctctctagcagttgggcgggtattgctgcgcagtttatgcctacaaaattcttcgcgctgcgtgctgactgccgatgtagctcgcgactcacgacctctttaccggntcctgtttcaccttgtatcaaaattggagcatcggaattagcgcatagggcgattaacctgatcagtctaattgcttcgtcgctacttcctatgaatgtcttttgggcggtcaatcgatttactacatcnattagaattaaaaggcgcaagtattgacagcaacctgcagaatcagcaaatactgcctggccaacggagtctaaccaaagattttantgntgtatatcaatgtatataattagagaggtggtgctagaagtctgggaggagcgtcgatcaaggaacagaacccgaataattcacacagcgcccttgtcacgagacccactatgtganaaacgcactatccaggcactatccaggctctgtccagtgtcgacgtaatagaggcccgccagttattgcactggcgcagcacgatttagaggcatgatttcccaagcttcgcgaatttgtaccatcaatgctttcgcttctnnnacnttngcgacntcgttnnnnncatgggcnnnngtcagntgccnaatgcantagtcntacanngantctaggttncgngcaagntcnccnccttnnncntgntcnagcgttgancnnannccgaanagaatnttntgagncttnnnnatngcnnnnccncgntctncnatntnnccnnnnnnnaagtancgttcngcnnngcncatngnatcnacngcnccnganaanagcatctttacnaangcntgnttntcagcnaattcnanngctgcctcnttnccnacccnacnatacgnnttnagagctgcncgattaaangcnttcattnnnanntcctannggtnnanacnnatnntnaannnnnntnnnnntccnancnnannnnanncannnnnnnnanntntaanncnntnnntntatnagncntnncgtnntcnttnngnnnnanagnttctnncnnnnnnnnnntnangnnttncaattttcaattatgagccgcctaactccattagcctaaatcctcttcacgctcctcttattacggtccaccttagcgagttgatcattaatagaacgatctaattggcttatccctaaaaatgaccaaaccgcttccttgtagccactaatcgtaaatatctcaaaataaaattaaagtaaaaaaacctcgtgtcgaccggtctcttacgcaagaagcggtcagatacttcctgcttaaacttaaccaatatcggttttttaacaacataacatgaggtcagagtcatgagtgtaatcaacactaatacggcagcgaatattgctgcgcttgctataaatagaaacgatcgagatatggagaccgctatgacgcgcctctccactggattaagaataaattctgcgaaggacgacgccgcaggtctcgccatatcccagcgaatgacatcgcagatcggcgggctagagcagggcgcgcgaaacgccttggatgccattacgatgctccaagtagcggaaggtgcgacaaaggaaatttcgaacatgctttccagaatgcgagagctagcggtgcaagcgggaagcgggacctataccgataccgaccgcgatnnannnnncnnnnagntnnnggnnctngnntnnnnnntngntnncanngccnnnaanaccnnannnannnncnacnngatnnnnncngganannnnannatnaanancganancnaanncnntnnnactannnnnanccannnnggancnnnnacggncnnganaangnnncnnncannnaannngnnnngcantggnnntgcgnnnnatgnncnnannnnngctncnnnnggnangnnccgngncggcgncgacncnncgnnnnnnnntnntcnnancnnnntcgatnncgnnnttagttngnaancagncnnaactcncnnngncngnnccatnnnnnnagcgggctnaanntnngnnnnannngnngnnnatnnnnnnnncgncncnnnngnnnnngnnnnnnncatnancanccncnnnnnnnnccanncnnnnngcgnnnnnancgcngnnncaggannnactggcnntnnantnancnnnaannnaacngaaantnatnnnnangangctnncgcnggngangcnnacgcnnntnagannactnacnntgnnnnnngtnnnnnnnntnatncnnannnnannngnntngannncancnnnnannnnangncngnannnnntntng

SEQ ID NO: 766 - DNA, 4000 bp, Escherichia coli
  misc_feature (1)..(1): n is a, c, g, or t
  misc_feature (5)..(7): n is a, c, g, or t
  misc_feature (9)..(17): n is a, c, g, or t
  misc_feature (19)..(24): n is a, c, g, or t
  misc_feature (26)..(36): n is a, c, g, or t
  misc_feature (38)..(53): n is a, c, g, or t
  misc_feature (55)..(68): n is a, c, g, or t
  misc_feature (73)..(79): n is a, c, g, or t
  misc_feature (81)..(92): n is a, c, g, or t
  misc_feature (94)..(102): n is a, c, g, or t
  misc_feature (104)..(123): n is a, c, g, or t
  misc_feature (125)..(125): n is a, c, g, or t
  misc_feature (127)..(129): n is a, c, g, or t
  misc_feature (132)..(133): n is a, c, g, or t
  misc_feature (135)..(137): n is a, c, g, or t
  misc_feature (139)..(146): n is a, c, g, or t
  misc_feature (148)..(151): n is a, c, g, or t
  misc_feature (153)..(164): n is a, c, g, or t
  misc_feature (166)..(199): n is a, c, g, or t
  misc_feature (201)..(201): n is a, c, g, or t
  misc_feature (203)..(242): n is a, c, g, or t
  misc_feature (244)..(272): n is a, c, g, or t
  misc_feature (274)..(283): n is a, c, g, or t
  misc_feature (285)..(287): n is a, c, g, or t
  misc_feature (289)..(289): n is a, c, g, or t
  misc_feature (292)..(292): n is a, c, g, or t
  misc_feature (294)..(294): n is a, c, g, or t
  misc_feature (296)..(296): n is a, c, g, or t
  misc_feature (301)..(301): n is a, c, g, or t
  misc_feature (304)..(304): n is a, c, g, or t
  misc_feature (306)..(309): n is a, c, g, or t
  misc_feature (314)..(320): n is a, c, g, or t
  misc_feature (322)..(322): n is a, c, g, or t
  misc_feature (324)..(325): n is a, c, g, or t
  misc_feature (327)..(330): n is a, c, g, or t
  misc_feature (334)..(335): n is a, c, g, or t
  misc_feature (337)..(337): n is a, c, g, or t
  misc_feature (339)..(339): n is a, c, g, or t
  misc_feature (341)..(342): n is a, c, g, or t
  misc_feature (344)..(344): n is a, c, g, or t
  misc_feature (346)..(350): n is a, c, g, or t
  misc_feature (352)..(354): n is a, c, g, or t
  misc_feature (357)..(357): n is a, c, g, or t
  misc_feature (361)..(361): n is a, c, g, or t
  misc_feature (364)..(364): n is a, c, g, or t
  misc_feature (366)..(366): n is a, c, g, or t
  misc_feature (378)..(378): n is a, c, g, or t
  misc_feature (421)..(421): n is a, c, g, or t
  misc_feature (454)..(454): n is a, c, g, or t
  misc_feature (456)..(456): n is a, c, g, or t
  misc_feature (484)..(484): n is a, c, g, or t
  misc_feature (763)..(763): n is a, c, g, or t
  misc_feature (1135)..(1135): n is a, c, g, or t
  misc_feature (1216)..(1216): n is a, c, g, or t
  misc_feature (1969)..(1969): n is a, c, g, or t
  misc_feature (2173)..(2173): n is a, c, g, or t
  misc_feature (2248)..(2248): n is a, c, g, or t
  misc_feature (2353)..(2353): n is a, c, g, or t
  misc_feature (2737)..(2737): n is a, c, g, or t
  misc_feature (2836)..(2837): n is a, c, g, or t
  misc_feature (2971)..(2971): n is a, c, g, or t
  misc_feature (2974)..(2974): n is a, c, g, or t
  misc_feature (3181)..(3181): n is a, c, g, or t
  misc_feature (3191)..(3192): n is a, c, g, or t
  misc_feature (3307)..(3307): n is a, c, g, or t
  misc_feature (3316)..(3316): n is a, c, g, or t
  misc_feature (3319)..(3319): n is a, c, g, or t
  misc_feature (3338)..(3339): n is a, c, g, or t
  misc_feature (3349)..(3349): n is a, c, g, or t
  misc_feature (3352)..(3352): n is a, c, g, or t
  misc_feature (3375)..(3375): n is a, c, g, or t
  misc_feature (3382)..(3382): n is a, c, g, or t
  misc_feature (3414)..(3414): n is a, c, g, or t
  misc_feature (3544)..(3544): n is a, c, g, or t
  misc_feature (3546)..(3546): n is a, c, g, or t
  misc_feature (3550)..(3550): n is a, c, g, or t
  misc_feature (3588)..(3588): n is a, c, g, or t
  misc_feature (3597)..(3597): n is a, c, g, or t
  misc_feature (3682)..(3682): n is a, c, g, or t
  misc_feature (3718)..(3718): n is a, c, g, or t
  misc_feature (3742)..(3742): n is a, c, g, or t
  misc_feature (3748)..(3748): n is a, c, g, or t
  misc_feature (3766)..(3766): n is a, c, g, or t
  misc_feature (3841)..(3841): n is a, c, g, or t
  misc_feature (3916)..(3916): n is a, c, g, or t
nccgnnnannnnnnnnncnnnnnngnnnnnnnnnnngnnnnnnnnnnnnnnnncnnnnnnnnnnnnnnggaannnnnnnannnnnnnnnnnntnnnnnnnnngnnnnnnnnnnnnnnnnnnnntngnnnccnncnnngnnnnnnnncnnnncnnnnnnnnnnnntnnnnnnnnnnnnnnnnnnnnnnnnnnnnnnnnnntncnnnnnnnnnnnnnnnnnnnnnnnnnnnnnnnnnnnnnnnncnnnnnnnnnnnnnnnnnnnnnnnnnnnnngnnnnnnnnnngnnncntgngncnccacnaancnnnnggctnnnnnnncnannannnngggnncntngnnangnnnnntnnnttntccnggngnattgcggccatngaggaaggtccccagcttatcgacgttgctaccgctggggtgngcgtcgtaaagcagaaaaaatccggcccccagnangggaaccggattcttatctataacctanaccagcaattacttgatgatcttggtgacgcggccagcgccgacggtgcgggagccttcgcggatagcgaagcgcagaccctcgtccatggcgaccggctggatcagggtgacggacatgtcaacgttgtcgccaggcatgaccatctcggtgccctcagggagcttcacaacaccggtaacgtcggtggtgcggaagtagaactgcggacggtagttatcgaagaacggggtgtggcggccaccttcgtccttggacagaacgtagacggaagcctcnaactcggtgtgaggggtgtaagcgccgggcttagccacaacctggccacgctcaacttcttcacgcttaacgccacggagcaacagaccgcagttgtcgccagcttcggtgtagtccagcagcttgcggaacatttcgatgccggtaacggtggtggacagagccttgtccttgatgccgatgatttcgacttcttcgttcaccttcagggaaccgcgctcaacacgaccggtcaccacggtgccacggccggtgatggtgaagatgtcctcgataggcatgaggaagggcttgtcggtctcacgaaccggatccgggatgaagtcatcgcaggcctgcatgaggtccaggatggactgggtccacttgggntcgccttccagggccttcagggcagagatctggatgatcggggcatcctcgtcgtattcctgatcggcgaggagctcacgnagctccatttccacgagctcgatgatttcatcatcaacgtcgggggagtcacacttgttcagtgccacgaggatgtaaggaacgcccacctggcgagccagaagcacgtgctccttggtctgcggcatcgggccgtcggtagcggccacgaccaggatagcgccgtccatctgagcggcaccggtgatcatgttcttgatgtagtcagcgtggccaggggcgtccacgtgtgcgtagtggcgcttttcggtctggtactccacgtgagcgatgttaatggtgataccacgctctttttcttcaggagccttgtcgatggagtcgaaggcgaaagcctggttcaagtcggggtatgcgtcagccaaaaccttggtgatagctgcggtcgtggtggtcttaccgtggtcaacgtgaccgatggtgccaatgtttacgtgaggcttagtacgctcaaacttagcctttgccactgtatgtcctcctggacttcatggtggctacgaacctcgcagccacgggttgatatgctgaaccttctgattcaccgtttgaattattcattcggcaactcatcagaacagcgattacaaatgtgccaattacacgatcttatgcgttatccgcgagtttttcaaactaactcgaaccaactcgcatcaagttcttaagaatcattcatttggtaatggccgtggcggccgtcacaatccttgcggagttccggtggggcgccggtggggctccagcgggaancctgatcggaacccgcggggcacttccctcaggcacccgcaccggataatgcgtgacggtcaacaaggccattaccgaaaatcattcggcttatcccgcccaccatcttgcttggcacgacaagacagtgggcggcgcaggcttatggaaaagccttaggagccgttgcgctcggcgatgatctcggctgccacgttggtcggnacctcggcgtaggagtcgaagatcatggtgtagttagcgcgaccctgggtccgggaccgcaggtcacccacatanccgaacatttcggacagcggcacccgggcccgcacgacctttgcaccagcccgatcatccatggcgctaacctggccacggcgagagttaatgtcgccgatcacntcacccatgtactcttccggcgtgatgacctcaaccgccatgagcggttccagcagcaccggctttgccttggcaacgccttccttcagggcctgggagccggccagcttgaaggccatttccgaggagtccacttcgtggtacgcaccgtcaagcagggtggccttgatgttcaccagcgggaagccggcgaggtaaccgtactgcatggcgtcctgaataccggcatccaccgaggggatgtattccttcggcacgcggccaccggtaacagcgttttcgaacttgtagatggcggactcgccttcttccagctcggatgcatcgggggcgtacggctccagggcaataatgaccttggcgaactggccggaaccaccggtntgcttcttgtgcgtgtactcgatcttctccaccggcttgcggatggtttcgcggtaggccacctggggagcacccacgttggcttccaccttgaattcnngccgcatgcggtcaaccagcacgtcgaggtgcagctcgcccatgccgccgatcacggtctggccggactcggagtccagttcgacggtgaaggtcgggtcctcttcggccagcttctgaatagcgatactcagnttntcctggtcggccttggtcttcggctcgatggacaccttaataaccgggtccgggaagtccatggactccaggatgatctggttgttggtgtcacacagggtgtcaccggtggtggtgtccttcaaaccgatgaaggcgtagatgttgccagcgcgggcctcggtcaccgggttttccttgttggcgtgcatctggaacatcttgccnatgcgttccnncttggccttggtggagttggtgacctgagcaccgggctcaaccagaccggagtagacgcgcacgaaggtgagcttaccgaagaacgggtgcacggcaatcttgaaggcgagtgcngcgaacggntcntccacggagggcttccgcnncacaacctgngantcgtcgttcacggcatggccggnaacctcnccgatgtccaacgggttgggcaggtagtcgancacggcgtcgagcagcggctgcacacccttgttgtggtatgcggtaccgcacagcacggggtagatttcggagttgatggtcatcttccgaatggcgcccttgatttcgtcgatggtgagttcctcgccncngaantacttttccatgagctcttcatcggattctgccactgnctccagcancttctcccggtactcctcggcacgctccaccaggtcagcggggatttcctcgatgaccggttcggcgccaacgtcaactttgccncgccaggtgatggcgttcatgttgataaggtccacnacgccgtcgaaggtgtcttcggcnccgatnggcagctgcaacacgagnggcttagcacccaggcggtcaatgatggtttgcacggtgaagtagaagtctgcacccagcttgtccatcttattnacaaagcagatgcgcggcacatcgtatttggcggcctgacgccacacctgctccgactgcggttccacgccttcnttaccgtcgaacacggcaacagcaccgtcgagcacccgcagcgaccgctccacctcaacggtgaagtccacgtgaccaggggtg

SEQ ID NO: 767 - DNA, 4000 bp, Escherichia coli
  misc_feature (705)..(705): n is a, c, g, or t
  misc_feature (765)..(765): n is a, c, g, or t
  misc_feature (1300)..(1300): n is a, c, g, or t
  misc_feature (2008)..(2008): n is a, c, g, or t
  misc_feature (2550)..(2550): n is a, c, g, or t
  misc_feature (3775)..(3775): n is a, c, g, or t
gccagttccattgaacggctactctgttcttcgtctaaaccacttttacctaagcgtgctaaataaagtttaacatctaaatgcataagtttaatggctttttcttgagcttttattgttttggcaatttctgtgtcccagttatcgtataatggctttacgtttgtgagcatttgttcaattttttgaccaatacctaataattcacgtgatgcacaatccaggcctctttgtggtcgttcaagtgcggatggatctagtgtggtaatattattcaaattatcagctgggtttattttttgaagcataaatttggacaatactttatctgccaggccagcaagaggtaatgtcaaaataagaagcaataagttaaatattaaatgaatatttaaagtttgttgggcagggtttgctccaagactcccgattaagaaagaagcatttataagtataattgatgcaatcattgcaccaccacctctaagaatgaggtttgcaaaaataattctacgagaatttataggtgcctctagtgtaagcacataagcaattaaagcccctccaaagtttgctcccaaaatcatgattgatgctgcaagaacgggaagtattgattgtgcggttaaggtaacaaataataatacagcagcaacgcttgaatgaatgatccaagcaaagccagcgcctataatgaacgctacnagtaaatcccgacttaagtactctattactaattgtgtgcctggatttgccaccactggnccagtcgccattcttaacatatctaaagagacaaaaattaatgatataccaattattattctaccaatttgtttataggtagtttgttttgatctcaaaaacattgatacgcctacaagaagcaagaaaggtgtcagaaatgacatctttatcattaagatttgagtaactattgctgaacctaaatcagcacctagtagcatggcaatgccgcttgctgttgctaatttattttttgagaaaaagtttgatattaaaactgcaactgcagtagagctttgtaaaaatatggctgcgctcattccagagaatgcagataatattctattgtcagttgattgtttcaaccaattgcgtaactggttagagaaaccgcgttctacacctgtacggactaatcttactgcccagattaatagtgctgctgctcctgcaatattcagtaaaaattgtattaaatttggttcattcatttttttctcaaataagatattagaatggaaacgggccagagccaactagtggcccaatacgnactgatttaaagccgttattccatctatgtagtaaacaaccatcaacctcatttataaaccctacaggcgctgatgaacgagtatcatattcaaaactgctacaaggcgagggcgaagaaattgctatatggttattcaaattagcaaccatcatacaatggatatgaccacatacaactcttaattctccagtaaaatttgaaataatatttttaaactcatttgtattttccaaccctatactatccataaattggatgcctgtctcaaatggtgggtgatgaagcgccaacattgtgggttctgatttaatattatttaaagtcttttctagatattccaagctttcgggcattaaataacctccaccttgaccctctactaatgtatcaagacctataagattaatatgtccaatttttttatgccaattcaaagggccagtttttgtaaatatattttcagccatgaatgcttctctcatattttcacgtgcatcatggttgccaggaattacataaacgggtagttctagcaaagacattattgatttaaacctctgatagctgtctgaactgccatcctcacttatatccccagatactaatatgcattcaatatcattatgcttaactcgcaattggtttatacgaatgattaacttctcaagtgaagaagccgtatccaacacattcgatacaagtggnccttctggtaaaatatgcgtatcagaaatctgaagtatagttgtcattttataccggctctcaaaaaagcttgaacaaattggcgttgaaatactaagaatgctattaataacggcgctactgacatcatagttgctgctgatattatgctaatatctacaccattttctggggccccaaatattgataggccaacagttaaagggcgagtgtcaggcgaatttgtaacaataagtggccataaaaaattattccaatgtgttgatacagaaactaatgcataagctagataagtaggttttgccaatggaacatatacgcgccataaaatacctaatagcccacaaccttcaattcgagctgcttcatgtagctcaataggtacagatttaaatgactgtcgcataagaaaaattccgaatgcactcgccatataaggcatgccaactccaaataatgagtcaaataatcctaagcgagaaaccattgcatagttttcaacgatgagcacttctggtaagataaatagttgcatcaaaacnaggataaatacaaagttttttcctggaaattcaagtttggcaaatgcaaagcccgctagagtggtaaagaagaactgacctattaaaactatagttaccaataaaaaagtatttaaaaaatactttaaccatggagcaccttcccaggctgttcgaaagttgtctagtgtccaagcagaagtgatattaaagtttacagcatctgaagtggaatgaaatgcagcccaaaaagcaaataataatggagaaatccatataatagccaggagaattgcacctgcactctcaacatagtgagataacttactcattggtaatgtgtccttcgatcaaggtaaatgaattggattgcagctactatgcaaaggaccagtaatattaatattgtcattgctgctgcatgaggtgcatcaaagaacgcaaaagccatttcccatatataatataaaataagttttgaagcatctgatgggccaccttttgttaaaatgaataagtggtcaattaattttacagaatttatcatagcatttactaaaataaataacgttgtaggcatgagtaatggcaagactatgcgtcgcgtatatgtccaacgacttgttccttcgatatcggctgcttctttataatcttcgggaatagtttgtagagcggcaaggtagaatatcataaagaatccagcttctttccatattgttacaaatattattgcccataatgcagtttcaggttgccctaaccaatttacagactgtaagccaaataatgatccaatttggtcaaggacgccaagccccggcgtgtaaaagaataaccacaaattggccgcagcaatcatgggtaatacagttggagtaaagtaagccgttctcacaaagccacgcgcaggtattttagaatttgcccaaagtgccatcgaaagggcgatcacaattgagactggaattgttattgctgcataaaagaggttgtttttcacaaccaaccaaaatgttggatcagcgaataagtcattatagttttcaatcccaataaattcagatggcctacgtcgtgtatgttttgaaaataaactagaaaagaaagtcgcgcctgatgggtaaaaggcaaatattgagagcatgagagcggctggtgaaagcataagccatccataaatagcttgcctacgccgttccaaatttatgtgattactcatatttataaccttttgtaattagtnccggccccgtttaggggccggaattttaatttatttaacgatatgctttaagtaatctttctgctgcactttgagcttcacctaatgcgtctgcagatgatttagcacctgtcagagcagattggatggcattatttaatccatctcgaacacgagctgtttcaaaagttgaaaattcagctactgcgttttccaactggttgcgtgcaactagtgctggtggaa

SEQ ID NO: 768 - DNA, 4000 bp, Escherichia coli
  misc_feature (1)..(1234): n is a, c, g, or t
  misc_feature (1306)..(1313): n is a, c, g, or t
  misc_feature (1315)..(1324): n is a, c, g, or t
  misc_feature (1326)..(1328): n is a, c, g, or t
  misc_feature (1330)..(1333): n is a, c, g, or t
  misc_feature (1335)..(1336): n is a, c, g, or t
  misc_feature (1341)..(1342): n is a, c, g, or t
  misc_feature (1344)..(1346): n is a, c, g, or t
  misc_feature (1349)..(1350): n is a, c, g, or t
  misc_feature (1355)..(1355): n is a, c, g, or t
  misc_feature (1362)..(1362): n is a, c, g, or t
  misc_feature (1365)..(1365): n is a, c, g, or t
  misc_feature (1370)..(1370): n is a, c, g, or t
  misc_feature (1374)..(1374): n is a, c, g, or t
  misc_feature (1378)..(1378): n is a, c, g, or t
  misc_feature (1987)..(1987): n is a, c, g, or t
  misc_feature (2002)..(2002): n is a, c, g, or t
  misc_feature (3320)..(3321): n is a, c, g, or t
  misc_feature (3323)..(3323): n is a, c, g, or t
  misc_feature (3325)..(3325): n is a, c, g, or t
  misc_feature (3334)..(3334): n is a, c, g, or t
  misc_feature (3336)..(3338): n is a, c, g, or t
  misc_feature (3340)..(3342): n is a, c, g, or t
  misc_feature (3345)..(3346): n is a, c, g, or t
  misc_feature (3348)..(3348): n is a, c, g, or t
  misc_feature (3357)..(3357): n is a, c, g, or t
  misc_feature (3362)..(3362): n is a, c, g, or t
  misc_feature (3365)..(3365): n is a, c, g, or t
  misc_feature (3368)..(3369): n is a, c, g, or t
  misc_feature (3373)..(3373): n is a, c, g, or t
  misc_feature (3375)..(3375): n is a, c, g, or t
  misc_feature (3377)..(3377): n is a, c, g, or t
  misc_feature (3381)..(3381): n is a, c, g, or t
  misc_feature (3384)..(3385): n is a, c, g, or t
  misc_feature (3388)..(3389): n is a, c, g, or t
  misc_feature (3391)..(3394): n is a, c, g, or t
  misc_feature (3396)..(3397): n is a, c, g, or t
  misc_feature (3402)..(3402): n is a, c, g, or t
  misc_feature (3405)..(3405): n is a, c, g, or t
  misc_feature (3407)..(3408): n is a, c, g, or t
  misc_feature (3411)..(3411): n is a, c, g, or t
  misc_feature (3416)..(3418): n is a, c, g, or t
  misc_feature (3420)..(3420): n is a, c, g, or t
  misc_feature (3423)..(3424): n is a, c, g, or t
  misc_feature (3426)..(3427): n is a, c, g, or t
  misc_feature (3431)..(3433): n is a, c, g, or t
  misc_feature (3437)..(3437): n is a, c, g, or t
  misc_feature (3440)..(3441): n is a, c, g, or t
  misc_feature (3443)..(3444): n is a, c, g, or t
  misc_feature (3447)..(3447): n is a, c, g, or t
  misc_feature (3450)..(3451): n is a, c, g, or t
  misc_feature (3454)..(3456): n is a, c, g, or t
  misc_feature (3459)..(3459): n is a, c, g, or t
  misc_feature (3465)..(3465): n is a, c, g, or t
  misc_feature (3467)..(3468): n is a, c, g, or t
  misc_feature (3470)..(3473): n is a, c, g, or t
  misc_feature (3475)..(3476): n is a, c, g, or t
  misc_feature (3478)..(3479): n is a, c, g, or t
  misc_feature (3481)..(3481): n is a, c, g, or t
  misc_feature (3484)..(3484): n is a, c, g, or t
  misc_feature (3487)..(3487): n is a, c, g, or t
  misc_feature (3491)..(3492): n is a, c, g, or t
  misc_feature (3496)..(3497): n is a, c, g, or t
  misc_feature (3500)..(3500): n is a, c, g, or t
  misc_feature (3504)..(3505): n is a, c, g, or t
  misc_feature (3508)..(3509): n is a, c, g, or t
  misc_feature (3511)..(3511): n is a, c, g, or t
  misc_feature (3515)..(3518): n is a, c, g, or t
  misc_feature (3525)..(3526): n is a, c, g, or t
  misc_feature (3529)..(3529): n is a, c, g, or t
  misc_feature (3532)..(3532): n is a, c, g, or t
  misc_feature (3535)..(3536): n is a, c, g, or t
  misc_feature (3538)..(3538): n is a, c, g, or t
  misc_feature (3541)..(3541): n is a, c, g, or t
  misc_feature (3545)..(3546): n is a, c, g, or t
  misc_feature (3549)..(3553): n is a, c, g, or t
  misc_feature (3555)..(3555): n is a, c, g, or t
  misc_feature (3557)..(3558): n is a, c, g, or t
  misc_feature (3563)..(3564): n is a, c, g, or t
  misc_feature (3567)..(3567): n is a, c, g, or t
  misc_feature (3569)..(3569): n is a, c, g, or t
  misc_feature (3572)..(3572): n is a, c, g, or t
  misc_feature (3574)..(3574): n is a, c, g, or t
  misc_feature (3576)..(3577): n is a, c, g, or t
  misc_feature (3579)..(3580): n is a, c, g, or t
  misc_feature (3582)..(3582): n is a, c, g, or t
  misc_feature (3584)..(3584): n is a, c, g, or t
  misc_feature (3587)..(3588): n is a, c, g, or t
  misc_feature (3591)..(3591): n is a, c, g, or t
  misc_feature (3597)..(3597): n is a, c, g, or t
  misc_feature (3606)..(3606): n is a, c, g, or t
  misc_feature (3609)..(3609): n is a, c, g, or t
  misc_feature (3613)..(3614): n is a, c, g, or t
  misc_feature (3616)..(3617): n is a, c, g, or t
  misc_feature (3619)..(3620): n is a, c, g, or t
  misc_feature (3622)..(3623): n is a, c, g, or t
  misc_feature (3625)..(3628): n is a, c, g, or t
  misc_feature (3633)..(3634): n is a, c, g, or t
  misc_feature (3639)..(3639): n is a, c, g, or t
  misc_feature (3647)..(3647): n is a, c, g, or t
  misc_feature (3651)..(3651): n is a, c, g, or t
  misc_feature (3655)..(3656): n is a, c, g, or t
  misc_feature (3658)..(3659): n is a, c, g, or t
  misc_feature (3663)..(3665): n is a, c, g, or t
  misc_feature (3667)..(3667): n is a, c, g, or t
  misc_feature (3674)..(3675): n is a, c, g, or t
  misc_feature (3677)..(3677): n is a, c, g, or t
  misc_feature (3680)..(3680): n is a, c, g, or t
  misc_feature (3682)..(3684): n is a, c, g, or t
  misc_feature (3686)..(3686): n is a, c, g, or t
  misc_feature (3690)..(3690): n is a, c, g, or t
  misc_feature (3700)..(3700): n is a, c, g, or t
  misc_feature (3703)..(3703): n is a, c, g, or t
  misc_feature (3705)..(3705): n is a, c, g, or t
  misc_feature (3708)..(3708): n is a, c, g, or t
  misc_feature (3710)..(3710): n is a, c, g, or t
  misc_feature (3712)..(3712): n is a, c, g, or t
  misc_feature (3715)..(3716): n is a, c, g, or t
  misc_feature (3720)..(3720): n is a, c, g, or t
  misc_feature (3723)..(3723): n is a, c, g, or t
  misc_feature (3726)..(3726): n is a, c, g, or t
  misc_feature (3731)..(3731): n is a, c, g, or t
  misc_feature (3733)..(3733): n is a, c, g, or t
  misc_feature (3735)..(3735): n is a, c, g, or t
  misc_feature (3738)..(3738): n is a, c, g, or t
  misc_feature (3742)..(3742): n is a, c, g, or t
  misc_feature (3745)..(3749): n is a, c, g, or t
  misc_feature (3753)..(3753): n is a, c, g, or t
  misc_feature (3761)..(3761): n is a, c, g, or t
  misc_feature (3764)..(3765): n is a, c, g, or t
  misc_feature (3767)..(3767): n is a, c, g, or t
  misc_feature (3769)..(3770): n is a, c, g, or t
  misc_feature (3772)..(3772): n is a, c, g, or t
  misc_feature (3774)..(3774): n is a, c, g, or t
  misc_feature (3776)..(3779): n is a, c, g, or t
  misc_feature (3781)..(3782): n is a, c, g, or t
  misc_feature (3792)..(3795): n is a, c, g, or t
  misc_feature (3799)..(3799): n is a, c, g, or t
  misc_feature (3801)..(3802): n is a, c, g, or t
  misc_feature (3810)..(3810): n is a, c, g, or t
  misc_feature (3812)..(3812): n is a, c, g, or t
  misc_feature (3814)..(3815): n is a, c, g, or t
  misc_feature (3818)..(3818): n is a, c, g, or t
  misc_feature (3820)..(3820): n is a, c, g, or t
  misc_feature (3822)..(3823): n is a, c, g, or t
  misc_feature (3829)..(3829): n is a, c, g, or t
  misc_feature (3832)..(3832): n is a, c, g, or t
  misc_feature (3836)..(3839): n is a, c, g, or t
  misc_feature (3844)..(3844): n is a, c, g, or t
  misc_feature (3847)..(3848): n is a, c, g, or t
  misc_feature (3851)..(3851): n is a, c, g, or t
  misc_feature (3856)..(3856): n is a, c, g, or t
  misc_feature (3859)..(3859): n is a, c, g, or t
  misc_feature (3861)..(3861): n is a, c, g, or t
  misc_feature (3867)..(3867): n is a, c, g, or t
  misc_feature (3873)..(3873): n is a, c, g, or t
  misc_feature (3877)..(3877): n is a, c, g, or t
  misc_feature (3882)..(3883): n is a, c, g, or t
  misc_feature (3885)..(3886): n is a, c, g, or t
  misc_feature (3892)..(3892): n is a, c, g, or t
  misc_feature (3895)..(3895): n is a, c, g, or t
  misc_feature (3898)..(3898): n is a, c, g, or t
  misc_feature (3900)..(3900): n is a, c, g, or t
  misc_feature (3902)..(3902): n is a, c, g, or t
  misc_feature (3907)..(3908): n is a, c, g, or t
  misc_feature (3910)..(3911): n is a, c, g, or t
  misc_feature (3914)..(3916): n is a, c, g, or t
  misc_feature (3919)..(3919): n is a, c, g, or t
  misc_feature (3921)..(3921): n is a, c, g, or t
  misc_feature (3925)..(3925): n is a, c, g, or t
  misc_feature (3928)..(3928): n is a, c, g, or t
  misc_feature (3930)..(3930): n is a, c, g, or t
  misc_feature (3937)..(3937): n is a, c, g, or t
  misc_feature (3940)..(3941): n is a, c, g, or t
  misc_feature (3943)..(3943): n is a, c, g, or t
  misc_feature (3945)..(3947): n is a, c, g, or t
  misc_feature (3951)..(3951): n is a, c, g, or t
  misc_feature (3958)..(3958): n is a, c, g, or t
  misc_feature (3961)..(3962): n is a, c, g, or t
  misc_feature (3968)..(3969): n is a, c, g, or t
  misc_feature (3972)..(3972): n is a, c, g, or t
  misc_feature (3976)..(3976): n is a, c, g, or t
  misc_feature (3978)..(3978): n is a, c, g, or t
  misc_feature (3980)..(3981): n is a, c, g, or t
  misc_feature (3983)..(3984): n is a, c, g, or t
  misc_feature (3986)..(3988): n is a, c, g, or t
  misc_feature (3991)..(3992): n is a, c, g, or t
  misc_feature (3995)..(3995): n is a, c, g, or t
  misc_feature (3997)..(3999): n is a, c, g, or t
nnnnnnnnnnnnnnnnnnnnnnnnnnnnnnnnnnnnnnnnnnnnnnnnnnnnnnnnnnnnnnnnnnnnnnnnnnnnnnnnnnnnnnnnnnnnnnnnnnnnnnnnnnnnnnnnnnnnnnnnnnnnnnnnnnnnnnnnnnnnnnnnnnnnnnnnnnnnnnnnnnnnnnnnnnnnnnnnnnnnnnnnnnnnnnnnnnnnnnnnnnnnnnnnnnnnnnnnnnnnnnnnnnnnnnnnnnnnnnnnnnnnnnnnnnnnnnnnnnnnnnnnnnnnnnnnnnnnnnnnnnnnnnnnnnnnnnnnnnnnnnnnnnnnnnnnnnnnnnnnnnnnnnnnnnnnnnnnnnnnnnnnnnnnnnnnnnnnnnnnnnnnnnnnnnnnnnnnnnnnnnnnnnnnnnnnnnnnnnnnnnnnnnnnnnnnnnnnnnnnnnnnnnnnnnnnnnnnnnnnnnnnnnnnnnnnnnnnnnnnnnnnnnnnnnnnnnnnnnnnnnnnnnnnnnnnnnnnnnnnnnnnnnnnnnnnnnnnnnnnnnnnnnnnnnnnnnnnnnnnnnnnnnnnnnnnnnnnnnnnnnnnnnnnnnnnnnnnnnnnnnnnnnnnnnnnnnnnnnnnnnnnnnnnnnnnnnnnnnnnnnnnnnnnnnnnnnnnnnnnnnnnnnnnnnnnnnnnnnnnnnnnnnnnnnnnnnnnnnnnnnnnnnnnnnnnnnnnnnnnnnnnnnnnnnnnnnnnnnnnnnnnnnnnnnnnnnnnnnnnnnnnnnnnnnnnnnnnnnnnnnnnnnnnnnnnnnnnnnnnnnnnnnnnnnnnnnnnnnnnnnnnnnnnnnnnnnnnnnnnnnnnnnnnnnnnnnnnnnnnnnnnnnnnnnnnnnnnnnnnnnnnnnnnnnnnnnnnnnnnnnnnnnnnnnnnnnnnnnnnnnnnnnnnnnnnnnnnnnnnnnnnnnnnnnnnnnnnnnnnnnnnnnnnnnnnnnnnnnnnnnnnnnnnnnnnnnnnnnnnnnnnnnnnnnnnnnnnnnnnnnnnnnnnnnnnnnnnnnnnnnnnnnnnnnnnnnnnnnnnnnnnnnnnnnnnnnnnnnnnnnnnnnnnnnnnnnnnnnnnnnnnnnnnnnnnnnnnnnnnnnnnnnnnnnnnnnnnnnnnnnnnnnnnnnnnnnnnnnnnnnnnnnnnnnnnnnnnnnnnnnnnnnnnnnnnnnnnnnnnnnnnnnnnnnnnnnnnnnnnnnnnnnnnnnnnnnnnnnnnnnnnnnnnnnnnnnacagttatgttttatataaaaagattgaaattgcatataagattgaaaaataattaagattttattattatnnnnnnnncnnnnnnnnnncnnnannnntnnagctnnannnctnngattngaacatnaanatttntatntttntatttttttttttttttttttttttttttttttttagaaaaaagaaaagaacttccttaaaaaatataaatattcatatataaacatccattctttctcatttaaaagaactttattcaattttttaagacacacaaaataatttatatatatatatatttttttatacatatttttatattttatttattttatttaaaaaaaaaaaattatatatttttaaattagtccctcttacaaaatctaattaaaaaattataattttttttatatttatatttaataagttcctatatttttatataaatatctattattttttctttttttttaaaaaaaaaaaaatcaaaataatatataaaaaaaataagaagctatatatattattgagttagggtggaaaaagattcgatcatcaccatgctgattcttgattatcatcagtttcaccccaattggcagggttgccttcagtccaattaattggaacagatccattttcaaaaccttcttcaacttcaacttcattggtttcctatttatttaaaataaaaaaaaggaaaaaatattgttactttcatttaactatatatatatttcttatttttntttaatttttttttntttttttttttttttataaaattaatttttttttttttacttctacttcttcatcagcactggcatcagcattttctttttcaatttcttcgggatcacggtagaagaacatatctggcataacatcccattcttcttgacgtgatatagtacctttaagtcttaaaacttctctggcaagtaaccagaaaattaaaccaatggcatgcttacctttgttgttagttggtatagcacagtcaatataacgaagtggagaatcagcatcacaaagagcaatgactggaatattaacataagaggcttcgtaaatggcttggtgatcagctattggatcagtaacaataataatacgtggttccttgaaagcacgagtaatgtagttcgtaaatgtacctggggtaaatctacctgcaactgcttgtgaaccagtatattttgcaaactttaaagcagcacgttgaccatattgacgagatgaaacaataacaacatcagaaggattttcaatagtggcaatgattcttgcagctaatacaagcttttcataagttttttgtatgttgatgatatgaacacctttttttttttttttgtattaagaatattttattaaatctttctaattttaaatataaatttaatatttcaattattgtaaaaaaattcaataaataccatcatttcttctcttccaaatgtatggtttcatttgaaagtttaaatttttggaacccaagtgaacttgggcagctaaaagatcctatattacaattttattaaattatttatatcaattaatatattataataattaaattataataattaaattattatatttaattaaattttatttttttttaattttaatttaaaattacatgaatatctttttggcttggttctaaaatttttggtaaccgagacataatggcctgtcgagagagttacgggtgacagagaacgttttatatgttctatgaatttatatcaataaaaaacattattaatatttcttctgatttattagaattacactttatatttttaaatttttttaattattattcaatattattaatcatcttttttttttttcaattatttctacaatttaaatataaatatatttttaatatttaatttaattgtaaattttaaatctagaattatataatttaatatcattaattttatattttaaatctagattcatctaatttaaataccataaactatattttaaattattttttactaaataaataaataaataagaaaaaaaaaaaaaaaaaaaaaaaaaaaaaaaaaaaannantnatttaaatntnnnannntannanaaattaatnaatanttntanntttntntntttnttnncannannnnannaaaanaananntcntcatnnnanaannanntaannntttngtnnannggnaannggnnnatntaaaantnngnnnntnntnntnttntantatnntatnnaanaatnnatnnanttannnnaataatnnatntanttnntnagnagannaannnnntnanntaatnnatnantantnanntnnananttnnttntttaantttttaatnttnttannannannanntnnnnaattnnttatnatataatnatanaatnntnntatnnnanataatannantangnnnanaaanaataattaanaantntanantnttnnatanatnatnataananantantatnatnnnnnaatnataaaaangtnngnanntnantnnnntnnttttttttannnntttntnnattttttnantnnttnantnntataanatnatcnnnnattancannatnataanaanantaatanaaaaangaanaatannanntatcanatnttnananataannannttnnnatntnttanttnanaacttancanntnannntttntctttanttnntaaatnnatnaatncntnnannannntannatnannnc

SEQ ID NO: 769 - DNA, 4000 bp, Escherichia coli
  misc_feature (1992)..(1992): n is a, c, g, or t
  misc_feature (3443)..(3443): n is a, c, g, or t
  misc_feature (3766)..(3766): n is a, c, g, or t
atttaagacatatgtttctgagaacattgttctccctatgcaagcaaactttgaagtttttaattctttttctatgagccttcagggtttggattcctctgcacctcctcctatatttgatttaacttatggaccacctatttcagttaaagggcagtttgtattgtcccaggatggattatactatgattccagaggaggtggactacctgtggtttctggagatattttggatgcatcctcgtgggaattggaatatgcgcccaacctagggggtaaagggatattctatggggatcagagattagaagaactaaaaaacactgtctttagtaaggactttatctctgattccaaacttgtggctaagtattatgctgcagatgacatcttacagaatctagagcgcaataaatctagacagatttctatcgtgtctgggcaaattaatgatctcattgtttctgggtatggcacgaactcggcaatggttatcaattactatagtaacatagctgctgtagcatcttcctatgactccaaaataaagaagaggagaaagcaggttcaattagttgctttgtttgcttctgggacttacagttttactgaagatgatattgaggagcgacccaaaaatttaggtctgggtcccggggttcttatcggattaaatggcgtcactatggattcctccggatattgggttccaatagagagagtcccagtcaatgattttacttttctaaaaggtaaacccattactttaactttagaggaccagagggatatcttgctcttctccgaagatttggacgctactattttacccatagttccaaagttccttgtatcagcaccacaaccgttttctgttctggacaaattctctatatctcctacacctatgggagagtatccatatatcgatggagataaacatgtaagtagtacaggagctttcgttctctccttacaagacaggattgttacggacagtctgatatgtgcttataatttcttgaagcctgacgttgtagatgcctcttcaaacgttttcaatttagataattttaaatctgattctgctggacttttaaatgcacaattggttggttctagtgttaatcatgtatttccgtctggactttcaattccattccttcgcggtactttttataatgaaggtcccgttggggaaaccggaaagaaaaatattctagatgctacaggacaagggggttcttatataatgcttcctactaataaaaatcctgatggtactgtgaatacatatgctgcaagtactttgagtgatttgacgtatggtatagatcctccagacgtaacaaaagacccccaaggtggtggattttcttttgatttctgggtacatgtcccgactttgaacggtccatctatgaaggattaccaccgttatagagttattctcgctaatgagaatagtgggggatatcttgagagccctttcattctgccggataggctaataatcgggaaggatctcaacgtggcaggacaactgaataaagtaacaagaactgatagagtgcaggggttggttattgggtttagagataaaggaggcccaacggatccgtctggcatagaattcattatttctcctaccgtttctcaaaataggaaacaaagcaataatgatatatggggtcacagcgtatgtctagttgaggattatgggcttacgaagggcagaacaggagtcattaccacctctagtcttactgagatgggtattacaaaagctgtaagtagtactgttagtggagttacattaggggatgtaagttccacttttatgcacatgtgtttaacttttgattacggttctgataaggttaggaccattgtagatggtgaagtatgggatgagtcaaacatggctagttctctcatggtcggatatgctcagtcattacagataccctcattcgccaacaaagaaggaanccctgcttcccaatatttcgagagtttcacagctgacccagtggagaatggtccatccgtaaatttagatggtgatgcttttacgccgtgggtcataggaggaggctttacggatggcataaataacagggggttatcaggtgaggatgagtacgtgggatttcttgggtataacaccaacgcttcttattacaacacctatggctctactggcgatacgggatcttcacaaaagtctcagcatggaagatccattccactagtcagcacaaggtggcagagtgggttgaatgggtacataggaagtttcaaagtatatggaaaagccctatctagtactgaagcgaagaagaattttgacgctcaaaaaggtttctttaagaatattgtaacatgatagccccccaaagaattgattttctaaccacatccaaacttactccaattattggaattggatttccggttgtatcgggtacaggaggctacttcaccgctactcagggattaaccacaatttcctcaagcttgaaacaattgatattgaccaataagggggaacgcgtaatgatgcctgattttggtactactatcagatcttctcttttttccctaatggatgaaacaaggagaagggaaatgaaagaagagattcaatcggcagttgcttcttatgaaccaagagcaattttaaaatcagtagagatttcatttgaggattctcaacaccaactcacaatatctattgctttctccactgcagaagatatgtcaacaactcagattgtagaggttataatataatgactcaaaatgatagtatttatagtaccagtgcttttgatggaactgtagcatcggattttttagctctaggcatagtaccagagaaccttagagcagatttaatagattactctactgctgatttttctgagttcaaaacttctcttctcaattacttgcaagctgtctatcccctggactacactaattttgttgagtctgatttaggcgtcatgctagtggaattgttttcttatttagctagtgttatttctttgaaatcggaccttctcgcaaatgagatgtatttgcctacggtacagactattggaaatctttctaagttgttgaatttggtaggaatatccctgaagggaccaatcagcagcaaaggaagtgtgagatgcactctttcaactcctgatgcaatctctgggctagagactttaactataccgctttctagtaggtctttttctgttccaaactctaaggacgggggtgctctattttttactttatataaggtaaacacaactaccggagagattgatttagataatgaagatatacaattagaagttgcagattcggtggtagggggaacagagttcaactctttgattcttctagagggggaattaaaaattgatactggaactttntctgacctaaacactatcaagtctttttctatagagtcgccatccattgtggaaaagagcatcgtagtgtctgccaacacaggtaacatatacaaagaagtccagaatttgtttctggcagacagtggtgacgaaaaggtatttcaaaagatttacaacgatgactactcatgtactgttgtctttggagataatgtcaggggtaaatctccagcaggaggagttaactataaagcattttatagaatcggtggtgggtcaagaggtaacgtcccggctcagactattaatcttaacataactgctacacattcttctccttnacgatccgtctctctgaatgttgtaaactctacctttgctgccggaggttctaatgccgagacggtggaacatgctaagagatgggctccctactttttcaagtctcaatacagggctgtcacgggagaggactacacggcatttgcaaatcaatttgtgagcactgttggtcaaaccgcaaaagctcaagcggttttgaggagatctggagctggagctaacatgattgatat

SEQ ID NO: 770 - DNA, 4000 bp, Escherichia coli
  misc_feature (1328)..(1328): n is a, c, g, or t
  misc_feature (1451)..(1451): n is a, c, g, or t
  misc_feature (1583)..(1583): n is a, c, g, or t
  misc_feature (1985)..(1985): n is a, c, g, or t
  misc_feature (2234)..(2234): n is a, c, g, or t
  misc_feature (2454)..(2454): n is a, c, g, or t
  misc_feature (2598)..(2598): n is a, c, g, or t
  misc_feature (2831)..(2831): n is a, c, g, or t
  misc_feature (3134)..(3134): n is a, c, g, or t
aggaagcaagcaaataacagttcaggatgatcgaacaaaaaccagatgtcttgtttcatcattttcattccattggcagcaaaaattacttgctgtacgtttgcaaattggtagaaaaaggcttcaaacaaaaaattcagccaatttacatccaaacaaagaatcagcaacaagcaatacaattagacaaacttctctggacttttaaacaagatagttttattccacacacaatcgtaggtaattctggcttggattcaacccctgtacaaattggatggaacgaaaatcaatttcatacagcagcagccattgtcaatctcagtgaggaaattccaatatcttatctggaatctaaaaaaatccatgaaataattgacgacgatgaagtgaaaaaaaataaagccagagaacgttggaaaaattataaatccgaagggtgtcacctgggtgtttaccaaatcaagtaacaaatcataaaactaatggataaaacatactgtccccaatcaattgaaaccaaaatttataaggcttgggaaaggaaaggctatttttcacctgcaaaccaaggtgatgcctattgcatcatgattccaccgccaaatgttacggggactctccatatgggacatgcctttcaggacacaataatggataccttaacgcgatatcatcgcatgcaaggtaagagaacattatggcaggtaggtaccgatcatgcaggaattgcaacgcagatggtggtagaaagacagctggaaaaggatggtttgtctagattggaaatggggcgtgaagattttactgataaagtgtggcaatggaaacgcgactcaggtaataccatctccaatcaactgaggcgcatgggagcttctgttgactggacacgagaacgtttcaccatggatgagggtctttctgaagccgtgaccgaagtctttgttcaactgtatgaagaaggattgatctatcgaggaaaacgactggtaaattgggacccggtgttgctcacagcattgtctgatcttgaagtaaactcaacagaggaacttggcaaactttggcatctaaaatatccaattgctaactcagacgacagcctgatagttgcaactactcggcctgagaccatgcttggagataccgcagttgctgtcaatcccaaagatcatcgataccaacatctgataggcaaagaaatagaacttccactttgctcgagaaaaatcccgataatagcggatgattatgttgatcaagaatttggaactggttgtgtgaaaattacacctggacatgactttaatgattttcaactaggnaaacgtcacaaacttgatgtcatcagtatattcacaagagatgcaaaactaaatacaactgtaccagaagaatttgttggcttagatcgttttaaagcaagagaaattgtgattaagaaaatnaaatcacttggattgttacatcaaattgatgactacactttgaccgttcctagaggggatcgaagcggtgcagtaattgaaccattcctgacaaatcaatggtttgtgaaaattgaaccactggctcaaccngcaattgatgctgtaaaaaatggcgacatcaaattcgttcctgaaaactggtctaaaacctatttcgattggatgaacaacatccaagactggtgcattagtcgacagttatggtggggacatcgcattcctgcttggtacgatttagataaaaatgtttacgttgcaaaatctgaagaagaagcccgaaaaaaataccaacttgaacctaacattaaattaaaacaagatgacgatgttctcgatacatggttctcctctgcgttgtggccattctcaacacttgggtggccaaataaaaccaatgcattaaaaactttctatccaaccactgttttggtaacaggctttgatattatttttttctgggtcgcccgaatgattatgatgggactgaaattnatcggccgtgttccatttcaggaagtgtatattcatggactggtacgtgataagaaaggtcaaaaaatgtctaagtccaagggcaacattcttgatccaatcgatttagttgatggtattgatttaaattcattaatcaagaagcgtacggatggattgatgcagccccaactagcgcccatgataactagtgaaacaaaaaaagagtttccatccggtatcccagaatttggcacagatgcattacgntttacttttgcagctctggcaacaacaggtagagatatccgctttgatttgaaccggattgaggggtatagaaacttctgtaacaaactatggaatgcagctcgattcataatcatgaacactgaaggagtaaagttacttgaaaaagatcctaatcaagcggatatgtccttagctgacatctggattcaagggaaactccactcgcttattaaatccnttgaaaataatattgctaattatcgaatcgatttaattgctagttcactctacaactttgtttggcatgactactgtaattggtatttggaattatcaaaatcgattctcaaggagggtaatcaaattaggcttgaacaaaaanatgccactcagctaaacctcctaagtaccttagatgcaacattaaagtgtctccacccgatcattccatttattactgaagagctttggcaaaaaatcaataacgacccaacaaaatccagcatcatggtagaaaattatcccgtatcaaaagattttatggttaatcaacctgttcttgatcagatggattggttaattgctttcgttgtcagtgttcgccaaatccgatcngaaatgagtatcccacccaaaaaaataatacctgttctgcttaaagatgcctcatctggtgatattgaaaaattgaaagagacaaatcaatacatccaagacttagctttcacagaaaaagtcactgtgttggacgatcggaaaacaataccgatatcggctacagcactgcttgggggaacgaaaattctcatcccacttgaagggctaattgatatcaaatctgaacagagtcgattagagagaaagctgacaaagatccaaaaagatcttaaatcaactgaacagcagttatccaatcanaattttctgtccaatgcccctaaagacattgttaaacagctggaatctagacgtgaaaacttaattagggacaaacaaaaaattgcagaacaaatcaaaatgctttcatcgagttagctctttatctggaaccatccaaagaagtaccaatccagggacaaaaagaaataacaaactaagtattccatatctgggattgccaaagaataaagcaacccaagaaactaaaacgggacctaagaatacagctgatttgcctactagattataaaagccgaaaaattgagcttctttattcataggtattatattactgaagaaagatctacttatggcctgaatacccccttggacaagaccaactgttccagccaagatataaaattctaaagctgtactcatataataagcataaaaagatattagtatataaatggaaataccaattgtgaggatctttttgaaaccaatcttatccgcaaaaattccaaaaactaaggtggcaggaaatccaacaaattgagtaagtagtaaagctgtaatcattgaggaagcatccaatcctatgtctgatccataggcaattgccattctaactatcgtatctaccccatctatataaagccaataagcaataaggaatatggcgactcttttgtgcttttttatttctcttaaagttgaggccacagctttaaatgcttcagtaatattttcgaagaggcctttggagatttctgtattacttttttcttcaacactcataaaaagaggtaaagaaaaaactacccaccaaatagccacagaaagaaaagaccacaggatagcttcactctgtgaagacaatccaaaccaagcagggttca

SEQ ID NO: 771 - DNA, 4000 bp, Escherichia coli
  misc_feature (1989)..(1990): n is a, c, g, or t
  misc_feature (2586)..(2586): n is a, c, g, or t
ctgggtgagcgtctgttgcaaagcgaacaacaactgctggaaaaaacccttcccaggcgctttggttatcacctgctgcagattggttgtgcggatttgccgatgtacgagagcagccccatcggacacaagtttgccatcacccaggctgctcactatgaagaggatgagatcaaccaggctcccgagattctcgccaggggcgatgccattccgctgtccagtgagtccgttgacctggtactgctgcaccatgcgctggattacaccgctgcccagcaccagttgctcagggaagtctcgcgcgtccttattgccggtggccacattgtcatcatcggcttcaatcccatcagtagctggggcatccgcacccgttttcccggtcgcaagaaatcgccctggcagggcaagctgttgagcaccctgagactgacagactggctcaagttactcgacttccaggtagagcaggtacgtttcgggggctattgcctgccgatcaactctcccggtgtgattcgctactcgggcatcatggacaatctggcctcgcgcctgaactggccaaccggcggtgtgtacatgatctgtgcgcgcaagcaggtgctgcccctgaccccgatccagacctcgtggcgggaatttgccagcgcccacgtgggcatgcccattgccgaaaacgtcagccgagtatccagggacatggccgccagtaacgaagagaagtgatccccgcagtatgtcagagcaggtagaaatctatacagacggcgcttgtcgcggtaatccgggacccggtggctggggcgcattgctgcgtttcggtgacaaggaaaagactctctatggcggggaagcggaaaccaccaacaaccgcatggaactcacggctgtcatcaaagccctggaatgcctgaaaggcaacaagtggcctgtattgattgtcacggattccaagtacgtcttgcagggcatgaccgagtggatcgaaggctggaaacgcaaaggctggcgcacggccagcaagaaaccggtcgtcaatgcggaactgtggcagcaactggatgccctggtacagaactttgatatacagtgggagtgggtcaagggccacagtgggcacccggaaaacgaactggcggaccagttggccaaccgcggtattgatgagttgtaacggcaggtagagcaggagagacaactatgcgtcagatcgttcttgatacggaaaccaccgggctggatccggcccagggccacaagattatcgaaattggctgtgtcgagatggtcaatcgccgtcttaccggcaatcacctgcatgtctacatcaatccccagcgtgaggtcgaggctgcggccctggaggtgcatggcatcaccaacgagtttctggccgacaaacccctgttcaatgacatcgcccgcagtttcattgacttcgtggagggcgcggaactcattattcacaatgccccctttgatatcggcttcctggaccatgaactggcggctttgaaacaggactacaagtccatggcggactactgctcggtgctggattcactggtcatggcccgcaagaagcatcccgggcagaaaaacaacctggatgccctgtgcaagcgctacatggtggacaacacgcaacgtgagcttcatggcgccttgctggatgcggagatcctggcggatgtctacctgatgatgaccggcggccagtccagcctgtccctgggttacgaggagggaggcaaccagcaggaagaaaccggcatccggaaattgtcagcagaccgcaaacccctgaagatcatccgtgccactgacgaggaactggcagtccatgaagcccgcctccaggagatcgataaagccgcggaaaacggctgcttatggctcaagaacccgcagtaaacacgggcgaatttcttgaagtaccgtaatgcggtgcatataatcatccagctgttttttaaatatatnnttaaattcaaaacgttaaaaaactaaggaatccctatggaagtgctgacaatggatacccccatgatggtgtccgggattattctggtcataacctttattggtatttttacagagggggtgcatggttttcaccgtgccaaattcgctttaggtggtgctggtgccatggtcctggcaggtcagtactttggattttacagccccgaactcgccatcgagtcgatcgactggaacgtgatattcctgcttggtgccatgatgaccgtggtggccatcatgatacccaccggcggcttccagatgctggcttacaagattgccgacctcagcaagggacgcctgttcctgctcatggccatgatgggtaccctggtgaccgtcttgtctctgctgctggataacgtgaccacggtagttattttcgggcccttgatcatcctgattgcgcgctccatgaatgtcagcccgattccctacctgcttgcagcggcactgctgtcagacaccggtggtgtcgccactctggtcggtgacccgcccaacctgatgatcggctccgccgccaatatcgatttcaacaccttcttctaccanatgggcggcattgttttcgttgcctggctggcgacactgttcttcctgaaggtcattttcaagaaagagctggcacaagtccccgagatcaaggatttcagccagcaggaagaactgaaggatccctacacctggaaagtcgcgctgattgtcctggccatcatggttgtgggcttcatcatgcaccggacgctgcattgggaagcctggttcgtggccggcatgggcctgaccctgctggttttcttcggcaaggatgtggacatggatgatcactttgccgatatcgaactgaccctgctgatgtttttcatggcgctgttcatcatcgtcggcggcgtggaacacagccgtttcctggaatatatcggccagttcatcctgccctttgtccaggaggatcttttgactgcctgtatcatcctgatgtgggtagccgccttcctgtccgcctttatcgacaacatcccgttcactgcggccatgattcccatcatcatcgggctggagcagcagggcatcaacgtcaatgccctgtggtgggcactggcagccggtgtcggtatggggggtaacggctctcacctgggctcgacggccaatgtcttcattgtcaccatttccgagaaactggccaaagacgagggcaggccggaattggccatcaccccgggcctgtggatcagaaaaggctcgccggtgatgatcctgaccctgattatctgttccatcatcatgtcggttttcttcgatttctacagcaaccccgaaatcgagattggtgccacgattgatgacgaaatcgctgcgcttgaaatcgcagaataaaacgcaggagcagggagcccgtcagcttgactggctccctgtttcctactgttcaccagaatcctgtccaggttgaaatacctgacttttcccgctggagtgtaaaccttggaattcctttctgaatacggcctgttcctgttcaaaactgccaccatcgtggtggctatcctgattgtcatggcggctgccgtggccaatgccatgaagcaaaagaaagaagccaagggcagtatcgtggtgactcacctgaacaaggaaattgatcactaccgggatgaaatccgcaatgcagtcgaagatgagcacagcctgaaactggcagccaaggaagagaaaaagaaatccaaacaggagaaaaaagctcgcaagaaagccggagattcacaggcagagcgcaagcgtctgtatgttatagattttgaaggtgatcccaaggccagccaggttgatgaattgcgccatgccattacagccgtgttgacctccattcgtgaggacaccgatgaagtactgctgcgcctggaaagccctggcggcatggtccatgcctatggtctggccgcctcccagctacagcgtatac

SEQ ID NO: 772 - DNA, 4000 bp, Escherichia coli
  misc_feature (3296)..(3296): n is a, c, g, or t
  misc_feature (3711)..(3711): n is a, c, g, or t
  misc_feature (3723)..(3723): n is a, c, g, or t
  misc_feature (3764)..(3765): n is a, c, g, or t
  misc_feature (3774)..(3777): n is a, c, g, or t
  misc_feature (3786)..(3786): n is a, c, g, or t
  misc_feature (3801)..(3801): n is a, c, g, or t
  misc_feature (3825)..(3825): n is a, c, g, or t
  misc_feature (3828)..(3828): n is a, c, g, or t
  misc_feature (3854)..(3854): n is a, c, g, or t
tgatcgtcatgacagatacttcttaagactaatgagcaagaatgtgatgttgtactctgaaatggtagcgacaaagtctgcaattcatggagatagaaaaaaaatattatcttatagccctgaggaaaaaccactagctcttcaagtaggtggatctgacaaaaaagaattagccgaagttgctaagattgctgaagatatgggttatgatgagattaatataaatttaggctgcccaagtaaaaaagttcaaaaaaatatgtttggtgcctgtctaatgaaggaacctgatttagttacagagtgtattaactccatggttaatgcttgtaaaataccagtgacggcaaaaactagaattggatttgatgatactgaagattttgattatttaaatagttttattcataaaatgaaaggtgttggctgtagtacttttatattacatgctcgaaaagcaattctttctggaatgtcaccaaaacaaaatctaaatattcctaaattaaattacgatatggtttacaaagttaaaaaagaaaaccctgatttagaaattattattaatgggggtatttctaaaattgatgagatcaaaaaccatttaaaacaatgtgatggagtaatgataggaagatctatttatcaaaacccatattcattggttgaaatagaaaaagagatttttcagtcaaaaaatgaacccacaagagaagaggtggctgagaaattattagaatacctagagagagaagttaagttaggtacaaaagttaaccatattatgaggcatacagttggtttgtatcatggtcaaattggatctaaagactggaaaaggtatcttagtgataatatgatggcaagagattctgattttcaaaaagccaaacatataatgacaattgttcaaaataatgaaaaagcaaatcaagttaactcttaatggaaaatttaaacattgttgaaataattaatttattagctgttttaggtatagctgcagctgtagctggtttcatggcaggccttcttggggtaggtggtggaattattatggttccagcattatattatgcatttaccgttctagattttgatttagttactcgaatgcatttatctgtaggaacttctttatcaattatcataccaacatcaataatttctaccaaaactcacatggaatatgatgctgtagattttaaaatggttaaatcatttggagtatttatattgctaggtgtaattgcgggtacttttttagcagtaaacttaaaaacaccagctttagttttatttttttcaatatttgcttttatggttggattgttctttatttttttaagagaaaaacttgttgaaaatccaaagcaaatttcttcaataataaaaaatttgtcaggtgttattattggatttatatctgtaccactaggcattggaggtggctcattaatggtcccattcatgagaacttttggttatgacattagaaaatctataggaacggcagctgctgtagggtttttaattgcagtcagtggaactataacaatgattttgggtggaagaataattgataatgtaaatacaccctttagctatggatatataaatttattaggtttcttagtttttgtgccagttacaatgataatggcacgtcttggtgctaaagccgtttacaaaattaataaaaaaatattaagtaaaatatttggtacatttttactcatagtatccatacgatctttcattgaatacttaaatatcacgtagtaaaagataacctcatgtttaatttaagacaaataatctcttcaatagccgatgctggtaagcaattatttaataaaaagaatattaaaaagaatgatttagactcaatattatcactatgtgatgatttaatctcaaacaaaggtgcagcctttggaattacagtcgcaagagatatcacagaattatatcaaactttatccacagataataaaattttattttttaaaagtattaatgaaaaatacagaccaagctttacaaaagtaaatgaagcaattgatgtttataaaaattctcaaaatgaaaaaactttatcagatttatttaaagtctcagaaggcaaaagaagagagctgtttatgaggatgaatatggctccaaatggaacatcaatcattgtatcattgagagaagacttgttaaaaattttaaaagaaaatagagacctagtatctttagatgaagatttaaaacacttgtttaaatcttggtttaatccaggatttcttaaattaaaaaaaataacatgggacacaaaagctgcgatcttagaaaaaataattaaatatgaaagagttcatcacatgaaagacatgaatgaacttaaaagaagattaggtgaagacagaaggtttttttcttattttcatccagctcttgaagacgaaccaattatttttgtccaagtagctttaactaatggtttgggaagatctatacaagagataacgaagcagtctagtggtgatgaaaaaaaatatgataccgctactttttattcaataagcaactgtcaagagggactttcaagagtaacactggggaattttctcattaaaagagtagtttatgaaatacaagaagagctacctcatataaaaaactttggtacattatcacctatacctggttttgttgattggttttcttatttggaagaaagtaaaattaaaaatattttaggtaatataaaaaatcaagatgtgatgtttttaaaatctaaagatttaaaaattggtgataaaagaataatagacaacaaagaagctataattaaattagtgtctcattatattgttaatgaaaaaaaaagtgatggccttccagttaacgatgttagtagatttcatttgggtaatggtgcaattgtagaagatataattatcaatgcaaatatttctgaaaatggttttaaaagatcttttggtgttatggttaattatctttatgaattaaaaaatatagaaaaaaaccacgaagaatatatgaataagaaaaaagtaattctctcagataaattaaaaaaatacttataaaaagtgaatagtattgataaaaattttttaaaagattcatattatattaatcgattaaaattatgtactattagattaattaataattctaaatttccatggataattctaattccaaatagaaaaaataaaactgatatcacagatcttaattcaaaagatcaaattttattaatgaaggaaattgtacattgnagcaaattaatgaaaaaaatattcaaaacatcaaagttaaatgttgaaaaaattggtaataaagttcctcaattacatattcacatcattgcaagatttaaaaaagatagtagttggcctctttcagtttgggtagtcaaaggtaagccttatgcaaaaaaagctttaagcgaaaccataagtaaaataaataaagcttttaaataatgttggtgaggttggggtggtttcagtctccctacgccacccttaatattacagtaaacgattctctaaaatttaatctacacttaataattgaaactagactttatccactgcttaatttattaagattgtaatgaagaaagatataaaagctgatgacgttatctttaacttttttaagcaaatttgtgatgaaaaaaatgatganaaatgtgttgancttgggaatagctggattaatgctatggaaactaatttagnnaatatggannnnaatttaganggtgaagacagaatnaaacataaaaaagatattgatagnaanaaagagcaccttaatagcatgaaagntaaatcagctgttgagtggcgaaattatgcaacacaatgtatgatggaaatactagatcataaaactaagtcgtgaatttttttaaaaaatttttctctaaaagtaatttggaacttaaaatcaatgatggtggccgtgcggctgc

SEQ ID NO: 773 - DNA, 4000 bp, Escherichia coli
  misc_feature (2016)..(2016): n is a, c, g, or t
tcggccaaggtcagcttgccacgataaatgcagcgcccatgcgacactacacgggggatcacgcccaatccagacgcaatccgtgggttgctgccacgcttgatgaccccatcaacaacggctggatccatttcatcggctgcgcggttcaaatcaacataggcccgcggggcttgcgcacaaatcaacggacacccccaagctgcgacatcgccaatcaattgatcaacataggcatcctcagaactgcgcaacgtcaaaggatcaagaatcgtttctgctaaaaacgcatcctcataggcccgcccactgtggggcgatgcgaaaataacgcttgaacaccaatcatctggtgccaaaatacgataagcgtgcgtttcttctgaccttatttccataaaataatagatagcgcaaaaattatcctttgcaaaaggtcttgaacctttttcatcaagcaattatagacccaccaccgatgtggattcccgcaccttatttttggggtaggatccgtatcatagggcggttagctcagtggtagagcactacgttgacatcgtaggggtcacaagttcgaaccttgtaccgcccaccatgaacgaattcactgtcccacctgggacgacctgcaatggcgcagacgacgcgccgcgattgattggagaaaccgatgaaggttaaaaactcactccgctcgttgaagcagcgtcaccgcgactgtcgtgtcgtgcgccgtaaaggccgcgtttacgtcatcaacaagacgcagcgccgtttcaaagcccgtcagggctaagaacacagcaagcaaattaaaaaaaccccgccttttggcgggtttttttatgccgtttataaatcaacaggctttcatttttggtgaaatactctgggggtctgggggcaacgcccccagcactgtcgttatgcgttctgcatgtcttgtaatatgtccaatgccgccgcacgtggatcttgggctttccagatgggacgaccaaccacaatatggtcggacccatttttaatcgcttgggccggtgttgtgatccgcttttgatcgcccacatctgcaccaatggggcgcacgccgggggtgacgatcaaacggccgtgtgattcgggcagggcgcggatcaatcctgattcctgcggcgatgcgatcaccccatctgccccagcgtcaaaagcgcggcccgcacgttcaacaaccaaatcctgtacatcgccagattttatcatactgcgatccaaatcatcgcgatccagcgatgtcaaaatcgtcacagccaatattttcaaattgctgcccgcggcgccttgtttggcggcggcgacgacatgtgggtcgccgtggacggtcagaaaatctagatcatactgcgcaatgccacgcacggctgcttcgactgtggcgccaatgtcgaaaaacttcatatccagaaaaatgcgtttgccgtgttcttgcttcagctcgtttgctaatgccaaaccaccacccgtcagcatccctaggccgattttatagaatgaaacagcatcgcccagtttgccggccaaatccaacccggccacaacattgggcacatccattgctacaattaaacgatcatctgccatttcatatctccttatctatacggcgacggtgtggcaggtgatcgcgatttggtcaagcgttaggcaacgcgtgacatcagcatatcatgtacggtgacactatggacttcggttgggatatggcctgtggcgcggactttggcctttgcttcggccagcaacaggggatgcggatccgcaatgtcatggggatgcacaggcaccaccgaacattcgatatggatcagcccgcgatctgtatcgaatgtgaccaacccaaatatgcgttgattgccctgcataacgcggacgtttgaaaaccgtgtggaaatgatctgcatcgcatgatccccttttatctcgactaccctaatggatagtaacgtatccatttgtgttggtattagcgcgatngggtatttttttagccaaatcttgaaataattgtgcaaaaccgccacctaggttgtgaggccacagaattatgtgccgcttagcgggcataaacacaggtggtgcttaggataaggagacgaacgatggacttaaacaagttcacggagcgcgcccgcggatttattcaaacggcgcaaaccattgcgattcgggacaatcaccagcgtgtgatgcctgaacatattttgaaatcacttatggatgacgaccaagggctggccagcaacctgatcagccgatcgggcggtgatgcggctgcggtgcgcgcagccttgtcgcaggctttggccaaattgcccacggttcagggcgacgcgcaggcctatgtcgatcaaaccgcggtcaaggttttgaccgaggcggaaacaatcgcgcacaaggcaggcgatcaattcgtacctgtcgaacgtattttgatggcactgtgcatgatcaaatcgggcgcgaaatccgcgttggatgcggggggtgtcacggcacaatccctaaatgccgcaatcaatgacatccgcaaagggcgcaccgccgacagcgccacggccgaggatggatatgaggcgctggaaaaatatgcccgcgatctgaccgctgcagcgcgcgacggcaaaattgaccctattatcggccgcgacgatgaaattcgccgcgcgatgcaggtgctgtcacgccgcaccaaaaataaccccgtattgatcggtgaaccaggtgtcggcaaaaccgccatcgccgaaggcatggcactgcgcatcatcaatggcgatgtccccgaatccctgcgcgacaaacgcttgatggcgctggatatgggcgcgctgattgctggggccaaatatcgtggcgaattcgaagagcggttgaaagcgatcctaaccgaaatcaccaacgccgcgggcgaggttattttgttcatcgacgaaatgcacacgctggtcggggccggcaaatctgatggcgcgatggatgcggccaacctgatcaaacctgccttggcccgtggggaattgcactgcatcggtgcaaccacgctggatgaataccgcaaatatgtcgagaaagacgcagcactggcccgccggttccaacccgtcatggtgtccgaaccaaatgtcgaggataccatttccattctgcgcgggatcaaggaaaaatacgaattgcaccacggcgtgcgcatttccgacagcgccttggtcgcagcggccacattatcgaaccgctacatcaccgatcggttcctgcccgacaaggcgattgatctggtggacgaagccgccagccgtctgcggatggaggtagacagcaagcccgaggaactggacgccctagaccgtgaaatcctgcaaaaacagatcgagtccgaggcattgcgcctagaggatgatagtgcatcccaagaccgacttgccacgttggaaaaagatttggcagacctgcaagaacgcagtgcaaccatgaccgccacatggcaggccgaacgcgataaattggcgtccgcgcgtgatatcaaggaacagcttgatcgcgcgcgtgctgaattggaatcggccaagcgtgcggggaatttagcgcgtgcgggggaattgtcctatggcattatcccgacgctggaaaaacaactggcacaggccgaacagcgcggcgatgatgagacaatcgtaaaagaggccgtgcgccccgaacaaatcgcccaagtggtcgaacgctggaccggtatccccatgtccaaaatgctagagggcgagcgggaaaaattgctgcggatggaggatgatctgcatcgccgcgtgattggccaatccaaggctgtcaccgccgttgcgaattctgtccgccgtgcgcgcgctgggctaaacgacgaaggtcggccattggggtcgttcctgttccttggtccaacgggtgttggcaaaaccgaattgaccaaagcggtggcatcgtttct

SEQ ID NO: 774 - DNA, 4000 bp, Escherichia coli
  misc_feature (12)..(12): n is a, c, g, or t
  misc_feature (17)..(17): n is a, c, g, or t
  misc_feature (21)..(21): n is a, c, g, or t
  misc_feature (39)..(39): n is a, c, g, or t
  misc_feature (48)..(48): n is a, c, g, or t
  misc_feature (63)..(63): n is a, c, g, or t
  misc_feature (69)..(69): n is a, c, g, or t
  misc_feature (117)..(117): n is a, c, g, or t
  misc_feature (192)..(192): n is a, c, g, or t
  misc_feature (196)..(196): n is a, c, g, or t
  misc_feature (198)..(199): n is a, c, g, or t
  misc_feature (228)..(228): n is a, c, g, or t
  misc_feature (246)..(246): n is a, c, g, or t
  misc_feature (276)..(276): n is a, c, g, or t
  misc_feature (288)..(288): n is a, c, g, or t
  misc_feature (303)..(303): n is a, c, g, or t
  misc_feature (363)..(363): n is a, c, g, or t
  misc_feature (408)..(408): n is a, c, g, or t
  misc_feature (414)..(414): n is a, c, g, or t
  misc_feature (447)..(447): n is a, c, g, or t
  misc_feature (477)..(477): n is a, c, g, or t
  misc_feature (501)..(501): n is a, c, g, or t
  misc_feature (504)..(504): n is a, c, g, or t
  misc_feature (564)..(564): n is a, c, g, or t
  misc_feature (633)..(633): n is a, c, g, or t
  misc_feature (663)..(663): n is a, c, g, or t
  misc_feature (672)..(672): n is a, c, g, or t
  misc_feature (717)..(717): n is a, c, g, or t
  misc_feature (726)..(726): n is a, c, g, or t
  misc_feature (738)..(738): n is a, c, g, or t
  misc_feature (741)..(741): n is a, c, g, or t
  misc_feature (750)..(750): n is a, c, g, or t
  misc_feature (862)..(862): n is a, c, g, or t
  misc_feature (922)..(922): n is a, c, g, or t
  misc_feature (1066)..(1066): n is a, c, g, or t
  misc_feature (1084)..(1084): n is a, c, g, or t
  misc_feature (1237)..(1237): n is a, c, g, or t
  misc_feature (1243)..(1243): n is a, c, g, or t
  misc_feature (1294)..(1294): n is a, c, g, or t
  misc_feature (1297)..(1297): n is a, c, g, or t
  misc_feature (1345)..(1345): n is a, c, g, or t
  misc_feature (1350)..(1350): n is a, c, g, or t
  misc_feature (1399)..(1399): n is a, c, g, or t
  misc_feature (1420)..(1420): n is a, c, g, or t
  misc_feature (1426)..(1426): n is a, c, g, or t
  misc_feature (1486)..(1486): n is a, c, g, or t
  misc_feature (1531)..(1531): n is a, c, g, or t
  misc_feature (1558)..(1558): n is a, c, g, or t
  misc_feature (1585)..(1585): n is a, c, g, or t
  misc_feature (1858)..(1858): n is a, c, g, or t
  misc_feature (1959)..(1959): n is a, c, g, or t
  misc_feature (3735)..(3735): n is a, c, g, or t
  misc_feature (3771)..(3771): n is a, c, g, or t
  misc_feature (3801)..(3801): n is a, c, g, or t
  misc_feature (3870)..(3870): n is a, c, g, or t
aaagacgctgtnaaaanaggntgcagacattttatagtnggtataggnggttcggctacaaangactgnggagtaggaatgcttcaggctctgggatatgagttttttgatattganggcaaagaggtaggatacggtgctgaaggtgtcagagatattgtaaaaatagaagataaaaatgtcttaaaaganctgncnnagtgtacattcagagtggcatgtgatgtnaccaatccgctttgtggngaacttggttgcagtgccgtattcggaccncaaaaaggtgcnacaaaggaaatggtngaagatatggatgcgtggctttacagcttttcaaatcttgtaaaagaaaagtataaagangccgactccacatatccgggatgcggtgctgcaggaggacttggntatgcnttccacaactttacaaattcaaagatggaatcnggaatacagatagtgcttgatgaaacaagncttgaagattatgtaaaggatgcnganattgtggttaccggtgagggaagacttgacagtcagactgtaatgggtaaggcacctgtnggtgtagcaaatattgcaaagaagtataataaaaaagtcatagcattctcaggaagtgtaacagaggangccggagtgtgcaatgagcatggaatagangcgtttttncctattcttagaagaatagttacattggaagaagcgatgcaaacngatactgcnaagaaaaatctnacngatacggcngaacaggtattcagactgctataaaaaaagcagcttagtgagataatcattaagctgcttttttctttagagttttaaatctccgtcctttacaagtcccgcttttcttacnaacatatggataacaggtgtgataacggcaggtaggataaaggatatcataataagtccnatccaatcaaatgaagtgatggcggatttggcaccgcttgttacatcatttacccaacctgtatacactccgatttggcctacaagaccgcaggtacccataccggatgatactgcggcaccgttcatttgcaacttgaatatncaggttgctataggtccngtaatcatggatgtgatacatggcgctatccagactctcggattctttacaatattgcccatctgaagcatggatgtaccgataccttgtgagataagtccgccccatttgttttcagggaatgagataattgcaaagccgaccatctgtgcncagcancctgccagtgcggcaccgcctgcaagtcctgtaagtccgagtgcggcacanatngctgcagatgaaataggaagtgtaagtgccacacctacaaggagtganaccantattcccataaggaaaggttgaaggcttgtagcccacatgatgactgtnccaagcttcatagcggccttnccgagngtcggtgcaagcagtgcggataaaagtattccgaccgagatagtgacaagcggagtgacnagtatatcaatcttggtttcctttgatatcatctttcccgcttcngaagctattattgctacaaaaagtacngcaagcggtcctcctgcacctccaagngcattggatgcaaaacccaccgtaatcagtgagaacagtacaagcggcggagtggcaagtgcatagccgattgctacagccattgcaggtccgctcatggcacttgcaagagaacctacagtatagtcaactcctgcaatggtggccactgtgccggtaagaaagccgatattaaactgctttcctacagtattgataatagtacctattaaaagtgaacaaaacagtccctgtgccatagctcccaaagcgtcgataccgtatctttttgcngagataacgacatcctttcgcttaagaaataactttagcttttccataatgaacgcctccattaaattatgtttacttccggtacaattctaaaactttanagtggtttgtcaagccgaatttataccgtatttacaaaagtgacaagaaaaatagtgcttgacgggagtaagttattgtgctagaatgtgaaagattaaaggatgcaaagtcctttttttttggattttcaagtctaattcgaacaatggaggtggaattgtgcgtacaaagataacacttgcttgtacagagtgcaagcagagaaactataatacgactaaggataagaaaaatcatcctgaccgtatggaaatcaaaaagtattgtaagttctgtagaactcatacagtgcataaggaaacaaaataggagtatttatggctgaaggaaaaagcggaaagatatctgactttttgaaaggtataaagacagagtttaaaaagatagtatggccaactaaggatgatattgtaagagagactattgctgttatttcatcatctatagctatcggtattataatatcaatactggactttatcttcaaactattactaaactttgttatcaaataggtgataatatggcagaagcacaatggttcgtagcccatacttattcaggctatgagaataaagtaaaagtagatattgaaaaaacaattgagaatcgtgggcttcaagaccagatactcgaagttacggttcctatggaaaccatacttgaagtgaaaaacggtgtcgaaaaatcgtcagataagaaacttttcccgggatatgtccttattcatatgtatatgaatgatgaaacctggtatgtcgtaagaaataccagaggcgttacaggtttcgtaggtccgggaagcaagccggtaccactcaccgaagatgagcttgtagcactcggctacagcggcaatgccacaaagccggaagcaaggcttgaggttgacctcaaggaaggcgatatggttacagtcatcagcggagcatggaaggataccgtgggagtgattaccgctgtcaacgaaaaaagaaagactgtttctatcaatgtagaaatgtttggacgagagacaaaagtagagcttgagttcacagaagtaaagaaggtgtaatccggcataagccgttattacataatgcattttaaatgcgtgggagggaagttcccgaaattaccacaaggaggtgccatatggcaaagaaagttacaggatatataaaattgcagatacctgcaggtaaagcaacaccggctccacctgtcggtccggctcttggacagcatggtgtaaatatagttgagtttacaaagcagtttaatgcaagaacagcagatcagggagatttgatcatccctgtagttatcacagtttatgcagatagaagctttagtttcataactaagactccaccggctgcagttttacttaagaaggcatgtaaaatagcttcaggatcaggcgtacctaacaagacaaaggtagctaagatcacaagagctcagcttcaggaaatagcagagcttaagatgcctgacttaaacgcagcaagtattgacgcagctatctctatgatagcaggtacagcccgttcaatgggtatcacagtagaagactaatttaggaggtaatatacatgaaacacggaaaaagatatgttgaagctgccaaattagttgatcgtagcgtacaatatgatgcaaacgaggcagtagctatacttaagaaaacagcagtagctaagttcgatgaaacaatagaattacatataagaacaggtcttgacggacgtcatgcagaccagcagattcgtggtgcggtagttctgccncacggaacaggtaagactgttaaaatcttagttttngcaaagggacctaaggctgatgaagctttngcagccggagctgactatgtaggagctgaggagcttattccgaagatccagaacgacggttggttggantttgacgttatcgttgcaacacctgatatgatgggcgttgtaggacgtctcggtaaggtactcggacctaagggacttatgccgaaccctaaggcaggtacagttacaatggatgttacaaaggctattg

SEQ ID NO: 775 - DNA, 4000 bp, Escherichia coli
  misc_feature (1)..(5): n is a, c, g, or t
  misc_feature (7)..(17): n is a, c, g, or t
  misc_feature (19)..(27): n is a, c, g, or t
  misc_feature (29)..(36): n is a, c, g, or t
  misc_feature (38)..(47): n is a, c, g, or t
  misc_feature (49)..(57): n is a, c, g, or t
  misc_feature (59)..(59): n is a, c, g, or t
  misc_feature (62)..(66): n is a, c, g, or t
  misc_feature (68)..(69): n is a, c, g, or t
  misc_feature (71)..(75): n is a, c, g, or t
  misc_feature (77)..(77): n is a, c, g, or t
  misc_feature (79)..(86): n is a, c, g, or t
  misc_feature (88)..(95): n is a, c, g, or t
  misc_feature (98)..(102): n is a, c, g, or t
  misc_feature (104)..(105): n is a, c, g, or t
  misc_feature (107)..(115): n is a, c, g, or t
  misc_feature (118)..(123): n is a, c, g, or t
  misc_feature (127)..(131): n is a, c, g, or t
  misc_feature (133)..(140): n is a, c, g, or t
  misc_feature (144)..(146): n is a, c, g, or t
  misc_feature (148)..(149): n is a, c, g, or t
  misc_feature (152)..(152): n is a, c, g, or t
  misc_feature (155)..(161): n is a, c, g, or t
  misc_feature (163)..(163): n is a, c, g, or t
  misc_feature (165)..(167): n is a, c, g, or t
  misc_feature (169)..(171): n is a, c, g, or t
  misc_feature (173)..(199): n is a, c, g, or t
  misc_feature (201)..(204): n is a, c, g, or t
  misc_feature (206)..(210): n is a, c, g, or t
  misc_feature (212)..(213): n is a, c, g, or t
  misc_feature (215)..(216): n is a, c, g, or t
  misc_feature (218)..(218): n is a, c, g, or t
  misc_feature (220)..(238): n is a, c, g, or t
  misc_feature (240)..(247): n is a, c, g, or t
  misc_feature (250)..(251): n is a, c, g, or t
  misc_feature (253)..(269): n is a, c, g, or t
  misc_feature (272)..(276): n is a, c, g, or t
  misc_feature (278)..(278): n is a, c, g, or t
  misc_feature (281)..(282): n is a, c, g, or t
  misc_feature (284)..(284): n is a, c, g, or t
  misc_feature (286)..(295): n is a, c, g, or t
  misc_feature (297)..(297): n is a, c, g, or t
  misc_feature (299)..(310): n is a, c, g, or t
  misc_feature (313)..(317): n is a, c, g, or t
  misc_feature (319)..(323): n is a, c, g, or t
  misc_feature (325)..(329): n is a, c, g, or t
  misc_feature (331)..(331): n is a, c, g, or t
  misc_feature (333)..(334): n is a, c, g, or t
  misc_feature (336)..(346): n is a, c, g, or t
  misc_feature (348)..(363): n is a, c, g, or t
  misc_feature (365)..(374): n is a, c, g, or t
  misc_feature (376)..(376): n is a, c, g, or t
  misc_feature (378)..(382): n is a, c, g, or t
  misc_feature (384)..(386): n is a, c, g, or t
  misc_feature (389)..(391): n is a, c, g, or t
  misc_feature (393)..(403): n is a, c, g, or t
  misc_feature (405)..(415): n is a, c, g, or t
  misc_feature (417)..(419): n is a, c, g, or t
  misc_feature (421)..(422): n is a, c, g, or t
  misc_feature (424)..(425): n is a, c, g, or t
  misc_feature (427)..(439): n is a, c, g, or t
  misc_feature (442)..(448): n is a, c, g, or t
  misc_feature (452)..(460): n is a, c, g, or t
  misc_feature (462)..(471): n is a, c, g, or t
  misc_feature (473)..(477): n is a, c, g, or t
  misc_feature (479)..(480): n is a, c, g, or t
  misc_feature (482)..(485): n is a, c, g, or t
  misc_feature (487)..(490): n is a, c, g, or t
  misc_feature (492)..(501): n is a, c, g, or t
  misc_feature (503)..(503): n is a, c, g, or t
  misc_feature (505)..(519): n is a, c, g, or t
  misc_feature (522)..(528): n is a, c, g, or t
  misc_feature (530)..(531): n is a, c, g, or t
  misc_feature (533)..(536): n is a, c, g, or t
  misc_feature (538)..(539): n is a, c, g, or t
  misc_feature (541)..(541): n is a, c, g, or t
  misc_feature (544)..(544): n is a, c, g, or t
  misc_feature (546)..(550): n is a, c, g, or t
  misc_feature (552)..(561): n is a, c, g, or t
  misc_feature (564)..(564): n is a, c, g, or t
  misc_feature (567)..(567): n is a, c, g, or t
  misc_feature (569)..(569): n is a, c, g, or t
  misc_feature (571)..(577): n is a, c, g, or t
  misc_feature (579)..(580): n is a, c, g, or t
  misc_feature (582)..(582): n is a, c, g, or t
  misc_feature (584)..(584): n is a, c, g, or t
  misc_feature (588)..(595): n is a, c, g, or t
  misc_feature (597)..(597): n is a, c, g, or t
  misc_feature (601)..(601): n is a, c, g, or t
  misc_feature (604)..(604): n is a, c, g, or t
  misc_feature (606)..(606): n is a, c, g, or t
  misc_feature (608)..(608): n is a, c, g, or t
  misc_feature (610)..(610): n is a, c, g, or t
  misc_feature (612)..(613): n is a, c, g, or t
  misc_feature (617)..(620): n is a, c, g, or t
  misc_feature (622)..(626): n is a, c, g, or t
  misc_feature (628)..(634): n is a, c, g, or t
  misc_feature (637)..(645): n is a, c, g, or t
  misc_feature (648)..(649): n is a, c, g, or t
  misc_feature (651)..(651): n is a, c, g, or t
  misc_feature (653)..(660): n is a, c, g, or t
  misc_feature (663)..(664): n is a, c, g, or t
  misc_feature (666)..(666): n is a, c, g, or t
  misc_feature (668)..(668): n is a, c, g, or t
  misc_feature (671)..(672): n is a, c, g, or t
  misc_feature (674)..(675): n is a, c, g, or t
  misc_feature (677)..(680): n is a, c, g, or t
  misc_feature (682)..(684): n is a, c, g, or t
  misc_feature (686)..(688): n is a, c, g, or t
  misc_feature (690)..(695): n is a, c, g, or t
  misc_feature (697)..(699): n is a, c, g, or t
  misc_feature (701)..(701): n is a, c, g, or t
  misc_feature (703)..(703): n is a, c, g, or t
  misc_feature (705)..(705): n is a, c, g, or t
  misc_feature (707)..(707): n is a, c, g, or t
  misc_feature (711)..(712): n is a, c, g, or t
  misc_feature (714)..(714): n is a, c, g, or t
  misc_feature (718)..(720): n is a, c, g, or t
  misc_feature (722)..(729): n is a, c, g, or t
  misc_feature (731)..(733): n is a, c, g, or t
  misc_feature (736)..(743): n is a, c, g, or t
  misc_feature (745)..(745): n is a, c, g, or t
  misc_feature (747)..(748): n is a, c, g, or t
  misc_feature (750)..(751): n is a, c, g, or t
  misc_feature (753)..(755): n is a, c, g, or t
  misc_feature (757)..(763): n is a, c, g, or t
  misc_feature (765)..(775): n is a, c, g, or t
  misc_feature (777)..(778): n is a, c, g, or t
  misc_feature (780)..(781): n is a, c, g, or t
  misc_feature (783)..(788): n is a, c, g, or t
  misc_feature (790)..(800): n is a, c, g, or t
  misc_feature (802)..(803): n is a, c, g, or t
  misc_feature (806)..(808): n is a, c, g, or t
  misc_feature (810)..(810): n is a, c, g, or t
  misc_feature (812)..(813): n is a, c, g, or t
  misc_feature (815)..(821): n is a, c, g, or t
  misc_feature (824)..(824): n is a, c, g, or t
  misc_feature (826)..(826): n is a, c, g, or t
  misc_feature (832)..(834): n is a, c, g, or t
  misc_feature (836)..(836): n is a, c, g, or t
  misc_feature (840)..(844): n is a, c, g, or t
  misc_feature (846)..(846): n is a, c, g, or t
  misc_feature (848)..(852): n is a, c, g, or t
  misc_feature (854)..(854): n is a, c, g, or t
  misc_feature (856)..(858): n is a, c, g, or t
  misc_feature (860)..(861): n is a, c, g, or t
  misc_feature (863)..(863): n is a, c, g, or t
  misc_feature (865)..(865): n is a, c, g, or t
  misc_feature (867)..(867): n is a, c, g, or t
  misc_feature (875)..(878): n is a, c, g, or t
  misc_feature (881)..(882): n is a, c, g, or t
  misc_feature (884)..(885): n is a, c, g, or t
  misc_feature (887)..(887): n is a, c, g, or t
  misc_feature (889)..(890): n is a, c, g, or t
  misc_feature (893)..(897): n is a, c, g, or t
  misc_feature (902)..(903): n is a, c, g, or t
  misc_feature (905)..(908): n is a, c, g, or t
  misc_feature (910)..(912): n is a, c, g, or t
  misc_feature (1065)..(1065): n is a, c, g, or t
  misc_feature (1958)..(1958): n is a, c, g, or t
  misc_feature (1989)..(1995): n is a, c, g, or t
  misc_feature (3180)..(3180): n is a, c, g, or t
  misc_feature (3303)..(3303): n is a, c, g, or t
  misc_feature (3957)..(3957): n is a, c, g, or t
  misc_feature (3963)..(3963): n is a, c, g, or t
nnnnntnnnnnnnnnnnannnnnnnnngnnnnnnnnannnnnnnnnnannnnnnnnnantgnnnnngnntnnnnnancnnnnnnnngnnnnnnnnaannnnnannannnnnnnnnaannnnnnaaannnnnannnnnnnnaaannnannaanaannnnnnnanannnannncnnnnnnnnnnnnnnnnnnnnnnnnnnncnnnntnnnnntnnanntncnnnnnnnnnnnnnnnnnnncnnnnnnnncgnngnnnnnnnnnnnnnnnnngannnnntnttnntngnnnnnnnnnngntnnnnnnnnnnnnagnnnnngnnnnnannnnnanannannnnnnnnnnncnnnnnnnnnnnnnnnncnnnnnnnnnnanannnnnannnaannngnnnnnnnnnnnannnnnnnnnnngnnnannannannnnnnnnnnnnngannnnnnnaaannnnnnnnncnnnnnnnnnncnnnnntnncnnnncnnnncnnnnnnnnnntnannnnnnnnnnnnnnntgnnnnnnnannannnnanngnganannnnnannnnnnnnnnagngananannnnnnngnnananaaannnnnnnngnaaanaanangnanannaaannnnannnnnannnnnnnagnnnnnnnnncgnngngnnnnnnnngcnnangngannannannnnannnannnannnnnnannnanancnanattnnancgcnnntnnnnnnnnannncannnnnnnngngnngnnannnannnnnnngnnnnnnnnnnngnntnntnnnnnntnnnnnnnnnnntnnaannnantnngnnnnnnnaananattttnnnanattnnnnnantnnnnnanannnanncncncnaaagaaannnnaanntnngngnnaannnnnaaaanngnnnnannngtgtccttcgttttcccttttaatttgccttttctctgtagcattcattaaacgaggagcagtaatttctacgaaatggacgggtttgcccagctgttgttgttcttgttcttgttcttgtcgttacgcgtggtggtggtggtggtggttttngttcgttttccaaactccaggctcttcttcatggcgaacgcgccgaggaagttgacgaggccgacggcgaagagcgctaaattcgcgtgttgcgaaaacaaagctaagaagagtaaagaagtaccgacgaagtagcgtccagtgaccgtagctttgtaaaagccagtctcgccgttttcggcgaccgcgcgatagtaaagaccaaaggcgatggcggcggtagcgacgacgcgaagccaaaccgccgaggacaacgtctcgccgatcggcacgaccgcgtggaaaagacgtctcgggaagaggaataaacacacgccgacagctaaaatatacgtcccagtgaccatcgcggcgcgtttgcaccgttccagctgctccgcggataaactattcttttccttccgttcgtaataccgctccgcgtcgtcgtcgtcgttcgaagcgccgccgtaaaacttcgaaaacgtaatctccccggtcctctcgctcttctccgccaccatcggtattccagtcatcgcgcgtttatccttcacgttcactccggtatccagtaagtgttccggaggcggcatttgcgtttcgtctatttccaaaacctccggtcgcatgtccaacgcgaatatctttcctccttctaaatcatcatctaaatcatcactcctcctcttattcctcctcctcacgatcgcttctcctctcagcgatccaaacacgacgatgtccccgttttccgtcgttatcgaggcatctttttccacgtttccgacgacaataacgtcgccgctgtgttccacgtgcgttcctttttccaaagtgcagttgtaatacaaaggcgcgttcttcgatctcgccgggggaatcggcgcttcttttgcttcttcaaatcgtcngggagacgaaaaacaaacaacccgacgaggnnnnnnngtcgtcgttgttttcatcgcggatgatgagaggacgaacaccatctctcaaaagcggtccatcttcaaggggaaaagtttgtggggattcgtcacttcgatgtcacggcatccttttcgggtctcgtcgtcgttcgtttgccgaaacctgtatcacaacaacaacaagaggtggaagactaccgcgactcgaaggaatacgctcggtgtgcttctctttttcgtcctcgttctcgtttctgtcgcgttcttctcgtcgtctttgtcgtctgtcttttcctccttcgagaggatgacgacgacgaacaacaacaacaatgaagaagaagaagcacaacaaaagtgcgcgaaaatcctcgaccatctccgctcgatgaacgaatcagagagagagagacaaacgcgtttagatttgagcgagtgcggtttgcgcgcggtaccgaaagaggttttgcggttacgaaatctggaatttctcaatctcgggaaaaacaagttaaacgcgctgccggattcgttcgcgaaggatttaccgaacctgaagatcttattctgcctcgcgaacgagttcaggaaagttccagaagttctgggcgagatggagcacttgttcatgctttcgttcaaagcgaataaagtgcgagagataccggagcagtcgttaccgattgcgtctttaggatggttgattctgagcgataacgagattgaagtgttgccgaagagtttaggaaagtgtcgaaagatgaggaagttgatgttagccgggaataaaatcaaggaattgccgacttttatgagcgaattggtaaatttggagttattgagagcgagcgataatcggatcgaagtatttccggagtttttgtaccggttgccgaagctggcgtggttggcgttcgcggcgaatccgtgcacggaaaaagcggcggcgaacgcgatggagagaggtacacgagcggtcaaacgcgtcgttaattttgaggatttaggggtggatgaagggaaaaaattgggcagcggcgcgagtgggacggtgtatcgaggagaaatggacggattcaacgtcgcgattaaagtgtataataacatggggaaaacgagcgacgggaggccggaagacgagatggccgccgcgagtttagcgacgtcgacaacgagtgatatagtcgagggagaacaagangagcaagaggaaaccgttggtagcggcggcgtcatcgaaacgttggcgaaattcaccaccaaagacggcaaacgcggtctcgtgatggaatacttagacccgacggattggaaaaacttgggngggccgcccagcttcgaaacagttacccgagacgtgttcgatgaaagagagggaaaattcaccgcgcgagaaattctagccgtcgccgttaacgtcgccaaaggtatcaatcagctgcacaaaaatggcgtctgccatggcgacatctacgcgcacaacattctcatcgaccgcgacgaggattacccttcggcgaaactaggagatttcggtgccgcgatgtttttcgacgacgacgagaatcctcaattttcacaaatggttcgcgagaacgaagccagagcgttcgggtgtttactcgacgacatgttagtcaactacgacggcacgcgaggcggctcaaataccgttatgattcgcgagaacattgaagccggccaaacgcaatacgccggcaacaaaatatttatggaaccgaagagttaccgaccatcgacgcacctcgataacgacgaaggcaaaaccgaaggagaactcacgcctgcgcaaagcagagaagaacgagaacgacgacgagacgaacacttacaaaaaagaacccacgagcggcgcgaagcagataaaggactcgtctccataaacctcccagaagacggccacgaaaaaaccatcgcatctttgcgtcaactcgcggacgacctcatgcacccaacncgctcngttcgtcccaaaaatttcgaagcagtcgtcaaacgcg

SEQ ID NO: 776 - DNA, 4000 bp, Escherichia coli
  misc_feature (534)..(534): n is a, c, g, or t
  misc_feature (678)..(678): n is a, c, g, or t
  misc_feature (816)..(816): n is a, c, g, or t
  misc_feature (1107)..(1107): n is a, c, g, or t
  misc_feature (1158)..(1158): n is a, c, g, or t
  misc_feature (1209)..(1209): n is a, c, g, or t
  misc_feature (1498)..(1498): n is a, c, g, or t
  misc_feature (2342)..(2342): n is a, c, g, or t
  misc_feature (2522)..(2522): n is a, c, g, or t
  misc_feature (2525)..(2525): n is a, c, g, or t
  misc_feature (2747)..(2747): n is a, c, g, or t
  misc_feature (2807)..(2807): n is a, c, g, or t
  misc_feature (2855)..(2855): n is a, c, g, or t
  misc_feature (2873)..(2873): n is a, c, g, or t
  misc_feature (2935)..(2935): n is a, c, g, or t
  misc_feature (2954)..(2954): n is a, c, g, or t
  misc_feature (2972)..(2972): n is a, c, g, or t
  misc_feature (3002)..(3002): n is a, c, g, or t
  misc_feature (3008)..(3008): n is a, c, g, or t
  misc_feature (3014)..(3014): n is a, c, g, or t
  misc_feature (3016)..(3016): n is a, c, g, or t
  misc_feature (3153)..(3153): n is a, c, g, or t
  misc_feature (3170)..(3170): n is a, c, g, or t
  misc_feature (3185)..(3185): n is a, c, g, or t
  misc_feature (3188)..(3188): n is a, c, g, or t
  misc_feature (3209)..(3209): n is a, c, g, or t
  misc_feature (3214)..(3214): n is a, c, g, or t
  misc_feature (3230)..(3230): n is a, c, g, or t
  misc_feature (3233)..(3233): n is a, c, g, or t
  misc_feature (3236)..(3236): n is a, c, g, or t
  misc_feature (3243)..(3243): n is a, c, g, or t
  misc_feature (3246)..(3246): n is a, c, g, or t
  misc_feature (3250)..(3250): n is a, c, g, or t
  misc_feature (3252)..(3252): n is a, c, g, or t
  misc_feature (3257)..(3257): n is a, c, g, or t
  misc_feature (3284)..(3285): n is a, c, g, or t
  misc_feature (3287)..(3287): n is a, c, g, or t
  misc_feature (3290)..(3291): n is a, c, g, or t
  misc_feature (3294)..(3294): n is a, c, g, or t
  misc_feature (3297)..(3299): n is a, c, g, or t
  misc_feature (3301)..(3302): n is a, c, g, or t
  misc_feature (3304)..(3306): n is a, c, g, or t
  misc_feature (3311)..(3311): n is a, c, g, or t
  misc_feature (3313)..(3316): n is a, c, g, or t
  misc_feature (3319)..(3319): n is a, c, g, or t
  misc_feature (3321)..(3322): n is a, c, g, or t
  misc_feature (3325)..(3325): n is a, c, g, or t
  misc_feature (3327)..(3330): n is a, c, g, or t
  misc_feature (3333)..(3334): n is a, c, g, or t
  misc_feature (3337)..(3337): n is a, c, g, or t
  misc_feature (3341)..(3342): n is a, c, g, or t
  misc_feature (3344)..(3345): n is a, c, g, or t
  misc_feature (3347)..(3347): n is a, c, g, or t
  misc_feature (3350)..(3353): n is a, c, g, or t
  misc_feature (3355)..(3360): n is a, c, g, or t
  misc_feature (3362)..(3363): n is a, c, g, or t
  misc_feature (3366)..(3371): n is a, c, g, or t
  misc_feature (3373)..(3373): n is a, c, g, or t
  misc_feature (3375)..(3385): n is a, c, g, or t
  misc_feature (3387)..(3387): n is a, c, g, or t
  misc_feature (3389)..(3390): n is a, c, g, or t
  misc_feature (3392)..(3394): n is a, c, g, or t
  misc_feature (3396)..(3403): n is a, c, g, or t
  misc_feature (3405)..(3412): n is a, c, g, or t
  misc_feature (3414)..(3415): n is a, c, g, or t
  misc_feature (3417)..(3420): n is a, c, g, or t
  misc_feature (3422)..(3422): n is a, c, g, or t
  misc_feature (3424)..(3430): n is a, c, g, or t
  misc_feature (3432)..(3432): n is a, c, g, or t
  misc_feature (3436)..(3437): n is a, c, g, or t
  misc_feature (3439)..(3445): n is a, c, g, or t
  misc_feature (3447)..(3447): n is a, c, g, or t
  misc_feature (3449)..(3450): n is a, c, g, or t
  misc_feature (3452)..(3455): n is a, c, g, or t
  misc_feature (3457)..(3459): n is a, c, g, or t
  misc_feature (3462)..(3464): n is a, c, g, or t
  misc_feature (3466)..(3468): n is a, c, g, or t
  misc_feature (3470)..(3472): n is a, c, g, or t
  misc_feature (3474)..(3483): n is a, c, g, or t
  misc_feature (3485)..(3485): n is a, c, g, or t
  misc_feature (3487)..(3487): n is a, c, g, or t
  misc_feature (3490)..(3490): n is a, c, g, or t
  misc_feature (3495)..(3499): n is a, c, g, or t
  misc_feature (3502)..(3503): n is a, c, g, or t
  misc_feature (3505)..(3511): n is a, c, g, or t
  misc_feature (3513)..(3515): n is a, c, g, or t
  misc_feature (3517)..(3517): n is a, c, g, or t
  misc_feature (3519)..(3526): n is a, c, g, or t
  misc_feature (3529)..(3529): n is a, c, g, or t
  misc_feature (3531)..(3537): n is a, c, g, or t
  misc_feature (3539)..(3541): n is a, c, g, or t
  misc_feature (3543)..(3552): n is a, c, g, or t
  misc_feature (3554)..(3556): n is a, c, g, or t
  misc_feature (3558)..(3559): n is a, c, g, or t
  misc_feature (3562)..(3568): n is a, c, g, or t
  misc_feature (3571)..(3572): n is a, c, g, or t
  misc_feature (3574)..(3580): n is a, c, g, or t
  misc_feature (3582)..(3586): n is a, c, g, or t
  misc_feature (3588)..(3588): n is a, c, g, or t
  misc_feature (3590)..(3596): n is a, c, g, or t
  misc_feature (3598)..(3598): n is a, c, g, or t
  misc_feature (3601)..(3611): n is a, c, g, or t
  misc_feature (3613)..(3614): n is a, c, g, or t
  misc_feature (3616)..(3620): n is a, c, g, or t
  misc_feature (3622)..(3625): n is a, c, g, or t
  misc_feature (3628)..(3634): n is a, c, g, or t
  misc_feature (3636)..(3640): n is a, c, g, or t
  misc_feature (3642)..(3650): n is a, c, g, or t
  misc_feature (3652)..(3655): n is a, c, g, or t
  misc_feature (3658)..(3665): n is a, c, g, or t
  misc_feature (3668)..(3676): n is a, c, g, or t
  misc_feature (3678)..(3678): n is a, c, g, or t
  misc_feature (3681)..(3686): n is a, c, g, or t
  misc_feature (3688)..(3689): n is a, c, g, or t
  misc_feature (3692)..(3693): n is a, c, g, or t
  misc_feature (3695)..(3696): n is a, c, g, or t
  misc_feature (3698)..(3723): n is a, c, g, or t
  misc_feature (3726)..(3733): n is a, c, g, or t
  misc_feature (3735)..(3735): n is a, c, g, or t
  misc_feature (3737)..(3737): n is a, c, g, or t
  misc_feature (3740)..(3746): n is a, c, g, or t
  misc_feature (3748)..(3748): n is a, c, g, or t
  misc_feature (3750)..(3750): n is a, c, g, or t
  misc_feature (3752)..(3758): n is a, c, g, or t
  misc_feature (3761)..(3769): n is a, c, g, or t
  misc_feature (3773)..(3778): n is a, c, g, or t
  misc_feature (3780)..(3783): n is a, c, g, or t
  misc_feature (3785)..(3796): n is a, c, g, or t
  misc_feature (3800)..(3800): n is a, c, g, or t
  misc_feature (3802)..(3802): n is a, c, g, or t
  misc_feature (3804)..(3804): n is a, c, g, or t
  misc_feature (3806)..(3810): n is a, c, g, or t
  misc_feature (3812)..(3814): n is a, c, g, or t
  misc_feature (3816)..(3816): n is a, c, g, or t
  misc_feature (3818)..(3821): n is a, c, g, or t
  misc_feature (3823)..(3824): n is a, c, g, or t
  misc_feature (3826)..(3840): n is a, c, g, or t
  misc_feature (3843)..(3847): n is a, c, g, or t
  misc_feature (3849)..(3851): n is a, c, g, or t
  misc_feature (3853)..(3863): n is a, c, g, or t
  misc_feature (3869)..(3877): n is a, c, g, or t
  misc_feature (3879)..(3882): n is a, c, g, or t
  misc_feature (3884)..(3884): n is a, c, g, or t
  misc_feature (3887)..(3890): n is a, c, g, or t
  misc_feature (3892)..(3893): n is a, c, g, or t
  misc_feature (3895)..(3899): n is a, c, g, or t
  misc_feature (3901)..(3902): n is a, c, g, or t
  misc_feature (3904)..(3908): n is a, c, g, or t
  misc_feature (3910)..(3910): n is a, c, g, or t
  misc_feature (3912)..(3916): n is a, c, g, or t
  misc_feature (3918)..(3931): n is a, c, g, or t
  misc_feature (3933)..(3934): n is a, c, g, or t
  misc_feature (3937)..(3939): n is a, c, g, or t
  misc_feature (3941)..(3955): n is a, c, g, or t
  misc_feature (3957)..(3958): n is a, c, g, or t
  misc_feature (3961)..(3967): n is a, c, g, or t
  misc_feature (3969)..(3969): n is a, c, g, or t
  misc_feature (3974)..(3977): n is a, c, g, or t
  misc_feature (3980)..(3983): n is a, c, g, or t
  misc_feature (3985)..(3985): n is a, c, g, or t
  misc_feature (3987)..(3988): n is a, c, g, or t
  misc_feature (3990)..(3996): n is a, c, g, or t
  misc_feature (3998)..(4000): n is a, c, g, or t
tatcacacgcaataaatagctaaaaatgcatatatttcccctctggattaggtatactaatttagaggggaatagctatattttcaaaaagccatttttagtatatttctagcaagacatatttagcttgtgtgtgggtttgactcaagcgtgcgaggcggcaaaaccttccgctgaacctcctgtacgcttgagctaagcacacactttaaactcaaggggttgatactcgggccgatgctatatctatccatcattgtgctgatcctactcgccaccgtcattatggtgggcgttggtgatcggcttaatttgccttggcccgttatgatgacaatcctcggagtgggtgccctgctgctacctgacaggccgcaccttgagattgactccgaaattattcttccgatcttcctgcccccgcttctgtgggctattggcgtgaaattctcgtggggaactcttaaacgccgctggcgttcggtgcttctgtactcggttttgctgacgactgcctccgcccttgccgtcgcnggcagcgccatgtggtgggttcccgggatgaccgttgcgatggccctggctattggtgccgcaatcgccccgccggatccggttgctgttgaggctgtagccgagcctgttggcatcccccgccgcctgattggcactctgcanaccgagggtagttttaacgacgccatttctctggtgctttttcacgcggcaattcacgccattgaccaccatgagaaagtggacccgctgaaggttctgtgggatttctcctttggtgctgtggttgctgttgtggtnggctatatttttggttggcttggcggatatgtgcggcagaaggctcacgggactgtggcccgcagcgctgttactctcgttattccatttggtgtgtacctggttgctgaaagcgtgcatgcctcgggcgtgattgccgttgtgatcgccgctgtgcagtttacgagcaccaagtatctggtggctctggaagccgaagatcgcctctcaaatgcatcattttggcaggttattgagctgctgctgaccggtttggcgttcggacttatcggtctgcaggcgagcgaaatnatttatcaagccgactccacccggctgctgaacctgttctgctacggaacnctcatttctctggttgctatcgcggtgcgtctgctgtggttcgctgctgtntggatgctggggaacctgaagaaaacccctgtgcatgaaggggcgccgggcacattcgctgaggttattgtgatgacctggtcggggatgcgcgggctggtaaccctcattttggctctttctatccccactgttgcgggcaccgaggaacttcgtgccgattcgattgtggtggtcatttcggtgctgttcttcacgatggtgctgccaggccttaccctgccgttcgtggtgaatgttttgggtgttaaggcggatcattccgaagataacgcggtccccgagctgntggagctggcccagcacgctgcccttgaggtgctgcaggaggaggcccgcgcggcaagccctgagacataccgacgggtgaaagatatgtgcaccgcaatcacccgccgcgacgacattattgaaaacctgccggacgaatataagccgaagatgcaggcgctgaagaacagtcgcgaggagtacacgaggctgcgcgatgtggccatgactgccgcccagcacgaggtgctgtccgcacaagaccggtacgacccgaacgatgtgtaccgcgtgattcgtaagcttgatatcctctcgcaggccgataccatccgctccaataataattttgtgctcccggcgatgcccgctggtgcggtcgctttggaacgttaccggcttctgcgggaacatttgggcacctcatccattccgttggttgagaatgcgccgtcgtcaccactggtgacgagcgtggattcccgcgagaaaaactaggtggggaaccggccagaaccgcccccggcgtcttttgggctacgcccacggaaatattgaggcgtcaggggcgatttaagcattcagaatcacatagaatgagagagtacggtatgtcaccgagtaccgttgtagccccgctgtgaagtttgtggaaagtagacatggattttaagaacctctcacccgcgtaccttagctcacttggcgccgtcttggtgagtgcactcatgattggttccggcgtctcctggatgctgtgggtggggtggcttctgctgttgctggctgtggggctgaatgtttttgcgcacctggtgacggtttcaaagatgaagggtgagccagcacccgcgatgctgacnaaccttgagcagcgttttgaggcgatgcgggagaaagccgccgaacgcagcgaagagccgattgagggggagcccgattttgacggtgacccgctggattcggaagccacggttgagctgggctctgagactccaaagaagaaaagcgttttgccgtcgaagattgaggattctcagtcntcntcccgccccactgtgcgttaggggagcggcgtgaacactagattcctgatttctcccgcatatctgctctctattgcattgctggttgctggtgcggttctgagcggcagcaggtatatgcttatcggctggatgctgttcctagttggtgtgttcctgaacgccatgaccctggtgattttgacaaatcgtgagcagctgcgccagattcgccaggcgcancagcatcagaaggagcaggcagagcgtgagcaaacgggggagagcccgcgtgaaccttcngctaaagaacttgatgttgatccagagtctcagaaagaagatgcggcngagcaggataatacaccncagcaggggagtgcgactgagtctgaacctgcatctgatgttagcgccgtagcggatgagcngcaggataccaacgccgcngatcatgaagagacctcnccacaggaaagcactgctgcggcacaggancaggcngatagncnaactgaccgtgcggctgcggcagcgcagagaacagcaggtaatgctcagtcagcacagaatatgagacggttaaagagctcccgcaaatcccgtaaaccccggaagaaatcgagacggtagcaggggagtagtcagnaaaaccccttatcaaancacatatattctttntantgaattaaaaaattaaagaangaaanggtgggtgagatgagngtngtngcttatntcncccncngttgnctgtgtgctggcggcggctctaaaaanngntgnnttnctnnngnngnnngatcnannnnccngnnggngnnnnganngangggnngnngngcnnnncnnnnnntnnaannnnnnangnnnnnnnnnnngngnntnnntnnnnnnnntnnnnnnnntnntnnnncngnnnnnnntnctcnntnnnnnnncncnngnnnntnnntgnnntnnncnnnannnnnnnnnnancncgngtttnnnnncanncnnnnnnngnnncntnnnnnnnntcnannnnnnngnnnannnnnnnnnncnnngnntannnnnnncanntnnnnnnnannnnnantnnnnnnngnatnnnnnnnnnnnanntnnnnnannnngcnnnnnnncnnnnngnnnnnnnnncnnnngcnnnnnnnntcnnnnnnnnngnaannnnnncnntgnnanncnnnnnnnnnnnnnnnnnnnnnnnnnnacnnnnnnnntncngannnnnnncncnannnnnnncgnnnnnnnnncctnnnnnngnnnnannnnnnnnnnnnctancncntnnnnncnnncnannnncnntnnnnnnnnnnnnnnnttnnnnngnnncnnnnnnnnnnngcaccnnnnnnnnngnnnntnaannnncnngnnnnntnnannnnnancnnnnngnnnnnnnnnnnnnnanncgnnnannnnnnnnnnnnnnncnnatnnnnnnncnactcnnnnatnnnnananngnnnnnnnannn

SEQ ID NO: 777 - DNA, 4000 bp, Escherichia coli
  misc_feature (1)..(3): n is a, c, g, or t
  misc_feature (7)..(7): n is a, c, g, or t
  misc_feature (9)..(9): n is a, c, g, or t
  misc_feature (11)..(13): n is a, c, g, or t
  misc_feature (20)..(21): n is a, c, g, or t
  misc_feature (24)..(28): n is a, c, g, or t
  misc_feature (30)..(32): n is a, c, g, or t
  misc_feature (35)..(35): n is a, c, g, or t
  misc_feature (38)..(38): n is a, c, g, or t
  misc_feature (40)..(44): n is a, c, g, or t
  misc_feature (46)..(46): n is a, c, g, or t
  misc_feature (48)..(53): n is a, c, g, or t
  misc_feature (57)..(61): n is a, c, g, or t
  misc_feature (65)..(65): n is a, c, g, or t
  misc_feature (67)..(69): n is a, c, g, or t
  misc_feature (71)..(72): n is a, c, g, or t
  misc_feature (75)..(75): n is a, c, g, or t
  misc_feature (77)..(77): n is a, c, g, or t
  misc_feature (80)..(95): n is a, c, g, or t
  misc_feature (97)..(99): n is a, c, g, or t
  misc_feature (102)..(102): n is a, c, g, or t
  misc_feature (104)..(110): n is a, c, g, or t
  misc_feature (117)..(118): n is a, c, g, or t
  misc_feature (120)..(120): n is a, c, g, or t
  misc_feature (122)..(124): n is a, c, g, or t
  misc_feature (127)..(128): n is a, c, g, or t
  misc_feature (130)..(134): n is a, c, g, or t
  misc_feature (137)..(140): n is a, c, g, or t
  misc_feature (142)..(143): n is a, c, g, or t
  misc_feature (145)..(149): n is a, c, g, or t
  misc_feature (152)..(160): n is a, c, g, or t
  misc_feature (162)..(162): n is a, c, g, or t
  misc_feature (166)..(169): n is a, c, g, or t
  misc_feature (171)..(172): n is a, c, g, or t
  misc_feature (174)..(175): n is a, c, g, or t
  misc_feature (177)..(179): n is a, c, g, or t
  misc_feature (187)..(187): n is a, c, g, or t
  misc_feature (189)..(190): n is a, c, g, or t
  misc_feature (198)..(198): n is a, c, g, or t
  misc_feature (200)..(200): n is a, c, g, or t
  misc_feature (202)..(202): n is a, c, g, or t
  misc_feature (204)..(205): n is a, c, g, or t
  misc_feature (207)..(207): n is a, c, g, or t
  misc_feature (209)..(212): n is a, c, g, or t
  misc_feature (214)..(216): n is a, c, g, or t
  misc_feature (218)..(235): n is a, c, g, or t
  misc_feature (238)..(240): n is a, c, g, or t
  misc_feature (243)..(243): n is a, c, g, or t
  misc_feature (245)..(246): n is a, c, g, or t
  misc_feature (249)..(252): n is a, c, g, or t
  misc_feature (254)..(254): n is a, c, g, or t
  misc_feature (257)..(260): n is a, c, g, or t
  misc_feature (262)..(270): n is a, c, g, or t
  misc_feature (274)..(277): n is a, c, g, or t
  misc_feature (280)..(282): n is a, c, g, or t
  misc_feature (284)..(285): n is a, c, g, or t
  misc_feature (288)..(290): n is a, c, g, or t
  misc_feature (292)..(293): n is a, c, g, or t
  misc_feature (297)..(300): n is a, c, g, or t
  misc_feature (302)..(306): n is a, c, g, or t
  misc_feature (308)..(312): n is a, c, g, or t
  misc_feature (316)..(317): n is a, c, g, or t
  misc_feature (319)..(320): n is a, c, g, or t
  misc_feature (322)..(325): n is a, c, g, or t
  misc_feature (328)..(331): n is a, c, g, or t
  misc_feature (333)..(333): n is a, c, g, or t
  misc_feature (338)..(342): n is a, c, g, or t
  misc_feature (345)..(346): n is a, c, g, or t
  misc_feature (348)..(350): n is a, c, g, or t
  misc_feature (352)..(352): n is a, c, g, or t
  misc_feature (354)..(357): n is a, c, g, or t
  misc_feature (359)..(363): n is a, c, g, or t
  misc_feature (365)..(365): n is a, c, g, or t
  misc_feature (367)..(370): n is a, c, g, or t
  misc_feature (372)..(374): n is a, c, g, or t
  misc_feature (376)..(377): n is a, c, g, or t
  misc_feature (380)..(380): n is a, c, g, or t
  misc_feature (382)..(383): n is a, c, g, or t
  misc_feature (386)..(391): n is a, c, g, or t
  misc_feature (393)..(397): n is a, c, g, or t
  misc_feature (399)..(400): n is a, c, g, or t
  misc_feature (403)..(403): n is a, c, g, or t
  misc_feature (405)..(408): n is a, c, g, or t
  misc_feature (410)..(411): n is a, c, g, or t
  misc_feature (413)..(414): n is a, c, g, or t
  misc_feature (420)..(424): n is a, c, g, or t
  misc_feature (426)..(426): n is a, c, g, or t
  misc_feature (429)..(433): n is a, c, g, or t
  misc_feature (439)..(444): n is a, c, g, or t
  misc_feature (447)..(452): n is a, c, g, or t
  misc_feature (454)..(459): n is a, c, g, or t
  misc_feature (462)..(467): n is a, c, g, or t
  misc_feature (469)..(472): n is a, c, g, or t
  misc_feature (475)..(476): n is a, c, g, or t
  misc_feature (478)..(478): n is a, c, g, or t
  misc_feature (480)..(487): n is a, c, g, or t
  misc_feature (491)..(494): n is a, c, g, or t
  misc_feature (496)..(496): n is a, c, g, or t
  misc_feature (498)..(502): n is a, c, g, or t
  misc_feature (505)..(505): n is a, c, g, or t
  misc_feature (508)..(508): n is a, c, g, or t
  misc_feature (510)..(511): n is a, c, g, or t
  misc_feature (513)..(516): n is a, c, g, or t
  misc_feature (520)..(521): n is a, c, g, or t
  misc_feature (523)..(525): n is a, c, g, or t
  misc_feature (527)..(531): n is a, c, g, or t
  misc_feature (533)..(535): n is a, c, g, or t
  misc_feature (537)..(538): n is a, c, g, or t
  misc_feature (540)..(540): n is a, c, g, or t
  misc_feature (542)..(544): n is a, c, g, or t
  misc_feature (546)..(550): n is a, c, g, or t
  misc_feature (553)..(553): n is a, c, g, or t
  misc_feature (555)..(556): n is a, c, g, or t
  misc_feature (559)..(564): n is a, c, g, or t
  misc_feature (569)..(571): n is a, c, g, or t
  misc_feature (576)..(577): n is a, c, g, or t
  misc_feature (583)..(596): n is a, c, g, or t
  misc_feature (598)..(603): n is a, c, g, or t
  misc_feature (605)..(605): n is a, c, g, or t
  misc_feature (607)..(616): n is a, c, g, or t
  misc_feature (618)..(619): n is a, c, g, or t
  misc_feature (621)..(621): n is a, c, g, or t
  misc_feature (623)..(623): n is a, c, g, or t
  misc_feature (625)..(626): n is a, c, g, or t
  misc_feature (628)..(634): n is a, c, g, or t
  misc_feature (636)..(638): n is a, c, g, or t
  misc_feature (641)..(642): n is a, c, g, or t
  misc_feature (644)..(646): n is a, c, g, or t
  misc_feature (648)..(649): n is a, c, g, or t
  misc_feature (651)..(652): n is a, c, g, or t
  misc_feature (654)..(658): n is a, c, g, or t
  misc_feature (660)..(661): n is a, c, g, or t
  misc_feature (664)..(667): n is a, c, g, or t
  misc_feature (669)..(676): n is a, c, g, or t
  misc_feature (680)..(681): n is a, c, g, or t
  misc_feature (684)..(685): n is a, c, g, or t
  misc_feature (687)..(687): n is a, c, g, or t
  misc_feature (689)..(690): n is a, c, g, or t
  misc_feature (692)..(693): n is a, c, g, or t
  misc_feature (695)..(696): n is a, c, g, or t
  misc_feature (699)..(701): n is a, c, g, or t
  misc_feature (703)..(704): n is a, c, g, or t
  misc_feature (707)..(708): n is a, c, g, or t
  misc_feature (711)..(716): n is a, c, g, or t
  misc_feature (718)..(724): n is a, c, g, or t
  misc_feature (726)..(728): n is a, c, g, or t
  misc_feature (730)..(730): n is a, c, g, or t
  misc_feature (732)..(744): n is a, c, g, or t
  misc_feature (746)..(748): n is a, c, g, or t
  misc_feature (750)..(750): n is a, c, g, or t
  misc_feature (752)..(758): n is a, c, g, or t
  misc_feature (760)..(767): n is a, c, g, or t
  misc_feature (769)..(773): n is a, c, g, or t
  misc_feature (775)..(782): n is a, c, g, or t
  misc_feature (785)..(786): n is a, c, g, or t
  misc_feature (788)..(796): n is a, c, g, or t
  misc_feature (798)..(799): n is a, c, g, or t
  misc_feature (801)..(816): n is a, c, g, or t
  misc_feature (819)..(827): n is a, c, g, or t
  misc_feature (830)..(835): n is a, c, g, or t
  misc_feature (837)..(838): n is a, c, g, or t
  misc_feature (840)..(851): n is a, c, g, or t
  misc_feature (853)..(858): n is a, c, g, or t
  misc_feature (860)..(866): n is a, c, g, or t
  misc_feature (868)..(869): n is a, c, g, or t
  misc_feature (871)..(871): n is a, c, g, or t
  misc_feature (873)..(882): n is a, c, g, or t
  misc_feature (884)..(887): n is a, c, g, or t
  misc_feature (889)..(889): n is a, c, g, or t
  misc_feature (891)..(894): n is a, c, g, or t
  misc_feature (898)..(901): n is a, c, g, or t
  misc_feature (904)..(906): n is a, c, g, or t
  misc_feature (908)..(909): n is a, c, g, or t
  misc_feature (911)..(916): n is a, c, g, or t
  misc_feature (918)..(920): n is a, c, g, or t
  misc_feature (922)..(926): n is a, c, g, or t
  misc_feature (928)..(935): n is a, c, g, or t
  misc_feature (938)..(947): n is a, c, g, or t
  misc_feature (949)..(950): n is a, c, g, or t
  misc_feature (956)..(958): n is a, c, g, or t
  misc_feature (961)..(961): n is a, c, g, or t
  misc_feature (963)..(966): n is a, c, g, or t
  misc_feature (968)..(977): n is a, c, g, or t
  misc_feature (979)..(982): n is a, c, g, or t
  misc_feature (985)..(985): n is a, c, g, or t
  misc_feature (987)..(990): n is a, c, g, or t
  misc_feature (992)..(994): n is a, c, g, or t
  misc_feature (996)..(997): n is a, c, g, or t
  misc_feature (999)..(1000): n is a, c, g, or t
  misc_feature (1002)..(1003): n is a, c, g, or t
  misc_feature (1006)..(1024): n is a, c, g, or t
  misc_feature (1028)..(1031): n is a, c, g, or t
  misc_feature (1034)..(1034): n is a, c, g, or t
  misc_feature (1036)..(1036): n is a, c, g, or t
  misc_feature (1038)..(1038): n is a, c, g, or t
  misc_feature (1040)..(1042): n is a, c, g, or t
  misc_feature (1048)..(1048): n is a, c, g, or t
  misc_feature (1051)..(1055): n is a, c, g, or t
  misc_feature (1057)..(1058): n is a, c, g, or t
  misc_feature (1061)..(1062): n is a, c, g, or t
  misc_feature (1064)..(1064): n is a, c, g, or t
  misc_feature (1067)..(1069): n is a, c, g, or t
  misc_feature (1071)..(1071): n is a, c, g, or t
  misc_feature (1073)..(1073): n is a, c, g, or t
  misc_feature (1076)..(1078): n is a, c, g, or t
  misc_feature (1080)..(1081): n is a, c, g, or t
  misc_feature (1083)..(1093): n is a, c, g, or t
  misc_feature (1095)..(1095): n is a, c, g, or t
  misc_feature (1097)..(1097): n is a, c, g, or t
  misc_feature (1099)..(1108): n is a, c, g, or t
  misc_feature (1111)..(1111): n is a, c, g, or t
  misc_feature (1113)..(1115): n is a, c, g, or t
  misc_feature (1117)..(1118): n is a, c, g, or t
  misc_feature (1120)..(1121): n is a, c, g, or t
  misc_feature (1123)..(1133): n is a, c, g, or t
  misc_feature (1135)..(1139): n is a, c, g, or t
  misc_feature (1145)..(1146): n is a, c, g, or t
  misc_feature (1148)..(1149): n is a, c, g, or t
  misc_feature (1151)..(1155): n is a, c, g, or t
  misc_feature (1159)..(1160): n is a, c, g, or t
  misc_feature (1162)..(1170): n is a, c, g, or t
  misc_feature (1172)..(1172): n is a, c, g, or t
  misc_feature (1176)..(1176): n is a, c, g, or t
  misc_feature (1178)..(1195): n is a, c, g, or t
  misc_feature (1198)..(1200): n is a, c, g, or t
  misc_feature (1202)..(1205): n is a, c, g, or t
  misc_feature (1207)..(1207): n is a, c, g, or t
  misc_feature (1209)..(1211): n is a, c, g, or t
  misc_feature (1213)..(1215): n is a, c, g, or t
  misc_feature (1218)..(1225): n is a, c, g, or t
  misc_feature (1227)..(1227): n is a, c, g, or t
  misc_feature (1234)..(1238): n is a, c, g, or t
  misc_feature (1242)..(1243): n is a, c, g, or t
  misc_feature (1245)..(1249): n is a, c, g, or t
  misc_feature (1251)..(1252): n is a, c, g, or t
  misc_feature (1254)..(1254): n is a, c, g, or t
  misc_feature (1256)..(1256): n is a, c, g, or t
  misc_feature (1260)..(1266): n is a, c, g, or t
  misc_feature (1268)..(1272): n is a, c, g, or t
  misc_feature (1274)..(1274): n is a, c, g, or t
  misc_feature (1277)..(1282): n is a, c, g, or t
  misc_feature (1284)..(1291): n is a, c, g, or t
  misc_feature (1293)..(1295): n is a, c, g, or t
  misc_feature (1297)..(1298): n is a, c, g, or t
  misc_feature (1302)..(1310): n is a, c, g, or t
  misc_feature (1313)..(1320): n is a, c, g, or t
  misc_feature (1322)..(1322): n is a, c, g, or t
  misc_feature (1325)..(1325): n is a, c, g, or t
  misc_feature (1327)..(1332): n is a, c, g, or t
  misc_feature (1334)..(1334): n is a, c, g, or t
  misc_feature (1336)..(1337): n is a, c, g, or t
  misc_feature (1339)..(1347): n is a, c, g, or t
  misc_feature (1349)..(1352): n is a, c, g, or t
  misc_feature (1354)..(1355): n is a, c, g, or t
  misc_feature (1357)..(1367): n is a, c, g, or t
  misc_feature (1370)..(1383): n is a, c, g, or t
  misc_feature (1385)..(1392): n is a, c, g, or t
  misc_feature (1395)..(1400): n is a, c, g, or t
  misc_feature (1403)..(1414): n is a, c, g, or t
  misc_feature (1416)..(1417): n is a, c, g, or t
  misc_feature (1419)..(1431): n is a, c, g, or t
  misc_feature (1433)..(1445): n is a, c, g, or t
  misc_feature (1447)..(1450): n is a, c, g, or t
  misc_feature (1452)..(1462): n is a, c, g, or t
  misc_feature (1464)..(1475): n is a, c, g, or t
  misc_feature (1477)..(1477): n is a, c, g, or t
  misc_feature (1479)..(1479): n is a, c, g, or t
  misc_feature (1481)..(1485): n is a, c, g, or t
  misc_feature (1487)..(1494): n is a, c, g, or t
  misc_feature (1496)..(1496): n is a, c, g, or t
  misc_feature (1499)..(1499): n is a, c, g, or t
  misc_feature (1501)..(1502): n is a, c, g, or t
  misc_feature (1504)..(1511): n is a, c, g, or t
  misc_feature (1513)..(1513): n is a, c, g, or t
  misc_feature (1515)..(1516): n is a, c, g, or t
  misc_feature (1519)..(1522): n is a, c, g, or t
  misc_feature (1524)..(1529): n is a, c, g, or t
  misc_feature (1532)..(1534): n is a, c, g, or t
  misc_feature (1536)..(1537): n is a, c, g, or t
  misc_feature (1541)..(1543): n is a, c, g, or t
  misc_feature (1545)..(1547): n is a, c, g, or t
  misc_feature (1549)..(1551): n is a, c, g, or t
  misc_feature (1553)..(1557): n is a, c, g, or t
  misc_feature (1559)..(1560): n is a, c, g, or t
  misc_feature (1562)..(1562): n is a, c, g, or t
  misc_feature (1565)..(1576): n is a, c, g, or t
  misc_feature (1578)..(1579): n is a, c, g, or t
  misc_feature (1584)..(1587): n is a, c, g, or t
  misc_feature (1589)..(1589): n is a, c, g, or t
  misc_feature (1591)..(1594): n is a, c, g, or t
  misc_feature (1596)..(1599): n is a, c, g, or t
  misc_feature (1601)..(1605): n is a, c, g, or t
  misc_feature (1608)..(1609): n is a, c, g, or t
  misc_feature (1611)..(1611): n is a, c, g, or t
  misc_feature (1613)..(1613): n is a, c, g, or t
  misc_feature (1615)..(1616): n is a, c, g, or t
  misc_feature (1618)..(1622): n is a, c, g, or t
  misc_feature (1625)..(1625): n is a, c, g, or t
  misc_feature (1627)..(1627): n is a, c, g, or t
  misc_feature (1629)..(1632): n is a, c, g, or t
  misc_feature (1634)..(1636): n is a, c, g, or t
  misc_feature (1638)..(1638): n is a, c, g, or t
  misc_feature (1640)..(1643): n is a, c, g, or t
  misc_feature (1645)..(1647): n is a, c, g, or t
  misc_feature (1651)..(1654): n is a, c, g, or t
  misc_feature (1656)..(1657): n is a, c, g, or t
  misc_feature (1661)..(1662): n is a, c, g, or t
  misc_feature (1664)..(1666): n is a, c, g, or t
  misc_feature (1670)..(1670): n is a, c, g, or t
  misc_feature (1672)..(1672): n is a, c, g, or t
  misc_feature (1674)..(1675): n is a, c, g, or t
  misc_feature (1677)..(1680): n is a, c, g, or t
  misc_feature (1682)..(1687): n is a, c, g, or t
  misc_feature (1693)..(1696): n is a, c, g, or t
  misc_feature (1698)..(1700): n is a, c, g, or t
  misc_feature (1705)..(1707): n is a, c, g, or t
  misc_feature (1709)..(1709): n is a, c, g, or t
  misc_feature (1711)..(1712): n is a, c, g, or t
  misc_feature (1714)..(1714): n is a, c, g, or t
  misc_feature (1721)..(1721): n is a, c, g, or t
  misc_feature (1725)..(1725): n is a, c, g, or t
  misc_feature (1735)..(1735): n is a, c, g, or t
  misc_feature (1743)..(1745): n is a, c, g, or t
  misc_feature (1747)..(1747): n is a, c, g, or t
  misc_feature (1749)..(1749): n is a, c, g, or t
  misc_feature (1753)..(1753): n is a, c, g, or t
  misc_feature (1758)..(1758): n is a, c, g, or t
  misc_feature (1761)..(1763): n is a, c, g, or t
  misc_feature (1765)..(1766): n is a, c, g, or t
  misc_feature (1769)..(1770): n is a, c, g, or t
  misc_feature (1775)..(1775): n is a, c, g, or t
  misc_feature (1778)..(1779): n is a, c, g, or t
  misc_feature (1781)..(1781): n is a, c, g, or t
  misc_feature (1783)..(1783): n is a, c, g, or t
  misc_feature (1786)..(1788): n is a, c, g, or t
  misc_feature (1793)..(1793): n is a, c, g, or t
  misc_feature (1797)..(1813): n is a, c, g, or t
  misc_feature (1815)..(1815): n is a, c, g, or t
  misc_feature (1817)..(1833): n is a, c, g, or t
  misc_feature (1835)..(1841): n is a, c, g, or t
  misc_feature (1843)..(1845): n is a, c, g, or t
  misc_feature (1847)..(1850): n is a, c, g, or t
  misc_feature (1852)..(1856): n is a, c, g, or t
  misc_feature (1858)..(1860): n is a, c, g, or t
  misc_feature (1863)..(1872): n is a, c, g, or t
  misc_feature (1874)..(1874): n is a, c, g, or t
  misc_feature (1878)..(1878): n is a, c, g, or t
  misc_feature (1881)..(1881): n is a, c, g, or t
  misc_feature (1957)..(1958): n is a, c, g, or t
  misc_feature (1961)..(1961): n is a, c, g, or t
  misc_feature (1964)..(1965): n is a, c, g, or t
  misc_feature (1967)..(1976): n is a, c, g, or t
  misc_feature (1978)..(1978): n is a, c, g, or t
  misc_feature (1981)..(1981): n is a, c, g, or t
  misc_feature (1983)..(1983): n is a, c, g, or t
  misc_feature (1985)..(1989): n is a, c, g, or t
  misc_feature (1991)..(1991): n is a, c, g, or t
  misc_feature (1995)..(1995): n is a, c, g, or t
  misc_feature (2000)..(2000): n is a, c, g, or t
  misc_feature (2002)..(2004): n is a, c, g, or t
  misc_feature (2007)..(2008): n is a, c, g, or t
  misc_feature (2010)..(2015): n is a, c, g, or t
  misc_feature (2018)..(2021): n is a, c, g, or t
  misc_feature (2025)..(2029): n is a, c, g, or t
  misc_feature (2033)..(2040): n is a, c, g, or t
  misc_feature (2044)..(2046): n is a, c, g, or t
  misc_feature (2053)..(2058): n is a, c, g, or t
  misc_feature (2062)..(2068): n is a, c, g, or t
  misc_feature (2070)..(2073): n is a, c, g, or t
  misc_feature (2418)..(2418): n is a, c, g, or t
  misc_feature (2604)..(2604): n is a, c, g, or t
  misc_feature (2992)..(2992): n is a, c, g, or t
  misc_feature (3282)..(3282): n is a, c, g, or t
nnnaaangnannngtttttnngtnnnnnannnganaanannnnntnannnnnnaaannnnnaacnannnannaangnaannnnnnnnnnnnnnnnannnttnannnnnnnaaggaannanannnaanngnnnnnttnnnncnngnnnnngannnnnnnnngngggnnnncnnanncnnncaagccgngnnggatttgntngntnncntnnnnannnannnnnnnnnnnnnnnnnnggnnnggnanntgnnnncnatnnnncnnnnnnnnngggnnnnccnnnannaannngnnttannnncnnnnnannnnngggnngnnannnnttnnnntnaaaannnnnggnngnnnangnnnngnnnnnanannnntnnntnnttngnnagnnnnnngnnnnncnnggngnnnntnntnngggggnnnnngnggnnnnncccccnnnnnnggnnnnnnannnnnnccnnnnnncnnnnggnngnannnnnnnngaannnngnannnnnggnggnanncnnnnccanncnnncnnnnngnnngnngncnnncnnnnnggntnnaannnnnntttannnagggnnaaaccnnnnnnnnnnnnnntnnnnnnangnnnnnnnnnnannancncnngnnnnnnncnnnccnncnnncnngnnannnnngnnggnnnnannnnnnnncggnnttnntngnntnnannggnnngnnggnnggnnnnnnannnnnnngnnnantnnnnnnnnnnnnntnnngnannnnnnntnnnnnnnntnnnnntnnnnnnnnttnnannnnnnnnnannannnnnnnnnnnnnnnnatnnnnnnnnnttnnnnnnannannnnnnnnnnnngnnnnnnannnnnnnannantnnnnnnnnnngnnnnangnnnngggnnnnaannngnntnnnnnncnnngnnnnncnnnnnnnnaannnnnnnnnntnntttttnnnttntnnnnannnnnnnnnnannnnaantnnnnannnanncnncnnggnnnnnnnnnnnnnnnnnnnaaannnnaangnantnnngggggnccnnnnnannggnngnttnnntngnttnnntnnannnnnnnnnnngnancnnnnnnnnnnttnannngnnanngnnnnnnnnnnnannnnngttttnntnngnnnnntttnnannnnnnnnntngttntnnnnnnnnnnnnnnnnnnggnnntnnnntnannncnnnaannnnnnnnanccctgtnnnnngttnncnnnnntnngntngggnnnnnnntnnnnntnccnnnnnnannnnnnnngnnngnngggnnnnnnnnnaannnnnnnngnccntnnnnnntngnncnnnnnnnnnannnnanngnnnnnnnnnnnggnnnnnnnnnnnnnnannnnnnnnaannnnnnaannnnnnnnnnnntnngnnnnnnnnnnnnnannnnnnnnnnnnnannnngnnnnnnnnnnnannnnnnnnnnnncntngnnnnntnnnnnnnntnccngnncnnnnnnnnancnnccnnnnannnnnngannntnngggnnncnnnannngnnnnncnntnaannnnnnnnnnnngnnaaaannnntnannnngnnnnannnnnaannangnanncnnnnnggnangnnnngnnngnannnntnnntttnnnntnntttnnannnaaantnanntnnnntnnnnnntttttnnnntnnnttttnnntntnntnttttttngatnttaaaaaccnttaaaatnnntntnaggnattantannnannaannttttntannantnttnnntttantaannnnnnnnnnnnnnnnngntnnnnnnnnnnnnnnnnnannnnnnngnnngnnnntnnnnncnnnccnnnnnnnnnnantganaanggggaattagctcagctggctagagcgcctgccttgcacgcaggaggtcaagggttcgactcccttattctccacnnttnatnnannnnnnnnnntnttnantnnnnnantttnaattnannnaannannnnnnttnnnntttnnnnnaaannnnnnnnaaannnaaaaccnnnnnntttnnnnnnncnnnnaaaaaataggaaagaaatcgttaagggcgtatggcggatgcctaggctttcagaggcgaagaaggacgtggtaagctgcgaaaagctacggggattggcacacacgaaatgatccgtagatatccgaatggggcaacccagtaagttgaagacttactacaccgtaaggtgagcgaacccggagaactgaaacatctaagtacccggaggaaaagaaatcgaagagattccgtaagtagtggcgagcgaaagcggattagcccaaaagtttatatatgtttagtggaatgttttggaaagaacaatcatagaaggtgaaaatcctgtacacgaaaggcatatatngatgaagaaagagtagggcgggacacgtgaaatcctgtctgaatatggggggaccatcctccaaggctaaatactcctgaaagaccgatagtgaacaagtactgtgaaggaaaggtgaaaagcacttcgaatagaagggtgaaagagaacctgaaaccgtacgcctacaagcggtcggagcagttntatactgtgacggcgtgccttttgcataatgagcctacgagttaattttactagcgaggttaaggtattaagtaccggagccggagcgaaagcgagtctgaatagggcgaatagttagtgggattagacgcgaaaccttgtgatctacccatgggcaggttgaagcactggtaacacagtgtggaggaccgaaccggttgacgttgaaaagtcttcggatgacctgtgggtaggggtgaaaggccaatcaaactgggagatagctcgtactccccgaaatgcatttaggtgcagcgttgatttagtttattagaggtagagctactgattggatgcgggggtttcaccgcctaccaattcctgacaaactccgaatgctaataaatantgatcagcagtgagggcatgggtgctaaggtccatgtccgagagggaaagaacccagaccaacagctaaggtccctaaatatatgctaagttgaaacaacgcggttgaactgcattgacagctaggatgttggcttggaagcagccattcatttaaagagtgcgtaacagctcactagtcgagcggttcggcatggataataatcgggcataagcatattaccgaagctatggcaacgaaagttgggtaggggagcattctatcggcgcagaagcatcactgtgaggtgntgtggagcttatagaaaagaaaatgtaggcataagtaacgataaagcaggcgagaaacctgctcaccgaaagactaagggttcctcagccatgctaatcagctgagggttagtcgggacctaacgcgaacccgagaggggaagtggatggacaatgggttaatattcccatacttgctcacgaataaaggggacggttcagctagactactggagactgacggaatagtcaagacctagcctacgggcgaagttgttgtagagtaactggatccaagaaaagccgaagtgaagcaacccgtaccataaaccgacacaggtagtcgaggagagaatcctaaggtgctcgagtgagtcgtggctaaggaactaggcaaaatagtctcgtaacttcggaataagagacgccaacagcgatgttggccgcagtgaagaggcccaggcgactgtttatcaaaaacacaggactctgctaaatcgaaagatgctgtatagggtctgacacctgcccggtgctggaaggttaaggaaggtgcttagcgtaagcgaaggcattgactgaagccccagtaaacggcggccgtaactataacggtcctaaggtagcgaaattccttgtcgggtaagttccgacctgcacgaatggtgtaacgatctgggcactgtctcagccacgagctcggtgaaattgtagtatcggtgaagatgccgattacccg

SEQ ID NO: 778 - DNA, 4000 bp, Escherichia coli
  misc_feature (132)..(132): n is a, c, g, or t
  misc_feature (582)..(582): n is a, c, g, or t
  misc_feature (588)..(588): n is a, c, g, or t
  misc_feature (1563)..(1563): n is a, c, g, or t
  misc_feature (1976)..(1976): n is a, c, g, or t
  misc_feature (1981)..(1981): n is a, c, g, or t
  misc_feature (1990)..(1990): n is a, c, g, or t
  misc_feature (2005)..(2006): n is a, c, g, or t
  misc_feature (2010)..(2010): n is a, c, g, or t
  misc_feature (2014)..(2027): n is a, c, g, or t
  misc_feature (2029)..(2030): n is a, c, g, or t
  misc_feature (2034)..(2034): n is a, c, g, or t
  misc_feature (2037)..(2038): n is a, c, g, or t
  misc_feature (2040)..(2047): n is a, c, g, or t
  misc_feature (2049)..(2054): n is a, c, g, or t
  misc_feature (2057)..(2058): n is a, c, g, or t
  misc_feature (2122)..(2122): n is a, c, g, or t
  misc_feature (3265)..(3265): n is a, c, g, or t
  misc_feature (3435)..(3435): n is a, c, g, or t
  misc_feature (3504)..(3504): n is a, c, g, or t
aggtgagtgttatcaggtacctcaaagctaatgccctcaggtgcaacatagagaactgggtgagaataaccaagggaaaggtcaagatccttgcccttaagtgctacacggtaaccaacgccggtgagctcnagcttcttctcgaagccctcagagacaccaacaaccatgttgtggataagggtacggacaagaccctgctgagcattggactcagtggactcgtcaacgcgagtaacaagaatctcctcgccctcctgagcgatagcaaccagctcagagaaagtacgagtcagctcgcccttagaacccttaacggtaacggtggtgttatcaactgtcacagtgactccagcaggaatctggacaggcttcttaccaatacgagacacggctgtctcctttcattcctgtcagatttaccaaacgtaagcgatgacctcgccgccaacgccgttcttacgagcgtcgcggtcgcacatcatgcccttagaagtggaaaccactgcagtaccaagaccaccaagaacgcgtggaagcttctcagcggtggagtaaatgcgcagaccaggcttggaaatncgacgnatgccgcggataaccttagcgcgcttcttaccatacttaagggtgatgtgaagagtcttctgaggcttagtatcctcaacggtgtaaccctcgacatagccctcttcggtgatgacgcgagcaatctcaacgagcaccttgctcgatggcatggatacggaatccttgccagctgagtttgcgttacgaatacgcgtcagcatgtctgaaatgggatcggtaattttcatttgatccttctccttcgttaatgatgaaactgcgtgtctggttcatctacacccgtggcgcagatgccttgacgccagagccctgagtcctaccagcttgccttgcggacaccaggaagctcgcccttgctcgctagctcacggaagcacacacggcacagaccaaacttgcggtaaacggagtggggacgtccacaacgctggcaacggttctgtgtgcgcgtagagtacttcggctcacgcgaggctttgacgatcatcgaagtcttagccacaaatcctccttcaaaatgcaacttggcgaacgccaagatgacttcaaacaatagtgctggtgactatgtcacccggcatcgaagatgccaacaggaatgcgcttaatttaagcgcaggtaaaagttagtcctgcttgaatgggaagtggaaggcgtcgagaagtgccttaccctcctcgttggtgttagcagtggtgacaatggtgatgtccataccgcgggtgtggtccatcttgtcaaagtcaatctctgggaagatgagctgctcggttacgcccatggagaagttaccacggccgtcgaagctcttagcagagataccacggaagtcgcggatacgaggaattgcaactgcgatcagacgatccaggaactcccacatacgatcgccacgaagggtaactttagcgccgattggcataccctggcgaagcttaaaggttgcgatagacttgcgagcgtgtgtaacnagtggctgctgaccagtaatggtacggaggtcgtttacagcgccgtcaattgccttagcgtctgtagctgcctcgccaacacccatgttgacaacgatcttctcaaacttaggaatctggttaacgttggtgtaaccaaatttctccttcagagcatcacgcacggatgcgtagtaaagctctttaaggcgaggtgtgtacttctcgtctgccatggtttctccttaactcttggggttttaagtgcggggatcgcctcgcacctcctagtttggcgaactaggagccatctgcatcctcgagacatacgtgtcccatagaaagacgcaatgaacaatattagaccttattgagcaaaaatggggcgagaatttcaagctagctgatattttttcgtgtcatcacacgacttncacangacaccgtncttctcgcccaaaannaaancccnnnnnnnnnnnnnnanngggnttnnannnnnnnntnnnnnnttnntacaaagcgagaaacacgtgtaacttagagctcagcgcctgacttcttggagacgcggaccttngtgccgtcctccttgatcaggtagccaacacgggttggcttgtcggtcttagggtcgataagagcaacattggaagcgtcgattgctgcctctgcctcaacgatgccaccctgctggttagctgcgtttggcttgacatggcgctttgcaattgcaacgccctcaacgacaaccttgttcttctctggatatacgcgaagtacctcgccgcgcttacccttgtccttaccagtgaggacctcgaccttgtcgcccttcttgatcttcatcttaggcatgtcgttcctccttaaagggtctcaggtgcaagtgagacaatcttcatgtacttgtggtcgcgcagctcgcgagcgactggtccaaagatacgagtacccttgggctcaccctctttgttaacaagaacgcatgcgttctggtcaaagcggatgtagctaccgtccttgcgacgggtgtccttagcggtacgaacgatgacgcagcgaacaatgtcgcccttcttcaccgaaccacctggagtagcctcctggacagcgccaatgatgacgtcggcaaggccggcgtaacgacgcttggagccaccaaggaccttgacgcactttacgcgccttgcgccgctgttgtcagcgacgttgagaatggtctccatctgaatcatgtgacgttcctccggaacctaatttctcagaggtgcgcgtatttgcgcacatgagaaataatgatagatacaaaactaggttgagctaaaagctgtttcctaggtgctaattacttagcgcgctcaacgatctctgcgagacgccaacgcttggtcttggaaagaggacgagtctccatgacgcggacggtatcgcccagaccagcctcgttgttctcatcgtgaacgtgaagcttcttgccgatggtcatcatcttgccatacttagggtggtgcttacggtacgtaatctctaccgtaatcgtcttctcgccagagatggagacgacgagtccggtacgaaccttacgcgcatttctgctttcggtctctgccataacttatctcctgcgatctagttctgctctgcggatgcttccgcagcaatttgacgggtgcgcatctcggtctgaacgcgagcaatgtcacgcttaacagccttgacncgagcggtgttgtccagctggctggttgccatctggaaacgaagattaaagagctctgcgcggccttcctcgagtttcttagcgaggtctgcatcgctcatagccttgatttcggtgtacttcattagttctcaccgtcctgatcggccttggagacaatcttggtcttnattggaagcttgtgctgagcaagacggagagcctcacgagcaacttcctctggtacgccatcaatctcnaacatgatacgaccaggcttaacaactgctacccactcttctgggttacccttaccggaacccatgcgagtctctgcaggcttcttggtgattggcttatctgggaagatagtaatccaaaccttaccgccacgcttcatctcacgggtgagagcaatacgagcagcctcaatctggcggttagtaatccagtgagcctcctctgcacggatgccccaggaaccaaaatgcagctgggtattaccctttgcctggcccttcatggaaccgcgctgtaccttacggtgcaatacacgctttggagcaagcattaacggcccctcctctcattgcgagcacgacgaggacgagcggagccctcaagagctgggttaggtgttggctgtccaggcatcttctcgccgtaataaatccaaaccttgataccaacagcgcccatggtggtgcgacctgtagcggtaccatagccgattgcagcacgaagggtgtgcagagg

SEQ ID NO: 779 - DNA, 4000 bp, Escherichia coli
  misc_feature (1990)..(1990): n is a, c, g, or t
aaagtttatctgtattcaaacttccaaaagctccagtcaaaacacttttgactgcaaccaattctggtgcaagtgatacacagtttgttattcgcagacagtttgttggaacaacaaattcttctggtgcagttacatttactgctggaactaatgaaacattcaacgcatatgcagcaaaagattatttattgacaatcataactgctggtgatggtacaggtgtagctggtcaagtggtaagtgtagctagtaagatttctggtactggtactgggtctgcgacaatcacagaagatactattcttggtgctggtgcaaaagttaagttcatcggtactataacaagaacttctgttcaaccaaaaacaaaaacaactaacttgatgaaggaacttaaagttctttcctcagatgtagatggcgcacatggtgttcgggcaacagacagagaaatttctcttggtcgtgctgatggatttaaacttgttggtgtattcgattcacaatcaacttcagctgatgcgactactccaaaactaacacttacaaatatcactggaacttttgttagaggtgaaaagattactggttctgcttctaacgcaaaagcaagaattatagaaactactagtccaatgtcatatgtcttgacagatggttttggtgcaacagactttacaacctctgatacaattactggtacattctctggtgcaactgcaactgtatctgctcttactgctggtagtgaagttattacttcaagatttacttttgactcaggaatgagagataacttttatgacatctcacgaattgttagaaaaccttctgcggcatcacctataggtagattgcttgtagtatatgatttcttctctcatggtgctggagattgtttcactgtagactcctactcaagtgttgctggtcaaatggagtatgatgatattccaacatacacaggaacgaaagtagatccagatagcccaacgccatctggtttattcccacttgcaaactcttacgactttagaccaacagcagaaaacattactggtgcatcaactacattgtctgtagtagatcaaattacaggaagttcatttaactttgaaaatcgtcagtttgatggaactggtgctgtaactgttgatatgccgcaaccaacaagtaatcttcaatctgattttgaattttatcttgcaaaagaagctacattattcttaactgctagtggtgattttaaaattattgagggagtttcagctgaaaatccttctccacccaaagtaatagacaatgcaatgatacttgcaagtttttctattccaccatatacatttactcctaaagatgtattggttcaaagatttaaaactcaaagatttaccatgcgtgatattggtaggattaaagatagattagaaaaagttgaatctatgactgcactttctcttttagaaagagatgcagagtcttttgaaattcaagatgcaaatggactcaatcgtttcaaatctggtttcgttgttgataactttgctggacacagagttggtgatactataaatgctgattatcaaattgctattgaccctcaactaaacgaagcaagaccagtttgtgttttgagaaatgcagaattgactgaactagcaactagtgatactgcaagacttgctgttggttatcaaaaaactggtgacttaattacactaccatacagtgatgtaactcttgtcgatcaaccatatgctactagagttgaaaacctacagccatatattagtgctttttgggttggtcagattcaattaactccagatagtgataactggtttgaaactgaaactgctcctgatctaattatcaatgttgatggtaactttagttctgttgtaaatgcaaacagaaataatataggaacactttggaactcatgggaaactcaatggagtggtgttgtaagcacacaatccactcnacgttttgcaagaactgctgtttggcagagaactattcaaacagtacgttctgatctagaaagaactggtttaagaactgaagttgtagaaaacattgtagaggaatcacaaggcagtaaagttatttcaagagctctagttccatttgttcgtcctagacaaattacttttgtaggacaagggttcttaccaaacacaagagtttatcctttctttgaaggtaaagatatcagtgcatatgtcactcctgcttcttcaacatatacaacagacactacaatcattgcgggcagtcctttgatttgtactatttctggaaaagtagaaggtactttcgatattccagattataagtttaaaggtcaaacttctgttcctaaatttaaaacaggcgaagtagaatttagacttacatctagtccaacaaatgcaagagctggacttggtggtgttacttcagacccagcaacagcaggatctacaatatatgctgctactggtattattgaaacagaacaagaaactattattgcaacaagaaatgcaacagttgtacaaacaaatgtttcagaaacaacttctcaatttgatactatcaataccaatagggttatacgaagacttgatccacttgctcaaacatttatatcagaagatgagaatggttgtttcttaacaaaaattgatgtgtttgttgctgcaaaagatgacactttaccaatgtgggtagaaattagaaatgttattaatggatatcccggccctaaaattcttcctttcggtagaaaattattagaaccatctcaaattaatgttgatgatacaattggtgcaactgcaacaacatttacttttgactctcctgtttatatacagggtggtatagaatattgtgtggttcttagaacaaacagtcttaactatttagtatggattgctcaaatgggcgaacttgatgtgagtggttctaacagagttgtttctaaacaaccaactcttggtgttctattcaaatcacaaaacgataagacttggactgctgttcaatcacaagatttaaaattcaaattacacaaagcagagtttaccacaacgacaggcgtttgtacattaacgaatgataatattggtgactcagttttagctgaagatggtgatacagtttatggtcgtagattacaacagaacccaattagattaaccaacagttctactgtagcaaagattaatcatggcgatcatggtatgtattctacatctaataatgttacaattactggtgtaaattctggtatatctactacactttcagctgcacttactgcaactggtacatcattgacacttacctctgcaacaaactttgctgcaagtaatttgtcctcacgatgttatgtcaagattggtactgaaatattatttggtacattgtctggtacaacaatctcaagtttaacaagaagtgttgaagatggagttgcagctgcatatgctattggtactacagtagaactctatcagttgttcggtactcctcttattgaaatcaataagacacatactgcaattgcaaatattaatatagactcttacacagttgctcttactacagctccaacagttagtggttcatctgctgatgttgacagtggtggtattcttacttacgcatcagagaactatagatttgaaacattgaaaacaaacattgctctcttagaattaccaaacacagttattagtgctgaacttaaaaagacttcagctacaagtcctagtggtgcagagagttcatttattgtagaaacaacttctagttctatttctttagatgaaacaattgatttagatactacctctatggtgtgttctaatattaatgaaataaatgaattaagttctgcaaaatcatttacactaccactaacgctttcaacaacagatacaagtttatctcctgttattgatactgcaaggttgtcagcaattctagttgcaaacagaattaa

SEQ ID NO: 780 - DNA, 4000 bp, Escherichia coli
  misc_feature (1987)..(1987): n is a, c, g, or t
  misc_feature (1999)..(1999): n is a, c, g, or t
  misc_feature (2014)..(2015): n is a, c, g, or t
  misc_feature (2020)..(2020): n is a, c, g, or t
  misc_feature (2026)..(2026): n is a, c, g, or t
  misc_feature (2029)..(2029): n is a, c, g, or t
  misc_feature (2047)..(2047): n is a, c, g, or t
  misc_feature (2054)..(2054): n is a, c, g, or t
tcaccgacaccgaaaccctttctggactgcttgaacagcttgaaaaggacatcaccgctgcttatgacagagccattgcggccgctgtcaaggtggaaagcgacagggcaaagggcgcggaagccacactgcaaatgaacatcgacggggaacgccagcgcgcggaagcggccgaaacggcactcggcaaacgtatcaccgacacgaaaacgggattgcaacagtccgacgcggaaatacgtcaggacatcgcggccgtgcgtcagaccatctttgccatacaggccgacagcgcggggcgcgtcattccccttgtcatgaccgtggaacctccgcgccgtatcacctatggcaaccccgtgaaacagtacatcaaagccagcctgctgccgcagttcgccgttcaaaacgtgctctggctttccgacggcaaagccgtggacgtcgaacctgatggggaggtggtggtgctgggtcttggcaaaagccgcgtccacgttatccccaccgaaaacacggcgttgcaccagaccgtcacggtcgaggtcgtcaggccgtctttgataaaatcaggccatgcctcgcttttgctggctggtgcaaacatattattcacttaaaactatcattcaaatggcattaaacgcaaacgaagaagaaaaagtccgccagcttctgacggcttttgagagcggcaagcgcatcaacgagcttgacgccgccacgggcagcatgtcggacatgcaggttgccgtggttgatgagagcggcgaaacgcgccgcatgaacttgcaggaggccgtccagacggcaggcaatcccattgcaggccgctggtgggacgaaacggccgctactcccaccgccgcagggtattacggctctttgcaggccttaaaggaacttcccgccaaattgggacttggccgctatctggttactgacgaccgcaagcgtcgcaagttggatgccgcggacagcacccgtttcgacgacggcagccccgcgaagctggacggcactatggggcagtgcatgtggtgctggaacgcccactacttcaccacttggacggagggcaaccgccgcatccagaccgtcacgttccagcccatcaaaggaaagaacagcatctacgttcccgcaggcggcatttcgtggattgatgcgggtgtgatggacagaaccgaacaaaaactgtgttccgtcatatccaccgacccccgttatcgtggcggcaacggcaacgcactgggtgataattacccgctggcggccgatgccccgcaaaaaacgatgctgggaatgcccgccacggcattaagtacaacggctttcggaacgtatgcccgcaaacgcggcgaggggtgggaggctaactggtttgtcgcccgtgcggttgtggaataccttttcgagataatcatgggcacgcgcaattcgcaggccgctttcaacgcagaacttgacgctaacggcctgcgtcagggcggctttggcgcgggtgctacgaatatgccgaactggggcacgtataacggttattaccccgtcattcccaccagcgtggggcttgaactgggcgacggtgtaggacttgtggattattccgtgacgaacgccgacggcgtggccgtgtaccaatgtaaagtccccgttttcttcggccttgtaaacgctggctttggcaacctttggcgttgggtgcgcggtctgaccgtttcgcagacagcaggcgaaaagacggaggtgttcgtggcaaagtccatgtatgctgcttttgaccctgcaaatatcggcgagggtatgcgtaagacgtgcgaatgcccgcagcgtgaggggtatatcataaagaaatcctatgagggactttgttgtatgcctacgtccgtgggcggttctaccgcaacgtattactgcgactatttctggacaaacgccgccacacagactagtttgcgcgttcgggctgctggcggtagcgtgnaccatggcacgnacgcgggtgcgtccnnctcgnctgcgnacnacgcggcttcgactacgnatgcggnctactcgtcgcccctctgctttttcgaggaagacccgcaaatcgagtaagacgaaaaaaaacgaacacggggcgaagcccccgaaaacaaacatcgttctttgaaattttttcataccgagaaataatgtagctgataatggcggcggggttttctttaatcccgccgtcaggcgggcgaaattttttgggaattttgggtgtctggtgcgaaagtgttaaatttgcgctgtctttcaagtgaaaggcaggttgcatttcccgtgggtggttagtttgcgcgttcaggctgctggcggtaacgtgaacaatggcacgaacgcaggtgcgtccaactcgactgcgaacaacgcagcttcgactacgaatgcgaactactcgtcgcccctatactttggaaaagaaataaaagcgacagggaaatgaaccttgcccctcggcaaaagatgacaggccaaaaagggtgtcagtagggcgcaagcctcgaccgctcccgattatgcaaagcagattttaagacccatagaccccatgacccgaagacccgatgaaacgaaaaggttacttgttcgagcaaatccgctcgatggaaaaccttttgcaggcgttccacaatgcgagcaacggcaaaaggaaacgtgacgaggttaaacggttcgaggccgatttagacgctaacctgcggcagttgcaggcggaactgacgacccgaacctatacgacctcctcttacgaggtgtttatcaaatacgaacctaaacgtcgcgaaatctataaactgccttttcgtgaccgtgttgtccaatgggcaatcatgcaagtgcttgaacccgtctggacgccacagttcacctctaacacccatgcctgcatccgtgggcgtggtattcactcgctgcttcggcagttgcgcaccgacctgcgccgtgaccctgacgggacgcggtactgtcttaaaatcgacgtgcgcaagttctatccctccatcgaccacggcatacttaaacaggtcattcggcgcaagctgaaagaccccgatgtgctttggcttctggacggcatcatagattcggccagcggcgtgcctatcggcaactacatttcccaatatttcgccaacctgtacctttcggaactcgaccacctgttaaaggaagacgtcggggtgcggtactattaccgttacgccgacgatatagtgctgctttccgacagcaaggagtatttaagcggcgttctggtatatatcaaccattacctgaatgaaagccgcctgctcacgctgaaaagcaacttccaaatctatcccgtggaaagtcggggcatcgatttcgtcggttacgtgacctaccacacccactgccttgcccgcaaacgcaacaaacaggggttgtgcagggaactggccgctttgcgtaaaaagggactacctgacgaagaaataaggcttcgcgtggcttcacgcatgggctttatgaaacactgcgacagcaatcatttattaaaaatactcggtatgaaaaaatttagtgacattaagcccaaacagggcaaattaacgggtggtaaataccacatcgacaccatcctgaaccgtgaaatccatataacggctttcgacgtttcgcaatcgaaatacgatggtgaaatgctgacgttgcaatatgagatttacgagcagatggaggacgagcagggcaaagtgatagacgacgagggcaaccccgtcatggcttggataaagcacatcactttcacggggtcaaaagcccttatccgccagcttgacggcgtggaactgaccgaacccgttgcagcgaaaataatcaagcaacccatcgggacagacggcaaacgctgcttttacagcatagtcgatcccgaccaataaaaaagagtaatgaacacagtaagttacattgaaagaaagaagtatgtaaggtatga

SEQ ID NO: 781 - DNA, 4000 bp, Escherichia coli
  misc_feature (1)..(1): n is a, c, g, or t
  misc_feature (3)..(4): n is a, c, g, or t
  misc_feature (11)..(11): n is a, c, g, or t
  misc_feature (13)..(14): n is a, c, g, or t
  misc_feature (18)..(19): n is a, c, g, or t
  misc_feature (22)..(22): n is a, c, g, or t
  misc_feature (24)..(26): n is a, c, g, or t
  misc_feature (28)..(30): n is a, c, g, or t
  misc_feature (33)..(33): n is a, c, g, or t
  misc_feature (35)..(35): n is a, c, g, or t
  misc_feature (37)..(37): n is a, c, g, or t
  misc_feature (43)..(43): n is a, c, g, or t
  misc_feature (48)..(54): n is a, c, g, or t
  misc_feature (56)..(56): n is a, c, g, or t
  misc_feature (58)..(58): n is a, c, g, or t
  misc_feature (60)..(70): n is a, c, g, or t
  misc_feature (72)..(74): n is a, c, g, or t
  misc_feature (76)..(77): n is a, c, g, or t
  misc_feature (79)..(79): n is a, c, g, or t
  misc_feature (81)..(83): n is a, c, g, or t
  misc_feature (85)..(85): n is a, c, g, or t
  misc_feature (87)..(88): n is a, c, g, or t
  misc_feature (91)..(91): n is a, c, g, or t
  misc_feature (93)..(94): n is a, c, g, or t
  misc_feature (96)..(97): n is a, c, g, or t
  misc_feature (99)..(100): n is a, c, g, or t
  misc_feature (102)..(107): n is a, c, g, or t
  misc_feature (111)..(112): n is a, c, g, or t
  misc_feature (114)..(114): n is a, c, g, or t
  misc_feature (118)..(121): n is a, c, g, or t
  misc_feature (123)..(125): n is a, c, g, or t
  misc_feature (127)..(127): n is a, c, g, or t
  misc_feature (131)..(136): n is a, c, g, or t
  misc_feature (138)..(144): n is a, c, g, or t
  misc_feature (147)..(154): n is a, c, g, or t
  misc_feature (156)..(160): n is a, c, g, or t
  misc_feature (164)..(165): n is a, c, g, or t
  misc_feature (167)..(169): n is a, c, g, or t
  misc_feature (171)..(175): n is a, c, g, or t
  misc_feature (177)..(180): n is a, c, g, or t
  misc_feature (182)..(183): n is a, c, g, or t
  misc_feature (187)..(189): n is a, c, g, or t
  misc_feature (191)..(195): n is a, c, g, or t
  misc_feature (198)..(203): n is a, c, g, or t
  misc_feature (205)..(207): n is a, c, g, or t
  misc_feature (209)..(209): n is a, c, g, or t
  misc_feature (211)..(214): n is a, c, g, or t
  misc_feature (216)..(217): n is a, c, g, or t
  misc_feature (221)..(227): n is a, c, g, or t
  misc_feature (229)..(232): n is a, c, g, or t
  misc_feature (234)..(235): n is a, c, g, or t
  misc_feature (237)..(239): n is a, c, g, or t
  misc_feature (241)..(241): n is a, c, g, or t
  misc_feature (244)..(244): n is a, c, g, or t
  misc_feature (247)..(249): n is a, c, g, or t
  misc_feature (251)..(251): n is a, c, g, or t
  misc_feature (253)..(257): n is a, c, g, or t
  misc_feature (259)..(259): n is a, c, g, or t
  misc_feature (262)..(262): n is a, c, g, or t
  misc_feature (264)..(264): n is a, c, g, or t
  misc_feature (266)..(272): n is a, c, g, or t
  misc_feature (274)..(274): n is a, c, g, or t
  misc_feature (280)..(286): n is a, c, g, or t
  misc_feature (288)..(291): n is a, c, g, or t
  misc_feature (293)..(293): n is a, c, g, or t
  misc_feature (295)..(296): n is a, c, g, or t
  misc_feature (298)..(299): n is a, c, g, or t
  misc_feature (301)..(303): n is a, c, g, or t
  misc_feature (305)..(305): n is a, c, g, or t
  misc_feature (307)..(307): n is a, c, g, or t
  misc_feature (309)..(310): n is a, c, g, or t
  misc_feature (312)..(313): n is a, c, g, or t
  misc_feature (315)..(318): n is a, c, g, or t
  misc_feature (320)..(320): n is a, c, g, or t
  misc_feature (322)..(325): n is a, c, g, or t
  misc_feature (327)..(331): n is a, c, g, or t
  misc_feature (334)..(334): n is a, c, g, or t
  misc_feature (339)..(340): n is a, c, g, or t
  misc_feature (343)..(343): n is a, c, g, or t
  misc_feature (346)..(346): n is a, c, g, or t
  misc_feature (348)..(348): n is a, c, g, or t
  misc_feature (350)..(361): n is a, c, g, or t
  misc_feature (363)..(363): n is a, c, g, or t
  misc_feature (366)..(367): n is a, c, g, or t
  misc_feature (369)..(369): n is a, c, g, or t
  misc_feature (371)..(371): n is a, c, g, or t
  misc_feature (378)..(378): n is a, c, g, or t
  misc_feature (380)..(381): n is a, c, g, or t
  misc_feature (383)..(384): n is a, c, g, or t
  misc_feature (386)..(386): n is a, c, g, or t
  misc_feature (388)..(388): n is a, c, g, or t
  misc_feature (395)..(395): n is a, c, g, or t
  misc_feature (397)..(397): n is a, c, g, or t
  misc_feature (399)..(399): n is a, c, g, or t
  misc_feature (403)..(405): n is a, c, g, or t
  misc_feature (407)..(409): n is a, c, g, or t
  misc_feature (411)..(411): n is a, c, g, or t
  misc_feature (415)..(416): n is a, c, g, or t
  misc_feature (418)..(418): n is a, c, g, or t
  misc_feature (420)..(423): n is a, c, g, or t
  misc_feature (425)..(427): n is a, c, g, or t
  misc_feature (429)..(431): n is a, c, g, or t
  misc_feature (433)..(436): n is a, c, g, or t
  misc_feature (438)..(438): n is a, c, g, or t
  misc_feature (441)..(441): n is a, c, g, or t
  misc_feature (443)..(443): n is a, c, g, or t
  misc_feature (446)..(446): n is a, c, g, or t
  misc_feature (448)..(449): n is a, c, g, or t
  misc_feature (451)..(452): n is a, c, g, or t
  misc_feature (454)..(457): n is a, c, g, or t
  misc_feature (459)..(460): n is a, c, g, or t
  misc_feature (462)..(463): n is a, c, g, or t
  misc_feature (465)..(467): n is a, c, g, or t
  misc_feature (469)..(469): n is a, c, g, or t
  misc_feature (471)..(471): n is a, c, g, or t
  misc_feature (475)..(475): n is a, c, g, or t
  misc_feature (478)..(482): n is a, c, g, or t
  misc_feature (484)..(484): n is a, c, g, or t
  misc_feature (486)..(486): n is a, c, g, or t
  misc_feature (490)..(491): n is a, c, g, or t
  misc_feature (493)..(494): n is a, c, g, or t
  misc_feature (500)..(501): n is a, c, g, or t
  misc_feature (504)..(508): n is a, c, g, or t
  misc_feature (510)..(512): n is a, c, g, or t
  misc_feature (514)..(515): n is a, c, g, or t
  misc_feature (517)..(517): n is a, c, g, or t
  misc_feature (521)..(523): n is a, c, g, or t
  misc_feature (525)..(526): n is a, c, g, or t
  misc_feature (528)..(528): n is a, c, g, or t
  misc_feature (530)..(531): n is a, c, g, or t
  misc_feature (534)..(535): n is a, c, g, or t
  misc_feature (537)..(541): n is a, c, g, or t
  misc_feature (543)..(545): n is a, c, g, or t
  misc_feature (547)..(551): n is a, c, g, or t
  misc_feature (553)..(553): n is a, c, g, or t
  misc_feature (555)..(556): n is a, c, g, or t
  misc_feature (561)..(562): n is a, c, g, or t
  misc_feature (564)..(565): n is a, c, g, or t
  misc_feature (568)..(568): n is a, c, g, or t
  misc_feature (571)..(571): n is a, c, g, or t
  misc_feature (573)..(574): n is a, c, g, or t
  misc_feature (576)..(577): n is a, c, g, or t
  misc_feature (579)..(581): n is a, c, g, or t
  misc_feature (583)..(583): n is a, c, g, or t
  misc_feature (586)..(586): n is a, c, g, or t
  misc_feature (589)..(590): n is a, c, g, or t
  misc_feature (592)..(592): n is a, c, g, or t
  misc_feature (595)..(595): n is a, c, g, or t
  misc_feature (597)..(598): n is a, c, g, or t
  misc_feature (601)..(602): n is a, c, g, or t
  misc_feature (606)..(613): n is a, c, g, or t
  misc_feature (615)..(616): n is a, c, g, or t
  misc_feature (618)..(621): n is a, c, g, or t
  misc_feature (624)..(626): n is a, c, g, or t
  misc_feature (628)..(631): n is a, c, g, or t
  misc_feature (633)..(635): n is a, c, g, or t
  misc_feature (637)..(640): n is a, c, g, or t
  misc_feature (642)..(643): n is a, c, g, or t
  misc_feature (645)..(652): n is a, c, g, or t
  misc_feature (654)..(654): n is a, c, g, or t
  misc_feature (656)..(656): n is a, c, g, or t
  misc_feature (658)..(658): n is a, c, g, or t
  misc_feature (660)..(662): n is a, c, g, or t
  misc_feature (664)..(664): n is a, c, g, or t
  misc_feature (670)..(670): n is a, c, g, or t
  misc_feature (673)..(674): n is a, c, g, or t
  misc_feature (676)..(688): n is a, c, g, or t
  misc_feature (690)..(691): n is a, c, g, or t
  misc_feature (694)..(694): n is a, c, g, or t
  misc_feature (696)..(698): n is a, c, g, or t
  misc_feature (701)..(704): n is a, c, g, or t
  misc_feature (706)..(715): n is a, c, g, or t
  misc_feature (717)..(730): n is a, c, g, or t
  misc_feature (732)..(733): n is a, c, g, or t
  misc_feature (737)..(742): n is a, c, g, or t
  misc_feature (745)..(747): n is a, c, g, or t
  misc_feature (750)..(750): n is a, c, g, or t
  misc_feature (753)..(755): n is a, c, g, or t
  misc_feature (758)..(758): n is a, c, g, or t
  misc_feature (762)..(763): n is a, c, g, or t
  misc_feature (765)..(766): n is a, c, g, or t
  misc_feature (768)..(771): n is a, c, g, or t
  misc_feature (773)..(775): n is a, c, g, or t
  misc_feature (777)..(778): n is a, c, g, or t
  misc_feature (781)..(784): n is a, c, g, or t
  misc_feature (786)..(787): n is a, c, g, or t
  misc_feature (789)..(789): n is a, c, g, or t
  misc_feature (795)..(795): n is a, c, g, or t
  misc_feature (798)..(798): n is a, c, g, or t
  misc_feature (801)..(802): n is a, c, g, or t
  misc_feature (804)..(804): n is a, c, g, or t
  misc_feature (810)..(810): n is a, c, g, or t
  misc_feature (812)..(817): n is a, c, g, or t
  misc_feature (819)..(822): n is a, c, g, or t
  misc_feature (824)..(825): n is a, c, g, or t
  misc_feature (828)..(831): n is a, c, g, or t
  misc_feature (833)..(834): n is a, c, g, or t
  misc_feature (836)..(838): n is a, c, g, or t
  misc_feature (840)..(840): n is a, c, g, or t
  misc_feature (842)..(845): n is a, c, g, or t
  misc_feature (848)..(848): n is a, c, g, or t
  misc_feature (851)..(851): n is a, c, g, or t
  misc_feature (854)..(854): n is a, c, g, or t
  misc_feature (857)..(857): n is a, c, g, or t
  misc_feature (859)..(859): n is a, c, g, or t
  misc_feature (861)..(863): n is a, c, g, or t
  misc_feature (866)..(867): n is a, c, g, or t
  misc_feature (869)..(870): n is a, c, g, or t
  misc_feature (873)..(874): n is a, c, g, or t
  misc_feature (877)..(877): n is a, c, g, or t
  misc_feature (880)..(881): n is a, c, g, or t
  misc_feature (884)..(884): n is a, c, g, or t
  misc_feature (886)..(893): n is a, c, g, or t
  misc_feature (895)..(895): n is a, c, g, or t
  misc_feature (898)..(918): n is a, c, g, or t
  misc_feature (920)..(921): n is a, c, g, or t
  misc_feature (926)..(928): n is a, c, g, or t
  misc_feature (930)..(933): n is a, c, g, or t
  misc_feature (936)..(936): n is a, c, g, or t
  misc_feature (948)..(948): n is a, c, g, or t
  misc_feature (952)..(953): n is a, c, g, or t
  misc_feature (958)..(961): n is a, c, g, or t
  misc_feature (964)..(965): n is a, c, g, or t
  misc_feature (970)..(970): n is a, c, g, or t
  misc_feature (972)..(972): n is a, c, g, or t
  misc_feature (974)..(975): n is a, c, g, or t
  misc_feature (977)..(983): n is a, c, g, or t
  misc_feature (986)..(986): n is a, c, g, or t
  misc_feature (988)..(992): n is a, c, g, or t
  misc_feature (994)..(994): n is a, c, g, or t
  misc_feature (997)..(997): n is a, c, g, or t
  misc_feature (999)..(1001): n is a, c, g, or t
  misc_feature (1003)..(1003): n is a, c, g, or t
  misc_feature (1015)..(1015): n is a, c, g, or t
  misc_feature (1017)..(1017): n is a, c, g, or t
  misc_feature (1026)..(1026): n is a, c, g, or t
  misc_feature (1040)..(1040): n is a, c, g, or t
  misc_feature (1044)..(1044): n is a, c, g, or t
  misc_feature (1064)..(1066): n is a, c, g, or t
  misc_feature (1068)..(1068): n is a, c, g, or t
  misc_feature (1072)..(1072): n is a, c, g, or t
  misc_feature (1092)..(1092): n is a, c, g, or t
  misc_feature (1105)..(1106): n is a, c, g, or t
  misc_feature (1120)..(1120): n is a, c, g, or t
  misc_feature (1177)..(1177): n is a, c, g, or t
  misc_feature (1267)..(1267): n is a, c, g, or t
  misc_feature (1276)..(1276): n is a, c, g, or t
  misc_feature (1988)..(1989): n is a, c, g, or t
  misc_feature (2971)..(2971): n is a, c, g, or t
  misc_feature (2996)..(2998): n is a, c, g, or t
  misc_feature (3001)..(3002): n is a, c, g, or t
  misc_feature (3004)..(3006): n is a, c, g, or t
  misc_feature (3008)..(3013): n is a, c, g, or t
  misc_feature (3015)..(3015): n is a, c, g, or t
  misc_feature (3019)..(3021): n is a, c, g, or t
  misc_feature (3023)..(3030): n is a, c, g, or t
  misc_feature (3032)..(3032): n is a, c, g, or t
  misc_feature (3034)..(3035): n is a, c, g, or t
  misc_feature (3037)..(3037): n is a, c, g, or t
  misc_feature (3039)..(3040): n is a, c, g, or t
  misc_feature (3042)..(3044): n is a, c, g, or t
  misc_feature (3047)..(3049): n is a, c, g, or t
  misc_feature (3051)..(3051): n is a, c, g, or t
  misc_feature (3053)..(3053): n is a, c, g, or t
  misc_feature (3055)..(3059): n is a, c, g, or t
  misc_feature (3061)..(3061): n is a, c, g, or t
  misc_feature (3064)..(3069): n is a, c, g, or t
  misc_feature (3072)..(3073): n is a, c, g, or t
  misc_feature (3075)..(3075): n is a, c, g, or t
  misc_feature (3077)..(3078): n is a, c, g, or t
  misc_feature (3083)..(3083): n is a, c, g, or t
  misc_feature (3086)..(3086): n is a, c, g, or t
  misc_feature (3088)..(3088): n is a, c, g, or t
  misc_feature (3091)..(3093): n is a, c, g, or t
  misc_feature (3095)..(3096): n is a, c, g, or t
  misc_feature (3099)..(3100): n is a, c, g, or t
  misc_feature (3102)..(3103): n is a, c, g, or t
  misc_feature (3106)..(3109): n is a, c, g, or t
  misc_feature (3111)..(3114): n is a, c, g, or t
  misc_feature (3116)..(3116): n is a, c, g, or t
  misc_feature (3118)..(3118): n is a, c, g, or t
  misc_feature (3120)..(3122): n is a, c, g, or t
  misc_feature (3124)..(3125): n is a, c, g, or t
  misc_feature (3127)..(3128): n is a, c, g, or t
  misc_feature (3130)..(3131): n is a, c, g, or t
  misc_feature (3133)..(3134): n is a, c, g, or t
  misc_feature (3136)..(3136): n is a, c, g, or t
  misc_feature (3140)..(3141): n is a, c, g, or t
  misc_feature (3143)..(3145): n is a, c, g, or t
  misc_feature (3147)..(3148): n is a, c, g, or t
  misc_feature (3151)..(3153): n is a, c, g, or t
  misc_feature (3156)..(3162): n is a, c, g, or t
  misc_feature (3164)..(3168): n is a, c, g, or t
  misc_feature (3170)..(3174): n is a, c, g, or t
  misc_feature (3176)..(3178): n is a, c, g, or t
  misc_feature (3181)..(3182): n is a, c, g, or t
  misc_feature (3186)..(3192): n is a, c, g, or t
  misc_feature (3200)..(3208): n is a, c, g, or t
  misc_feature (3210)..(3212): n is a, c, g, or t
  misc_feature (3217)..(3222): n is a, c, g, or t
  misc_feature (3224)..(3227): n is a, c, g, or t
  misc_feature (3229)..(3232): n is a, c, g, or t
  misc_feature (3234)..(3235): n is a, c, g, or t
  misc_feature (3237)..(3238): n is a, c, g, or t
  misc_feature (3241)..(3241): n is a, c, g, or t
  misc_feature (3244)..(3245): n is a, c, g, or t
  misc_feature (3248)..(3250): n is a, c, g, or t
  misc_feature (3252)..(3262): n is a, c, g, or t
  misc_feature (3266)..(3267): n is a, c, g, or t
  misc_feature (3270)..(3272): n is a, c, g, or t
  misc_feature (3274)..(3275): n is a, c, g, or t
  misc_feature (3277)..(3282): n is a, c, g, or t
  misc_feature (3284)..(3286): n is a, c, g, or t
  misc_feature (3288)..(3289): n is a, c, g, or t
  misc_feature (3291)..(3292): n is a, c, g, or t
  misc_feature (3294)..(3296): n is a, c, g, or t
  misc_feature (3299)..(3315): n is a, c, g, or t
  misc_feature (3317)..(3317): n is a, c, g, or t
  misc_feature (3319)..(3327): n is a, c, g, or t
  misc_feature (3329)..(3330): n is a, c, g, or t
  misc_feature (3332)..(3339): n is a, c, g, or t
  misc_feature (3341)..(3344): n is a, c, g, or t
  misc_feature (3347)..(3350): n is a, c, g, or t
  misc_feature (3353)..(3357): n is a, c, g, or t
  misc_feature (3359)..(3360): n is a, c, g, or t
  misc_feature (3362)..(3372): n is a, c, g, or t
  misc_feature (3374)..(3374): n is a, c, g, or t
  misc_feature (3376)..(3377): n is a, c, g, or t
  misc_feature (3379)..(3388): n is a, c, g, or t
  misc_feature (3390)..(3390): n is a, c, g, or t
  misc_feature (3392)..(3407): n is a, c, g, or t
  misc_feature (3409)..(3410): n is a, c, g, or t
  misc_feature (3412)..(3417): n is a, c, g, or t
  misc_feature (3419)..(3420): n is a, c, g, or t
  misc_feature (3422)..(3422): n is a, c, g, or t
  misc_feature (3424)..(3434): n is a, c, g, or t
  misc_feature (3436)..(3438): n is a, c, g, or t
  misc_feature (3440)..(3440): n is a, c, g, or t
  misc_feature (3443)..(3445): n is a, c, g, or t
  misc_feature (3447)..(3447): n is a, c, g, or t
  misc_feature (3452)..(3452): n is a, c, g, or t
  misc_feature (3454)..(3455): n is a, c, g, or t
  misc_feature (3459)..(3469): n is a, c, g, or t
  misc_feature (3471)..(3476): n is a, c, g, or t
  misc_feature (3478)..(3478): n is a, c, g, or t
  misc_feature (3480)..(3487): n is a, c, g, or t
  misc_feature (3490)..(3499): n is a, c, g, or t
  misc_feature (3502)..(3503): n is a, c, g, or t
  misc_feature (3505)..(3507): n is a, c, g, or t
  misc_feature (3509)..(3509): n is a, c, g, or t
  misc_feature (3511)..(3513): n is a, c, g, or t
  misc_feature (3515)..(3518): n is a, c, g, or t
  misc_feature (3520)..(3521): n is a, c, g, or t
  misc_feature (3523)..(3526): n is a, c, g, or t
  misc_feature (3528)..(3529): n is a, c, g, or t
  misc_feature (3531)..(3534): n is a, c, g, or t
  misc_feature (3536)..(3540): n is a, c, g, or t
  misc_feature (3542)..(3546): n is a, c, g, or t
  misc_feature (3548)..(3550): n is a, c, g, or t
  misc_feature (3554)..(3560): n is a, c, g, or t
  misc_feature (3562)..(3562): n is a, c, g, or t
  misc_feature (3566)..(3566): n is a, c, g, or t
  misc_feature (3568)..(3569): n is a, c, g, or t
  misc_feature (3571)..(3571): n is a, c, g, or t
  misc_feature (3574)..(3576): n is a, c, g, or t
  misc_feature (3578)..(3578): n is a, c, g, or t
  misc_feature (3580)..(3581): n is a, c, g, or t
  misc_feature (3585)..(3588): n is a, c, g, or t
  misc_feature (3592)..(3593): n is a, c, g, or t
  misc_feature (3595)..(3596): n is a, c, g, or t
  misc_feature (3598)..(3599): n is a, c, g, or t
  misc_feature (3601)..(3605): n is a, c, g, or t
  misc_feature (3607)..(3610): n is a, c, g, or t
  misc_feature (3614)..(3618): n is a, c, g, or t
  misc_feature (3620)..(3620): n is a, c, g, or t
  misc_feature (3622)..(3630): n is a, c, g, or t
  misc_feature (3632)..(3634): n is a, c, g, or t
  misc_feature (3637)..(3641): n is a, c, g, or t
  misc_feature (3643)..(3644): n is a, c, g, or t
  misc_feature (3647)..(3649): n is a, c, g, or t
  misc_feature (3651)..(3655): n is a, c, g, or t
  misc_feature (3657)..(3661): n is a, c, g, or t
  misc_feature (3663)..(3663): n is a, c, g, or t
  misc_feature (3665)..(3670): n is a, c, g, or t
  misc_feature (3673)..(3674): n is a, c, g, or t
  misc_feature (3676)..(3676): n is a, c, g, or t
  misc_feature (3678)..(3680): n is a, c, g, or t
  misc_feature (3687)..(3687): n is a, c, g, or t
  misc_feature (3689)..(3689): n is a, c, g, or t
  misc_feature (3691)..(3694): n is a, c, g, or t
  misc_feature (3696)..(3697): n is a, c, g, or t
  misc_feature (3699)..(3702): n is a, c, g, or t
  misc_feature (3705)..(3707): n is a, c, g, or t
  misc_feature (3710)..(3716): n is a, c, g, or t
  misc_feature (3720)..(3720): n is a, c, g, or t
  misc_feature (3722)..(3723): n is a, c, g, or t
  misc_feature (3725)..(3725): n is a, c, g, or t
  misc_feature (3727)..(3729): n is a, c, g, or t
  misc_feature (3731)..(3735): n is a, c, g, or t
  misc_feature (3737)..(3741): n is a, c, g, or t
  misc_feature (3743)..(3748): n is a, c, g, or t
  misc_feature (3750)..(3751): n is a, c, g, or t
  misc_feature (3753)..(3756): n is a, c, g, or t
  misc_feature (3758)..(3758): n is a, c, g, or t
  misc_feature (3760)..(3765): n is a, c, g, or t
  misc_feature (3769)..(3773): n is a, c, g, or t
  misc_feature (3775)..(3776): n is a, c, g, or t
  misc_feature (3779)..(3779): n is a, c, g, or t
  misc_feature (3785)..(3785): n is a, c, g, or t
  misc_feature (3787)..(3788): n is a, c, g, or t
  misc_feature (3790)..(3790): n is a, c, g, or t
  misc_feature (3794)..(3794): n is a, c, g, or t
  misc_feature (3796)..(3797): n is a, c, g, or t
  misc_feature (3799)..(3800): n is a, c, g, or t
  misc_feature (3802)..(3803): n is a, c, g, or t
  misc_feature (3805)..(3806): n is a, c, g, or t
  misc_feature (3808)..(3809): n is a, c, g, or t
  misc_feature (3811)..(3811): n is a, c, g, or t
  misc_feature (3816)..(3816): n is a, c, g, or t
  misc_feature (3818)..(3822): n is a, c, g, or t
  misc_feature (3824)..(3827): n is a, c, g, or t
  misc_feature (3831)..(3831): n is a, c, g, or t
  misc_feature (3833)..(3834): n is a, c, g, or t
  misc_feature (3836)..(3836): n is a, c, g, or t
  misc_feature (3842)..(3843): n is a, c, g, or t
  misc_feature (3849)..(3851): n is a, c, g, or t
  misc_feature (3853)..(3857): n is a, c, g, or t
  misc_feature (3862)..(3863): n is a, c, g, or t
  misc_feature (3865)..(3866): n is a, c, g, or t
  misc_feature (3868)..(3869): n is a, c, g, or t
  misc_feature (3871)..(3872): n is a, c, g, or t
  misc_feature (3874)..(3885): n is a, c, g, or t
  misc_feature (3887)..(3891): n is a, c, g, or t
  misc_feature (3893)..(3897): n is a, c, g, or t
  misc_feature (3899)..(3909): n is a, c, g, or t
  misc_feature (3911)..(3911): n is a, c, g, or t
  misc_feature (3914)..(3915): n is a, c, g, or t
  misc_feature (3917)..(3917): n is a, c, g, or t
  misc_feature (3920)..(3923): n is a, c, g, or t
  misc_feature (3925)..(3928): n is a, c, g, or t
  misc_feature (3930)..(3931): n is a, c, g, or t
  misc_feature (3933)..(3936): n is a, c, g, or t
  misc_feature (3939)..(3943): n is a, c, g, or t
  misc_feature (3945)..(3946): n is a, c, g, or t
  misc_feature (3949)..(3953): n is a, c, g, or t
  misc_feature (3955)..(3955): n is a, c, g, or t
  misc_feature (3957)..(3970): n is a, c, g, or t
  misc_feature (3972)..(3973): n is a, c, g, or t
  misc_feature (3975)..(3975): n is a, c, g, or t
  misc_feature (3977)..(3979): n is a, c, g, or t
  misc_feature (3981)..(3986): n is a, c, g, or t
  misc_feature (3988)..(3990): n is a, c, g, or t
  misc_feature (3992)..(3993): n is a, c, g, or t
  misc_feature (3995)..(4000): n is a, c, g, or t
nanntttaaanannggtnnaangnnngnnnccngntnggtttnttttnnnnnnnancntnnnnnnnnnnnannntnntntnnntntnnttntnntnntnntnnnnnnaaanntngaannnntnnntncccnnnnnnannnnnnnaannnnnnnntnnnnngggnngnnnannnnnannnngnntttnnngnnnnnttnnnnnncnnngntnnnngnngggnnnnnnngnnnnanngnnngnggnaannngncnnnnntnggngngnnnnnnntntttggnnnnnnntnnnngnanncnntnnnancngnngnngnnnngngnnnntnnnnnaanagaannttnggngngnnnnnnnnnnnntnttnntncncgccggngnngnngntnttttttntncntttnnngnnntntttnnangnnnntnnntnnnannnncnggnanttncnncnntnnnnannanntnnngntntttnttnnnnntntnttcnncnngggggnnttnnnnnannncnngnggcnnngnngngnngannannnnngnnncnnnnngntnnaaagnnannaanaanannannannntnttnttnntnttntnnggnntttnnnnnnnngnngnnnnggnnncnnnntnnnannnntnngnnnnnnnncncncntnnncngggttnggnngnnnnnnnnnnnnnannaanannnaannnntnnnnnnnnnnannnnnnnnnnnnnnannaaannnnnngannncancgnnnagnaganncnncnnnnannntnntcnnnncnnanagaaanganaannanaaaaanannnnnncnnnncnngannnnanngnnncntnnnnaanaanaanaananannnttnntnntgnnatnatnntantnnnnnnnncntcnnnnnnnnnnnnnnnnnnnnncnncgtgnnntnnnnagnagaagaagaaanaagnnttgannnntcnnccaanancnncnnnnnnncancnnnnntnatnannnanaaaagaagaagnanacaacaccnattattaaacaacnaaanacccgcgagagaaagcatcnnncntctnttttttaacaccaccaccancatgtttaaatcnncctcctctcctccnttcgcgcgtttgcgagacgacgaggattccacgccgacggcacctttttcccgaggngaggaagaagaagatcttcacgatctcgaaaacgacgaagccgcctcggcggtgttcaactacagccctcgaccaaaaacagaccgcacnttcgcgagngtgttcttactcatcacgagcgcgtgtttccttctcggcattgtcgtggtctcgaacacgaacgcgaaagcgtttgcacaaagaacgagcgaagatgtgctgtttagcaccaactgcgaagcgtatcgcgcgtcgtcgtcatcaccaacatcgaggctgttgttatcgaacaaagatgagtttaaggataccaacgacgatttggacgatgtgttcgatggtgatgatttttggcaatcgtcgcacgcgtggctgttgttggcgatcgtctcggcggttgcgctcggggtgacgtttttgtacgggtttcaatatcacgcgagtaaagcaacctgggggattattgggtttaaactcctttccagcttttccttctctttgtacatgtttgcagaagggtttgtctttggcgggtgtttgtttctcctggtgactttgattttagcgcgcgtcttttatctctggcgagaggaaatcgcgctcgtcaatcggcttttacaaaccgcggcgacggcgttgagcgatcagaaacacacgctgacggcgacgatggggattaacatgttcgtttctatgtttgtgttcatcccgtttatctttttcatgtcgtacgcgtggatgcacgggaagattggcgcgaatcggttcgcgatgacgcacccgagcgacggatcgaagtgcatcgatcgaaggtcgtacgacgactacgtgnnatccagagatgaaggtgcgacgggcgatatgagtgcgtacgtttatgaggttaattgttgcgaatggcagacggattcgtgggtgaaaccgttcgtcgggttgctgtttttttccttgctctggacgtcctcggttgcggtgtgtttacgattgttcaccattggtggttcaaccgcgcagtggtactttgcgccctctggaacgaccgcgttcaaaggtacggtgaaacgatcgttatcgcacggcttgaaatcgcaattcggcaccatctgttttggaggtttgatcatgtcaatcgtcgatatggttcgaaacatgtttgaaaaagcgcaaagagaacacagaaacaacgcggcgatggccgcgttgatgtgttgcgtgaacttgttgtggcaatgtttcgccgagattattggatttatttccaagtttgccatcgtgtacgccgccatctccggcgacgccttttgcgactctgcgagaaaagtcaccacgattttacaaaacaacatgttatcaacctttgcggtgtggtggttgcctccgatgattctcaggacgactgcgtttatcgtctcggtcgtctttggcgtcgtctttggcctctcgtcctcgaattacttcgacgacgaatcgcgaagcgtcgaggtagtcttcctcggtgtgttctgcttcttgatttctctgactattctgaacttttgcctgaccgttttattggatgtcgtcgacgcggtgtacttgtgttacgccgtcgacaaagatttacaaatgttgacgaaaccagagattcacgacgtcatggacgaagtcgtcaagaagcaaacgaagaacgcggggggattcaatacgaacaataacgcgttcaacatcgcgaatccgttcgctgccaataatagaaatagtaacaacaacaactcgaatagcaacgagatgagcgcgatggctggagcgcctcaacaacaacaacaacaacaacancaacaacaacaacaacaacaacaannngtnntnnncnnnnnncngcannnannnnnnnnanannancnncnnncgnnngncncnnnnnangannnnnncgnngngnnaaaanaananaannnannaannannaannnntnnnntntntnnnannanntnntnntnttannannntnntannnacnnnnnnngnnnnntnnnnnannnctnntatnnnnnnnatcatcannnnnnnnntnnntactnnnnnncnnnnannnncnncnnctnctnntcnnncnnnnnnnnnnngaannacnnntnntnnnnnnannncnncnncnnntcnnnnnnnnnnnnnnnnncntnnnnnnnnncnncnnnnnnnncnnnnttnnnngannnnntnncnnnnnnnnnnnancnncnnnnnnnnnncncnnnnnnnnnnnnnnnntnntnnnnnnannanannnnnnnnnnntnnngntgnnngncctcntnnttcnnnnnnnnnnngnnnnnntngnnnnnnnngannnnnnnnnntcnncnnncntnnntnnnntnntnnnncnncnnnntnnnnnannnnntnnnaaannnnnnnancgtngnngncgnnngntnnttcnnnncgtnntnntnntnnnnnannnncttnnnnncntnnnnnnnnngnnncgnnnnntnnttnnncnnnnntnnnnncncnnnnnntannancnnngcggcgncntnnnncnncnnnngtnnnttnnnnnnnttcntnntntnnncnnnnntnnnnnannnnnncnncnnnngnannnnnncgtnnnnntnntcntcttcntnntnttcntnntnntnntnntnntnttttntnnnnntnnnnttgntnntnttcttnntagtannntnnnnncgtcnntnntnntnntnnnnnnnnnnnncnnnnnannnnncnnnnnnnnnnncntcnncngcnnnntnnnncnncnnnnctnnnnncnncgnnnnntncnnnnnnnnnnnnnncnncncnnntnnnnnntnnncnncnnnnnn

SEQ ID NO: 782 - DNA, 4000 bp, Escherichia coli
  misc_feature (172)..(172): n is a, c, g, or t
  misc_feature (1514)..(1514): n is a, c, g, or t
  misc_feature (3045)..(3045): n is a, c, g, or t
tgtggcgcaaatccgcatccaagcgcaagacgggcaggaggccgtggcctcagacgtggtggcgcagcttgaaagcgccttgcgcaatattgcaccagatattcgttttccttccgtggagtcggtggggccgaaggtctctggcgagttgatcaaatccgcggtcttagcngtggtgatcgccattgccgttgtgctgatctacatttggctgcgctttgaatggcaatttgcgctcggtgccgtgggggctttggtgcatgatgtgattttgaccatcggaattttctcagccctgcaaatcaaatttgatctggcgattatcgcggccttgctgaccatcgtcggctattcgttgaatgatacggtggtggtgtttgaccgggtgcgggaaaacctgcggcgctataagaagaaagatttgagcgacgtgctcaacctgtcgatcaatgagacccttagccggaccgtgatgacctcggtgaccaccctattggcgctgatatccctttttgtgctgggtggcgacgtgatccgcgggttcgtctttgcgatgatttggggtgtgatggttgggacatattcttcggtctttgtcgccagctccgcgctgctgcgcttgggcgtcaaacgcgattggtccaagcccagcaatacggatggcaatcaatttgccaatattgatgcgtaatgcagctctctgagatcacctttgagactggccgcccggtggacggctatggcccgaatttctttcgcgttgccggtgaggtctttgagggaaaattggctattctgccggggtcttgcggcccttgggctgggtttgatgatccaagcccctttgtcgatgcggccaaggacttggatgtggttttcgtgggaacgggggcgcagattgcccatattccaccgaattttcgcgccacacttgagggggctggaataggggtggagatcatgaattcgcccacagcctgccgcacctataatattttattgtctgagggccgccgcattggcttggccctgatcccggtctaaacgatgctgcaagtctcaaacctaagcgtggcgcggggggggatgacattgctctgcggggttgatttttcgctcagtgctggacagattttggtgctgcgaggggccaatgggcttggcaaaaccagtctgttgcggtgtattgccgggctgcaagacccggtggaggggcagatcaccgcgcctgagacagtggcctattcgggccatgcagacggtctaaagggccaaatgaccgtgctggaaaatcttgcgttttgggcatccatttatcatgggccaagcccggatgtggcgctagattcctatgatctgcgcgcattggccgatcggccggccgccaatctctctgctggacaaaaacgccgcctcggtttggcgcgtatgcaggtcagtggctgcgcgctttgggtgatggatgagccgacggtgtcgctggacgcgcataacgtggcattgtttcgcgcggngcttgatcggcatgtgcacagcggcggtgccgccgtgatcaccacccatattgacctagagattgcgtcagcgcagctgttggatctaacccgctttaaggcgcgcgggctatctggcagttcggcctttgaggaggccttggaatgatccaattgtttttgcgcgatgttggcttgtctgtgaggtctgggggcggattcggcctggccttgattttctatttgattgtagtgaccttgatccccttcgcgcttggcccagatcaggcagggctggcgatcattgcaccgggcgttttgtggctcggggcgcttttggcctgtctgctctcattggatcgtatttttggcctcgattatgaggatggcacgctcgatctcctcgcgacgtcgcccttgccgcccgaggctgtctatatcgccaaggctgcagcgcattggttgaccacaggcctgcccttgtctctggccgcaccagtcttgggcgtgttgttgaatctcgactttgaaaccggtaaagtcctgtgtctgtcgctcgtgttgggcactccggccttgagcttgattggtgcctttggcgcgagtctgaccctcggcgtcaaacgcggagggctgttgctctcgcttttggttctgccgctttatgtgcccagtctgatttttggcgcgcaggcggtgcgattggcggggcaggggttggcctatgatgtggctttggtgcttttatcggccatttcgcttggggctgcggcgatattgccctttgcatctggagccgctttgcggatcaacttaagatgaggggcgcgtgacagtaatggggttaaatcgatgaacaacagaccaattgcgccgagattttgggacaggttttggcgtttggccaatccgaaagtctttatgggctggtctggtcgtctcctgccctggattgcggccgcggctgcgttatctctgtgttctggattgatttggggttattttttgacgccagatgatatgcggcagggctcgactgtgaagatcatctatctgcatgtgccggccgctttgatggcgatcaacgggtatctgctcatgtttgtgggggcgctggtctggttgatccgccggcagcatgtctctgttctcgcggccaaggcggcagctcccgtgggcatggtgatgacactgatcgccctggccaccggggctatttgggggcagccgatgtggggcacctattgggtttgggatccccggttgaccagttttttgatcctctttttattctatgtgggctatatcgccctgtgggcggcgattgaggatgaagactcggcggcagatttaacctcggtcttggcgattgtgggagcggtttttgccatgttgagccgatacgcggtgctgttttggaatcaagggctacaccaaggcacaaccgtaaccgtggccgatggggcgaaacaggaaaatatttctaatgtctttttccagccgctgctcctatcgatggccgggtttgggctgttgtttttgacattgttgntggttggcacgcgcacggaggtgcggtcgcgtcggctgaaggtattgcaagcacgggagcggatggaatgatgccagatctgggaaaatatgccttagaagtcaacagttcctatgcgctgagcctcttggctctcgcggcaatcactgggctctatctgcggcgcagccgtgcagtaaagcgcgctttggcagcgcaggaggcggctcaggatgcgtaaactgctgttggcattgccggttgtgatctttgcagtatttgctgggctggcctttgttgggatgcagcgagaggatccagagggcctgccaagcgccatcgcaggccagcaggcaccgaaagtccagctcgatcccctggaggggcatgtgccctttgcacaggcggatttgaccagcggcggggtgaaattggttaatttctgggccagctggtgcgcaccctgccgggctgagcatccaacactgatggatttttccgatcgcggcattccggtgtatggcgtgaactataaagacaaccctgccaaagcacgcgcttttttggcggaactgggcaatccttatgctttggccggagcggatcctcaggcgaggatggcgctggattggggggtttatggcttgccggagacctttgttctggcacccgatggaactgtgatcatgcgtgtgactggcccgctgacggcgcgcaatttgcaaacgcgtgtgatgccggcgctggcagaggcagggttggaattctaaggaaaatcaaacgtgcagacaggtcttgcggtcttgaacgcacaaaaggcctctggctaacgccagttcaacacgaaatgagggcagcgcctgccgtggggcaggcaggcgctgcccggtgttgccaccgggcctaatgttttgacggggcggtagggttattcagacgctgttccaaccctatgcggctttggccaggttgcgca

SEQ ID NO: 783 - DNA, 4000 bp, Escherichia coli
  misc_feature (3128)..(3128): n is a, c, g, or t
  misc_feature (3600)..(3600): n is a, c, g, or t
  misc_feature (3813)..(3813): n is a, c, g, or t
gcaaccatttttttgcattgtcattcattaagacagaggtatacaaggcattctgaaattggaaagtgtctttaaatacatcattgtaagggccatattggctaatggattcgtaggtttgattgtaagagccgtatctaaagtctgttccaataatccattgcatatttttatgaagaggcgttgataaaaaggcatctacaaaatgtgttgtacctgcgtattgattgttttcgtaaatcgtatactttttatctgcactgtcatttaaataggtcctgtcttgagtggtgtattgatactgtaattgaaaacttgtttttgactttttatatttcaacactaggccactcatggtagttgcgtttttgaactcattgtctttttcatccataaagccaccataatctatggcagatgtataggccgtctttctgcttgacaattgtatattccaaagcgtgtcaatttggtattttgcttttacaaaaaagctattgttttgatagccatccttgtcaaaattggctttgttggtgatatccttggccgaagaaaatccgtctgcattttgattttcaaatccaatggtatagtttaatttattgatgctactattaaactgcaaattgccttgcttagtaccatagctaccatagcttaatgcgccggtcacaaagggtgcgccttttgattttgttataatattgatgacaccaccaattgcgtcggatccataaagggtgctttgcgcaccttttagaatttcaatgcgttccacttgattcagtggtactaagtttaaatcaaattcattgctaatcatagatgggtcacctaccggggcgccgtctaataaaatcaaggttcttccggaagctgcgccgcgcatataaacactgggaacggttcctaaattacttaaactacctggcaagcttaatcctgcttgctcattcaaaacctgtgcaatggttctgccagcattttgttgaatttgagcagcagtaataacagtgatgactttgcttgttccactttgtttctgctcaattttattggcagtgacaatgacatcctccagctgattgggggttgaacttttttgaagactgtctttttgcccaaagaggagggtggcggtgattagacacaccgagagcgtgattaattttttgctcattgttttgttttttttgagttaacaatgagcttcctggagaaagagaaccataattgattaaggagtcgtcagagatagtcgtaagagattagcatcttaaaaataaatgcataccatctttatatcttcgggccttaatttttttataatccctgctttttacccgaaagctgttgattttttaaactaggcaggtcttctggcttgttcttctaggatgcgtccttcccaaattgcttcagtggactttttgcatcaattgctttgcagcaacgaactcacagctacgggaatagcccccgattttaacgggattcccttttaatcatttgcatgaacctaattctgaaacaaatttagtatttatatatccctcactatttttaattactaacgggttgttgaaaactaggtcatttttattatatttataattcattgactagatatgaagcaaaagcaaggcattaatttttttagccttaccatgattgtggtgagtttggtcattggcatgggtatttttaaaacccctgccaccattgcagcaaaatcgggaacgcccctaattttttttagtgcttggtttattggaggtgtaattgctttatttggagcccttacttatgcagaaattggacaaagacttccagtgatgggtggctattataaagtatttgcgcactgctatcatccgggtgttggttttactattaacgttttaattttaattagtaatgcagcatcactagcggtggtggctttaattggtgccgactatgtaagtgatttattatttgggaggccatctggtactttatttaatattatagtagcctctgcttctgtggggcttttttatattgttaatttacttggattaaagacaagtagtcgcacgcagaatattttaatggtggtaaaaatttctttaattgtacttttaatttcttcattgtttaaaggtgtcactgttcctccacatggtattaacgaaggaaaaatttatacttatgatggaaccaacggggctttattattactagtaagtttagtctctgtattttttacttacggtgggtatcaacaaactatcaattttggatcggaagtaaaatcggccaagaccatgcaaagaggtattgtagtaggcatactagtagtactatttttatatttagccattaactacacttatattaaagtcattggatttgatcaaatgaaaaatgccaatgccattggttctttattatttgaagcctggtttggaaaattcggggccaaggtttttgattttgccatggtcttaagtgtacttgcctatgtgaatgtaatattaatgagtaaccctcgtgtgatgtttgcaatgagtgaggataaagtactacctgccatttttcaaaagaaacatccaaaaacagatgctttagtacctggcttaactgtatttgctattactactatactagttacattttttggtaaaggggtagacgatgtactaagctttagtatctttttagattgtatgggtatgagtacttctgctgctaccttattaatattaagaagaaaaaaacaaggcgatgctaccgttacgggggctttaaaaagatggacacctattttttgtgtggtttttgtactatcctatgctttggtggcttgcgcggtggtcattgataagccttattctgcattaacagccgttattttattatgtattgtcctggtattatatagaatattttattataagccttctacataatagaagggtgaatttctgccgctcaaaccccattttagaggcatcttcccttaatttatgcttaaaaaagctaatttctagcctttcatcgttactaaatgctgttcagcgcttgccttttccgtctgtctaaaaattactcaactagccctttatgtagtatttttgtantgtaaaaagagttctaacaacacattacatgaaatacataataacaataagcttatttttctcttccattagtttgatggcacaagaacctgcacagtgggatttaagatcttgtgtgcagtatgccattcaacataatatctccgtgcagcaagcagatgtgcagtcaagactagcaaaacttcaagcagaattagccaagtccaatagactacccaccattaatggttcttcaggtatgggattaagattaggccgttctattgacccaaccaccaatgatttcactaacactcaatttttgttcaacaattttggagtgaatggaggcatgcaattatttaatgcaggcaggttgagaaataatgctgaagcaagtagtttaagttggtatgcaagtgaaacagatagactaaccattgccaatgatatctcattgaacgtggctactttttatttacaaatattatcngctattgagcaaactgaaattgcaaaaattcaaatacaacaaacaaaggaacaattagcggctactagtaagagagtagaagtgggcttattgcctgagttaaatttattggagttagaaacacaattggccaacgatagtagtagttatatcactgctatttctaatgtgcaacaaggtaaattaaatttaatggccttattgaacttagangcctctaagaattttgatattgtagcgcagccagtagatcaaattaaattacaatcttttgccgatttgcaacccgattatgtatttaattatgcctctcaaaatttaccgaatgtaaaagcggcttcattaagagtgaaggcagcgcaaaaaaatactttagtggccaaggcaagtttttatccta

SEQ ID NO: 784 - DNA, 4000 bp, Escherichia coli
  misc_feature (935)..(935): n is a, c, g, or t
  misc_feature (1678)..(1678): n is a, c, g, or t
  misc_feature (1987)..(1987): n is a, c, g, or t
  misc_feature (1999)..(1999): n is a, c, g, or t
  misc_feature (2286)..(2286): n is a, c, g, or t
  misc_feature (3214)..(3219): n is a, c, g, or t
  misc_feature (3223)..(3223): n is a, c, g, or t
  misc_feature (3225)..(3226): n is a, c, g, or t
  misc_feature (3230)..(3238): n is a, c, g, or t
  misc_feature (3240)..(3245): n is a, c, g, or t
  misc_feature (3248)..(3249): n is a, c, g, or t
  misc_feature (3251)..(3254): n is a, c, g, or t
  misc_feature (3256)..(3256): n is a, c, g, or t
  misc_feature (3258)..(3258): n is a, c, g, or t
  misc_feature (3260)..(3262): n is a, c, g, or t
  misc_feature (3264)..(3272): n is a, c, g, or t
  misc_feature (3274)..(3275): n is a, c, g, or t
  misc_feature (3277)..(3282): n is a, c, g, or t
  misc_feature (3284)..(3284): n is a, c, g, or t
  misc_feature (3286)..(3289): n is a, c, g, or t
  misc_feature (3291)..(3291): n is a, c, g, or t
  misc_feature (3295)..(3299): n is a, c, g, or t
  misc_feature (3301)..(3313): n is a, c, g, or t
  misc_feature (3315)..(3315): n is a, c, g, or t
  misc_feature (3317)..(3317): n is a, c, g, or t
  misc_feature (3319)..(3320): n is a, c, g, or t
  misc_feature (3323)..(3324): n is a, c, g, or t
  misc_feature (3327)..(3328): n is a, c, g, or t
  misc_feature (3330)..(3330): n is a, c, g, or t
  misc_feature (3332)..(3332): n is a, c, g, or t
  misc_feature (3336)..(3341): n is a, c, g, or t
  misc_feature (3343)..(3348): n is a, c, g, or t
  misc_feature (3351)..(3352): n is a, c, g, or t
  misc_feature (3354)..(3355): n is a, c, g, or t
  misc_feature (3358)..(3359): n is a, c, g, or t
  misc_feature (3361)..(3361): n is a, c, g, or t
  misc_feature (3363)..(3364): n is a, c, g, or t
  misc_feature (3366)..(3366): n is a, c, g, or t
  misc_feature (3368)..(3369): n is a, c, g, or t
  misc_feature (3371)..(3374): n is a, c, g, or t
  misc_feature (3376)..(3376): n is a, c, g, or t
  misc_feature (3379)..(3384): n is a, c, g, or t
  misc_feature (3386)..(3397): n is a, c, g, or t
  misc_feature (3399)..(3402): n is a, c, g, or t
  misc_feature (3405)..(3408): n is a, c, g, or t
  misc_feature (3410)..(3411): n is a, c, g, or t
  misc_feature (3413)..(3415): n is a, c, g, or t
  misc_feature (3417)..(3420): n is a, c, g, or t
  misc_feature (3422)..(3426): n is a, c, g, or t
  misc_feature (3429)..(3429): n is a, c, g, or t
  misc_feature (3432)..(3432): n is a, c, g, or t
  misc_feature (3435)..(3435): n is a, c, g, or t
  misc_feature (3437)..(3437): n is a, c, g, or t
  misc_feature (3439)..(3439): n is a, c, g, or t
  misc_feature (3442)..(3446): n is a, c, g, or t
  misc_feature (3449)..(3457): n is a, c, g, or t
  misc_feature (3459)..(3460): n is a, c, g, or t
  misc_feature (3462)..(3462): n is a, c, g, or t
  misc_feature (3465)..(3466): n is a, c, g, or t
  misc_feature (3468)..(3469): n is a, c, g, or t
  misc_feature (3471)..(3472): n is a, c, g, or t
  misc_feature (3474)..(3474): n is a, c, g, or t
  misc_feature (3476)..(3478): n is a, c, g, or t
  misc_feature (3481)..(3483): n is a, c, g, or t
  misc_feature (3485)..(3491): n is a, c, g, or t
  misc_feature (3494)..(3499): n is a, c, g, or t
  misc_feature (3501)..(3505): n is a, c, g, or t
  misc_feature (3507)..(3507): n is a, c, g, or t
  misc_feature (3509)..(3513): n is a, c, g, or t
  misc_feature (3515)..(3515): n is a, c, g, or t
  misc_feature (3517)..(3517): n is a, c, g, or t
  misc_feature (3519)..(3526): n is a, c, g, or t
  misc_feature (3531)..(3531): n is a, c, g, or t
  misc_feature (3533)..(3533): n is a, c, g, or t
  misc_feature (3535)..(3540): n is a, c, g, or t
  misc_feature (3542)..(3550): n is a, c, g, or t
  misc_feature (3552)..(3553): n is a, c, g, or t
  misc_feature (3556)..(3561): n is a, c, g, or t
  misc_feature (3564)..(3566): n is a, c, g, or t
  misc_feature (3568)..(3568): n is a, c, g, or t
  misc_feature (3570)..(3570): n is a, c, g, or t
  misc_feature (3572)..(3572): n is a, c, g, or t
  misc_feature (3575)..(3580): n is a, c, g, or t
  misc_feature (3583)..(3592): n is a, c, g, or t
  misc_feature (3596)..(3596): n is a, c, g, or t
  misc_feature (3598)..(3601): n is a, c, g, or t
  misc_feature (3603)..(3611): n is a, c, g, or t
  misc_feature (3613)..(3613): n is a, c, g, or t
  misc_feature (3615)..(3623): n is a, c, g, or t
  misc_feature (3627)..(3627): n is a, c, g, or t
  misc_feature (3630)..(3630): n is a, c, g, or t
  misc_feature (3633)..(3635): n is a, c, g, or t
  misc_feature (3637)..(3645): n is a, c, g, or t
  misc_feature (3647)..(3647): n is a, c, g, or t
  misc_feature (3649)..(3652): n is a, c, g, or t
  misc_feature (3654)..(3655): n is a, c, g, or t
  misc_feature (3659)..(3659): n is a, c, g, or t
  misc_feature (3661)..(3662): n is a, c, g, or t
  misc_feature (3665)..(3665): n is a, c, g, or t
  misc_feature (3667)..(3668): n is a, c, g, or t
  misc_feature (3671)..(3671): n is a, c, g, or t
  misc_feature (3676)..(3677): n is a, c, g, or t
  misc_feature (3680)..(3680): n is a, c, g, or t
  misc_feature (3682)..(3682): n is a, c, g, or t
  misc_feature (3685)..(3685): n is a, c, g, or t
  misc_feature (3688)..(3689): n is a, c, g, or t
  misc_feature (3691)..(3692): n is a, c, g, or t
  misc_feature (3699)..(3699): n is a, c, g, or t
  misc_feature (3701)..(3701): n is a, c, g, or t
  misc_feature (3703)..(3703): n is a, c, g, or t
  misc_feature (3705)..(3708): n is a, c, g, or t
  misc_feature (3714)..(3719): n is a, c, g, or t
  misc_feature (3721)..(3721): n is a, c, g, or t
  misc_feature (3725)..(3726): n is a, c, g, or t
  misc_feature (3730)..(3730): n is a, c, g, or t
  misc_feature (3733)..(3733): n is a, c, g, or t
  misc_feature (3735)..(3735): n is a, c, g, or t
  misc_feature (3740)..(3742): n is a, c, g, or t
  misc_feature (3744)..(3745): n is a, c, g, or t
  misc_feature (3747)..(3749): n is a, c, g, or t
  misc_feature (3751)..(3754): n is a, c, g, or t
  misc_feature (3756)..(3757): n is a, c, g, or t
  misc_feature (3760)..(3760): n is a, c, g, or t
  misc_feature (3763)..(3765): n is a, c, g, or t
  misc_feature (3774)..(3774): n is a, c, g, or t
gacatcctggccgcccggcaggacatttttcacaaagccctcgtcgcggcgccagctgtctagcactagtcgagcgcggatgcgctcattgaccgggacgttgagcacgccctgaagtcgaccttcgtcatagctggcatagcttccaagcacgtagccttcgaacctgtcggtcgggtcctgcgtgacgaaattcacaaccccaccgttggcgttgcgtccgtacaatgtgccctgcggtccgcgcagcacctcgacacgggcaatgtcggtttgcgcaaggtcacccatcgaggggcgaggttgatagaccccgtccacgtggatagcgacgcctggcgagccctggttaagtccgacaccgcgaatggtgattgctgtctgccccaacaagcggccagcctgcatgctcggcacgatgaattgtaggccttcaggttgggagaccccccgctgctgaagcaccgcgccactgacagcggtaatggcggcggggatgtcctggacggtctcggaacgcttctgcgcggtgaccaccaattcgtcgaccattgaagcaggacccgtctctgcctgcgcgccccatgcatccgtcgtgagaagccaaggcgccatcatggcggacgcacacagagaaatgcggacggcgtgtttcatggttccccttcaagtttcgctcgctcaggtgaagcgaaggttcgccccacaaccggcggcgaaggcgcttccaagtctgagggcagactccgactcgtcctcccattcgtcaagcattttaggtagaacgtccgactttggcgcgttgcttgggtgcagaaaggtgcacctcggccgccgcctgcgtgcgcaaaaatgcacccggataccgcgaatgatgtggataatcgcatgttttcgtccacgagatgcgcggctgaggctccacacggtcactngacaatctaggacatatgcataatatttcggctgtcggcggtgtcgtcagggcatgcgccggagctgtcgcggtaggttattgtccacgcggcttagaccagcagaaggagcgcgacagtgagcaaggtggacctttggcaggatgcgacggcccaggccgaactcgtgcgctcgggagagataagccggaccgaactgctggaggcgacgatcgctcatgtccaagctgtgaacccagagatcaatgccgtcatcatcccgctctttgagaaggcgcggcgtgagagcgagttggcctccgggcccttcgctggcgtgccctatcttctgaaggacctcaccgtcgtgagccaaggcgatatcaacacgtccagcatcaaaggcatgaaagagtccggctacagagccgaccacgatgcctatttcgtgcagcggatgcgcgcggcggggttcgttttgctcggcaaagttaatacaccggagatgggcacgcaggtaacgacggagcccgaagcgtggggcgccactcggaacccttggaacctcggacggtcggttggcggatccagcggcggctcaggggctgcggtagccgcggctctgtcaccggttgcgcacggcaatgacgcggcaggttccgtgcgcatacctgccagcgtctgcggcgtcgtcggcctcaagccgacgcgtgggcggatatccccaggccccttggtcactgattcagacaacgtcgcagganccgcccatgaaggcctctttgcgcgaagcgtgcgggacatcgcggcgttactggacgtcgtcagcggccatcggccgggcgacacgttctgcgcaccgacagcgtcacggccctacgcccagggcataagcgagaatccgggcagtctccgcgtgggggtcctgacccacaaccccgttggcgacttcgctctggatccggaatgcgccgcggcggcacggggcgccgctgcggcgcttgccgcgctcggccatgacgtgaacgacgcctacccagaggcgctcggcgatcggtccttcctcaaggacntctcgacgattngcgacgtcgcgatcgcgcgagagatcgaacgcaacggagaactgatcggccggccgctgacggaggatgacgttgagtggaccagttgggaaatggtcaaacgcgcagaccaagtcacggggcgcgccttcgccgcgtgcgtggacgagcttcgatactacgctgggaaggtggagcgttggtgggaggcgggttgggacctcctgatcttgccgactgtaacgcgtcagacgccggaaattggggaactcatgctcgccaagggaaccgacttggaagggcgtcantccgcctttatctcgggcagtctgcggatgctggccttcaccgttcccttcaacgtttcggggcagccggctatctccctccccatcggcatgtctagcgatgggatgccgattggggtgcagatcgtcgcggcctatggacgcgaggacctcctccttcaggtggccgcgcagttggaaggggcgctgccatgggtcgctcggcggccccaattgctgaacccgtcgcggaagatcccagcggcctgatgcttgcgggagatggggtccggccgacagatacgggccgggcccaggtttcgtccccaactggcaccccacaccgccttagtgaaggtccgcctcggggacgccccacagccggattgaggccactcttttctgtgctggaaccccggcctgtcgtcgcctgcttgtgagctcgcaccacggtcgagcttagcatcaggtactgagtgtctcaatccttcgtcagttcgtcgatcagacgctcccacacccggccgccgcccaccgactgaagagcttgccgtattccacttgccgtaccgctcgagcatgcgccggccagatcgagccggtcgtggggctcttccagtcgacggcaggcaagagggggctggcgcgcatggtgccccagggttcagccgatcccacgcttcggggcctcccggctccatcctttctccgtgccgtgggcgttgcggggcctgctcgctcgaaggggtcggtcgagccctgggctcggccgagggggagcattgtatgggggaattcctggtcaaggtccgacacctgccgggccgatcagcgatcacaggatcgggcacgtcgccgatcgccttcgttccggggtgtccttctgggacgccgacctccagcgcacccgcgcctacgacgatgaggtctacgaaatgctgcggaagtnnnnnngccncnnagannnnnnnnncnnnnnnggnnannnnangncnnngnnnnnnnnngnntnnnnnntngnnnnanctcnnnnntnnnnnnnnnnnnncntnannccnntgnncncncccnnnnnngnnnnnnctnncnncgnncncnncnanncnnnngncgnnnnnncnnnnnnnnnnnngnnnnccnnnntnnannncnnnntnnnnnccntcntcncngncgnnnnngannnnnnnnncnncnccnngnncnngnannnctnnncnnnnnnngtnnnnnncnnnnncngnnnnngnancnnnnnnnncgatncncnnnnnngnnnnnnnnncnncgnnnnnncgnnncncngntcnnnnnngtnnnnnnnnnngtgncnnnncnnnnnnnnnanannnnnnnnngcgncgntgnnnannnnnnnnncngnnnncnncctngnnggngnntcnacganncgnanggncanncnngtgaagncncntnnnntccatnnnnnntngaanncgcnggncncccgnnngnncnnngnnnngnncgngcnnntgcgtgagnttcgcacgaggccgttaggtgaggccggcccgttcacgttcgtcgcgtgcgacgcactcacgatgaaagtgcgtgagggcgggcgggtgatcaacaccatggtgctcgtcgcgaccggggtgaacgctgacgggcatcgggaagtcctgggcatgcaagtggcgaccgcggagaccacgatggcgtggaacgggttcttcgcagaccttgtcgcgcgcggcctcac

SEQ ID NO: 785 - DNA, 4000 bp, Escherichia coli
  misc_feature (2)..(3): n is a, c, g, or t
  misc_feature (6)..(8): n is a, c, g, or t
  misc_feature (10)..(10): n is a, c, g, or t
  misc_feature (17)..(17): n is a, c, g, or t
  misc_feature (20)..(20): n is a, c, g, or t
  misc_feature (22)..(22): n is a, c, g, or t
  misc_feature (25)..(25): n is a, c, g, or t
  misc_feature (29)..(29): n is a, c, g, or t
  misc_feature (35)..(38): n is a, c, g, or t
  misc_feature (41)..(43): n is a, c, g, or t
  misc_feature (47)..(47): n is a, c, g, or t
  misc_feature (431)..(431): n is a, c, g, or t
  misc_feature (1652)..(1652): n is a, c, g, or t
  misc_feature (1834)..(1834): n is a, c, g, or t
  misc_feature (1989)..(1990): n is a, c, g, or t
tnnacnnntnatatatnatnanagngggnggcgcnnnnggnnnaaanaaaaggagccgctgattaagcgaccccaattcctatttagttcttttgcttgtgtgctctgatgattgcccttgtgatctgaacgccagcaataatcgccgcgccaatcatcataccatggatcacatttttggcgccttgtctcattccttcgttataaaatgctgtcaaagccgccccatgcttatccaaaagcaaattaagctcgtcgatttgtgcattcgtcatgtatttcatatagaacacctccataaaacccactgtaaatcttgcgaaaggagacacccaatgaagaaacacgtgaacccagccaagcatttgcatgaagtctatactatgcagggcggcgtaaaagagtacaacaaaaatcagcgagcctggggngcgctactatttgcgggcagcgtttttctactccatgcggtaggcggccgtatcgttgacaaaatcgaacgccgagaaattaaagccttgaaaaagagggatgacctatgctgacccaatgcccagagtgcgaattgccagtgagcgataaggcaaatgcctgtcctcattgcggatatcctctgaaaccttctgaaaaaataaaaagacctcgcaaatccaacaagcgacggcgattgccgaatggctttggtcagatcagtgagatcaaaaatcgtaatttgagaaatccattccgagccatggtaactgtggggaaaacttctaatggcagacccatttgcaaaccgctcaagccggaatcatacttcgccacctataacgatgcctatgccgctctggtggaatataacaagaatccatatgaccttggaacagccatcaccatgcaggagctctatgacaagtggcttccagaatacgaaaagaccgtcaagagtacaaaggcggtgaccagtgcctggccttactgttcggcagtttacaagatgcgagttatggacattcgagcccgtcatgtaaaaggctgcatggaagagggcgtggccactgttcgaggcagagagcagcatccaacagccaccatgaagaaccaaatcaaatccatgtttaacatgatgctggactatgcgttggaatatgagttagtggatcgaaactattccagaaccttcaacctcacggaagaaaccgtcaaagagatccagaaagtaaagaaggggcatatcgcttttacagatgatgaaatggaattgctctggaataatatcgatgagaaacatggtatcgacatcctgcttatccagtgctactccggctggcgccctcaggaactgggactactggaactaaaggatgtggatttagagagctggacatttcaaggcggcatgaagacggatgccggtgagaatcgtgttgtccccattcattcccgtattcaggacctggtactcaaaaaatatcgagaagcagaagcaatcggaagcccgtatctgcttaactgggcagaccccaacaaccgaaacaagaagaactttgagttgacctatgctcggtatcagaaagccttcgagcgtatccgtgatgaattgaaactaaaccccgagcaccgtcctcacgatggtcgcacccactttgtgaccatggcaaaacgctatngggtggatgagtatgccatcaaatatatggtaggtcacaagatctccgacatcacagaaaaggtctacacgcgccgcgaatttacttggcttcgagaggagattgagaaaataaaatagaccttgccaagctcgctttcagtgtaggagtataggtgtagaaataaaatcaaccacatcaanaagtgtaggaatatggttgtatgaatggtacagaaataatatacgaattacctacacttacccacttttaactactcttatctgttctaaaaaccattggcattacagcagttaacagcacttagaagcaggtaaaagtgtagttagtttctatnntaaaaaccaattatcccgtaaccccaaggcaaaaacggtcaaggtgtaggagtaatcgaggaataatcgactctcctacacctctttttacaccgttctgccgctttagatacaggagcagaggccagatccgctcgcatcagtatccacgcacatcctcgacaaatgacccgtttctcaagtggttttcgtacgcttctcgaatgatgcgaatagcgatgtctacttctccattttgaagatcgttgtctttgatgatctcctcatattccgcatagatccgaaagactcgcttaaactgctccctggtcacaggattatcggggcaaacgcagtacgaggcaaaacttatgatcgaactgcgcttgctttcaatgtagagagacatggtgatttcggtgttcttatccatttcttctttcagaacctcaatggactgatcatacaccactgctctatcatttacccatttcatccaggcgtcacgcttggcgatattatcttcgctgtaatgggattccacgctgttcaacacggtcttcacatcgtgaatcgtcgcggacatttctcgcatggtctgccgttcctgcttcttccgagcaaaatatttcctgatcttaatgaactcgggaacgactttccccttaaactccaaaatttcgccaacgatctgcatgatcaaaaaaacgccgataatagccagacctaaagcgataggtatgttcaggtactcgatatagctgatcatgttaaccgatcacccacctcgacaaaggtgggtttcttttcttccgccatcatccaacctccttcaaagcaggcaaatttggaaagcttaggctttgggactcagcatcccgagcagttcctgatactcgctctcgctgattttgtcggcggcatagaaaatatcgagcttcgtctcgatacccgccgtctggcctctctcgatcatgcgcttcaaagttcggtacaacatagtagttttcccctttcttaaatatccagctccgtcagacccagctccagcagagtcagacggaattcctggtccacgttcatggcatccgtatccacttgtgcggaatacagtgcccgattgctgcggtcgatctcgttgtctactccctttctcaggaacgtctcgtagttctcccgcacgtttgccgcgatgccgtcccaggtctccacctccacatggtactcgtcgtactcatatccggtgaagtcctcggtctggacaggcgtcacgttctggaaaagccgtacaaggcttcttccgcttccgggaatgcgctccacggtaaaactgccggggtcaaccatcccttgtactttcatggtgccgctcctttcacgccgcctggtagggcggatataatttctgaagccgtctgcactcttttcggacgactttcttaagatcgaacatggtcttcggctggtaataccgctccaaaatccgttgacaatcgcactttcggagctgcccaagccgtgagatcaggccggaggcccgcttaaacgagatgacccggtttcgatcccttcggtagtaatataaatgcagcgactgcttgagccgaaacaggttgtgctttcggaggatggtgtaaccgtgcccgaaccggtagcccagcgccgacggaatcctcggccgtcttcggcgctgtttggcctcgggcagctgctctctggccttctccacccttggggtaaagccgatccgaaagacctgccagttgtctttcagctttagtcccacgtcggccagccacgcctgaatatcccggatcagcttccgcaatttccgcttgctggaggcgaagatggtgaagttgtccatctgccgcaggtagtggctgacgccgtactccctttggtggatcatcaggtccagcggctggagtaccaggtgcaggaaccaggcggagaagaacgcgccgataagtacgccgtattccatcagggcgtcgcacagccagagggtctcccggtccttgaacagcc

SEQ ID NO: 786 - DNA, 4000 bp, Escherichia coli
  misc_feature (1443)..(1443): n is a, c, g, or t
  misc_feature (1491)..(1491): n is a, c, g, or t
  misc_feature (1656)..(1656): n is a, c, g, or t
  misc_feature (1829)..(1829): n is a, c, g, or t
  misc_feature (1945)..(1945): n is a, c, g, or t
  misc_feature (2771)..(2771): n is a, c, g, or t
  misc_feature (3077)..(3077): n is a, c, g, or t
  misc_feature (3188)..(3188): n is a, c, g, or t
  misc_feature (3248)..(3248): n is a, c, g, or t
  misc_feature (3469)..(3469): n is a, c, g, or t
  misc_feature (3577)..(3577): n is a, c, g, or t
  misc_feature (3727)..(3727): n is a, c, g, or t
  misc_feature (3732)..(3732): n is a, c, g, or t
  misc_feature (3736)..(3736): n is a, c, g, or t
  misc_feature (3750)..(3750): n is a, c, g, or t
  misc_feature (3801)..(3801): n is a, c, g, or t
  misc_feature (3826)..(3826): n is a, c, g, or t
aacagtggagaagttctcgattctaacgatttggagcgtgaacgtgggataacaattctgagtaagaatgtaagtattaattggaaaggagtaaaaatcaatattcttgatacaccgggtcactctgactttggtggtgaagtagagcgtgtcttgaacatggcagacggctgtctgttacttgttgatgcgttcgaaggccctatgccacaaacacgctttgtgttgcagaaggctttacagcttggtttgaaacctgttgtggttattaataaggtggataaaccgaactgtcgccctgaggaagtatatgaaatggtctttgatcttatgtgcgatcttaatgcaacagaagaacaattaaacttccctgtggtatatggttctgctaaaaatggttggatgggtgccgattggaagaaaccaacagataatatagagtacttgctcgaccttatccttaaggaaatacctgctcctaagcagcttgaaggtactccacagatgctgattacttctttggactactcaagttatacaggacgtattgccgttggtcgtgtacaccgtggtactttgaaagatggacagaatgtaactatctgtcatcgtgatggtactcaggagcgaacaaagatcaaagagcttcacacctttgagggtatggggcacaaaaagactgaccatgttgattcaggtgatatctgtgcggtaataggtttggagaagtttgagattggtgatactattgcagactttgataatccagaacctctgccaccaattgctgttgatgagccaacaatgagtatgctcttcaccatcaatgattctcctttctttggtaaagagggtaagttctgtacttcacgtcacatcagtgaccgtttgagcaaagagcttgagaagaaccttgctttgcgtgttcgcccgatggaaggctctatggacaagtggattgttagtggtcgtggtgtgctccacctctctgtcctcgttgagactatgcgccgtgagggctatgagttacaggttggtcagccacaagttatctataaagagattgacggtcagaagtgtgagcctattgaagagttgacaatcaatgtcccaactgatttctccagtaagatgattgatatggtaacccgtcgtaaaggtgaccttcttggtatggatgctgagggtgatcgtgtcaatattacctttgaaattccttcacgtggtatcattggtttgcgtaccaacgtactgacggcaagtcagggtgaggctattatggcacaccgtttcaaggattatcaaccgtttaagggtgagattatccgtcgtactaatggctcaatgatagctctggaggctggtactgcttatgcttatgctattgataagttacaggatcgcggtaagttcttcattgatgctggtgaagaggtgtatggnggtcaggttgttggtgagcatgttcatgataatgaccttgttatcaangttactaaagctaaacagttgacgaacgtccgtgcatcaggttctgatgagaaggctcgtgttatccctaagactgagatgagtcttgaggaatgtttggagtatattaagggtgatgaatatgttgaagtgacccctaagaatattcgtatgcgtaagattacncttgatcatttagagcgtaaacgccagaataaggattaaatcttatttcaatcataagtcgggaggcgactgtccatatagggcagccgcctctttccgtatgtgagtagatgtcgttcttatgattcataagggttatagaaatacctttacaattattttctccatttaantctgatttgaaaggattggcttcttttccgcttttgtaaactacagataatcagcaggttatcttgagcgttttaaaaggtgcccttttgcagttcaaaagggcaccttttacatngcaaaagggcatcttttgacttgcaaaagatgcccttttagaatgtaaaagaccgtcaattagtttctatgtttgaattaatcttacaatcaatgggaatctaattcttaatcggtcattatgaactctattaggagttcctattataattctcgtttctcgttatttcacgatctcttttactgtacgaccatcactgtatttcacaatgttcaaaccacgtgtaggttgtgagatacggcatccagctgcgttgtaacgagcaacttctactacttctccagttgttggtgcattctcaatgccagttgatgtgtggtcagaaatctcacatttatcagcgtttacaatctcacctgtctgagtgttgattaccaatacacaaactgaaagttttgatttatcctggataagagaatactgtgatatattcttgaaagctgtttggtgtacttgtactttgtcagctacgataggagtgctgatacttccttgtagacctctggttacacctaaagctgcaatagctgtatggtcaaactttaagttgtaaactgggtttgaagaattcacaaagaagtcaaggtcttgtgagtaacctctgtattggtagcctccagcgaaaccgttcttctggtagtatgaacggctctgcagaccgtctgccaacagtacataagcgagtgcatagtgtgagttgtacttgctgacacggaaagttgttctcgttgtgattgagatattgcgcttccattcatcccatgcagcaaagaccttaacatccatttctgctcctctgttctgttctgaacggaacgttgactcncctgtgtagtcattggtatcagttcttctgtcaaatctaacagtaggatatccagagacacgtatgccagagtaatcatcacattccaatgcatcagaattgtgaacggcgataccgatgaagtcatttggatgggtacgagttaggtaagataatacagccatacctcttgggcaccatggacaccacataccagtgaagtcttctactacgactttgcgcttaggagtctgtgtaagtgttgttcgggtaatggtagtgtaaggctctgtagtgtttgttggttgaccattaacctttgtgatnttaagcgcaagctcgtcaacggtaggatcagtagaaggaggaactacaacattgagtgtctgattgctgcgtgttctgcctgctccgttaagtgcaatggttttcgtttcnattacttcaccattgcgtgttagtgtgtattcaatactctttgccccatttgtgatgttngtaagaggcacaggaacgttgactcctgttgaatttagattaacataagcttcttgtgaaggaacttgtgcgaatgcattagtttgcattaatgccagtgatagggctaagaaaagcctcagtgttatttttttctgcatgatttttatttttaaaggtttattgtttaggtttactgaatgatgtgtttctctgcacttaagacacccttgttgtctttnttctggatgatgtaagtacctttggcaagtccttgtaatgatgaaatacccttaccaacgagcttaccctgcagcgtgtagacggtataagtaactggtccttctgtnctgacagtgttaatgcctgtggcagtcttgtcgaaaacaatagtaatctttggacctggcttatctgttacccagtcatcaccagccttctttgcagtatacagttgtacttgaacggtacagttagcctggttggtagcttgttctgcnaggcngaantccatctcaagtgnagtcaaatcagtcttttttgctgaaagatcacctgcttcagaagtataagnaccaacctttttccatcgtttgcancctgctgggaagcatacttgcagtactccttctttcatatttttaaccgttcctacgaggattactttctgagcattgcctgatatgttgcggacagagatgtctgcaggcatgattagaccagcttctggtactcctggaacgaattcttccaccttgttgaaggtgacagta

SEQ ID NO: 787 - DNA, 4000 bp, Escherichia coli
  misc_feature (1)..(15): n is a, c, g, or t
  misc_feature (17)..(17): n is a, c, g, or t
  misc_feature (19)..(25): n is a, c, g, or t
  misc_feature (27)..(48): n is a, c, g, or t
  misc_feature (50)..(67): n is a, c, g, or t
  misc_feature (69)..(89): n is a, c, g, or t
  misc_feature (91)..(98): n is a, c, g, or t
  misc_feature (100)..(103): n is a, c, g, or t
  misc_feature (105)..(108): n is a, c, g, or t
  misc_feature (110)..(111): n is a, c, g, or t
  misc_feature (113)..(114): n is a, c, g, or t
  misc_feature (116)..(123): n is a, c, g, or t
  misc_feature (126)..(147): n is a, c, g, or t
  misc_feature (149)..(170): n is a, c, g, or t
  misc_feature (172)..(177): n is a, c, g, or t
  misc_feature (179)..(191): n is a, c, g, or t
  misc_feature (193)..(196): n is a, c, g, or t
  misc_feature (198)..(199): n is a, c, g, or t
  misc_feature (201)..(213): n is a, c, g, or t
  misc_feature (215)..(224): n is a, c, g, or t
  misc_feature (226)..(239): n is a, c, g, or t
  misc_feature (241)..(242): n is a, c, g, or t
  misc_feature (244)..(246): n is a, c, g, or t
  misc_feature (248)..(255): n is a, c, g, or t
  misc_feature (257)..(264): n is a, c, g, or t
  misc_feature (267)..(272): n is a, c, g, or t
  misc_feature (274)..(297): n is a, c, g, or t
  misc_feature (299)..(305): n is a, c, g, or t
  misc_feature (307)..(309): n is a, c, g, or t
  misc_feature (311)..(326): n is a, c, g, or t
  misc_feature (328)..(329): n is a, c, g, or t
  misc_feature (331)..(338): n is a, c, g, or t
  misc_feature (340)..(346): n is a, c, g, or t
  misc_feature (348)..(350): n is a, c, g, or t
  misc_feature (352)..(368): n is a, c, g, or t
  misc_feature (370)..(389): n is a, c, g, or t
  misc_feature (391)..(394): n is a, c, g, or t
  misc_feature (396)..(397): n is a, c, g, or t
  misc_feature (399)..(401): n is a, c, g, or t
  misc_feature (403)..(407): n is a, c, g, or t
  misc_feature (409)..(418): n is a, c, g, or t
  misc_feature (420)..(423): n is a, c, g, or t
  misc_feature (425)..(432): n is a, c, g, or t
  misc_feature (435)..(435): n is a, c, g, or t
  misc_feature (438)..(443): n is a, c, g, or t
  misc_feature (445)..(445): n is a, c, g, or t
  misc_feature (447)..(450): n is a, c, g, or t
  misc_feature (452)..(452): n is a, c, g, or t
  misc_feature (455)..(458): n is a, c, g, or t
  misc_feature (461)..(462): n is a, c, g, or t
  misc_feature (464)..(468): n is a, c, g, or t
  misc_feature (470)..(471): n is a, c, g, or t
  misc_feature (473)..(476): n is a, c, g, or t
  misc_feature (478)..(481): n is a, c, g, or t
  misc_feature (483)..(487): n is a, c, g, or t
  misc_feature (489)..(490): n is a, c, g, or t
  misc_feature (492)..(503): n is a, c, g, or t
  misc_feature (506)..(506): n is a, c, g, or t
  misc_feature (508)..(508): n is a, c, g, or t
  misc_feature (513)..(515): n is a, c, g, or t
  misc_feature (517)..(519): n is a, c, g, or t
  misc_feature (523)..(524): n is a, c, g, or t
  misc_feature (527)..(537): n is a, c, g, or t
  misc_feature (539)..(539): n is a, c, g, or t
  misc_feature (541)..(541): n is a, c, g, or t
  misc_feature (548)..(552): n is a, c, g, or t
  misc_feature (555)..(557): n is a, c, g, or t
  misc_feature (559)..(560): n is a, c, g, or t
  misc_feature (562)..(564): n is a, c, g, or t
  misc_feature (566)..(566): n is a, c, g, or t
  misc_feature (569)..(575): n is a, c, g, or t
  misc_feature (577)..(593): n is a, c, g, or t
  misc_feature (595)..(607): n is a, c, g, or t
  misc_feature (609)..(632): n is a, c, g, or t
  misc_feature (634)..(647): n is a, c, g, or t
  misc_feature (649)..(653): n is a, c, g, or t
  misc_feature (655)..(669): n is a, c, g, or t
  misc_feature (671)..(684): n is a, c, g, or t
  misc_feature (686)..(703): n is a, c, g, or t
  misc_feature (705)..(711): n is a, c, g, or t
  misc_feature (713)..(718): n is a, c, g, or t
  misc_feature (720)..(724): n is a, c, g, or t
  misc_feature (726)..(747): n is a, c, g, or t
  misc_feature (750)..(752): n is a, c, g, or t
  misc_feature (754)..(765): n is a, c, g, or t
  misc_feature (767)..(767): n is a, c, g, or t
  misc_feature (770)..(772): n is a, c, g, or t
  misc_feature (775)..(775): n is a, c, g, or t
  misc_feature (780)..(781): n is a, c, g, or t
  misc_feature (783)..(783): n is a, c, g, or t
  misc_feature (785)..(785): n is a, c, g, or t
  misc_feature (791)..(796): n is a, c, g, or t
  misc_feature (799)..(803): n is a, c, g, or t
  misc_feature (806)..(807): n is a, c, g, or t
  misc_feature (809)..(819): n is a, c, g, or t
  misc_feature (821)..(826): n is a, c, g, or t
  misc_feature (828)..(835): n is a, c, g, or t
  misc_feature (838)..(838): n is a, c, g, or t
  misc_feature (840)..(842): n is a, c, g, or t
  misc_feature (847)..(847): n is a, c, g, or t
  misc_feature (850)..(850): n is a, c, g, or t
  misc_feature (853)..(856): n is a, c, g, or t
  misc_feature (858)..(861): n is a, c, g, or t
  misc_feature (863)..(863): n is a, c, g, or t
  misc_feature (865)..(869): n is a, c, g, or t
  misc_feature (871)..(871): n is a, c, g, or t
  misc_feature (873)..(877): n is a, c, g, or t
  misc_feature (879)..(886): n is a, c, g, or t
  misc_feature (888)..(891): n is a, c, g, or t
  misc_feature (893)..(893): n is a, c, g, or t
  misc_feature (895)..(897): n is a, c, g, or t
  misc_feature (899)..(900): n is a, c, g, or t
  misc_feature (902)..(903): n is a, c, g, or t
  misc_feature (905)..(906): n is a, c, g, or t
  misc_feature (909)..(910): n is a, c, g, or t
  misc_feature (914)..(918): n is a, c, g, or t
  misc_feature (920)..(921): n is a, c, g, or t
  misc_feature (924)..(924): n is a, c, g, or t
  misc_feature (927)..(929): n is a, c, g, or t
  misc_feature (932)..(935): n is a, c, g, or t
  misc_feature (937)..(937): n is a, c, g, or t
  misc_feature (939)..(939): n is a, c, g, or t
  misc_feature (942)..(942): n is a, c, g, or t
  misc_feature (945)..(946): n is a, c, g, or t
  misc_feature (948)..(952): n is a, c, g, or t
  misc_feature (954)..(955): n is a, c, g, or t
  misc_feature (957)..(960): n is a, c, g, or t
  misc_feature (962)..(962): n is a, c, g, or t
  misc_feature (965)..(965): n is a, c, g, or t
  misc_feature (967)..(970): n is a, c, g, or t
  misc_feature (972)..(973): n is a, c, g, or t
  misc_feature (975)..(979): n is a, c, g, or t
  misc_feature (981)..(982): n is a, c, g, or t
  misc_feature (985)..(985): n is a, c, g, or t
  misc_feature (987)..(987): n is a, c, g, or t
  misc_feature (989)..(989): n is a, c, g, or t
  misc_feature (992)..(995): n is a, c, g, or t
  misc_feature (997)..(1000): n is a, c, g, or t
  misc_feature (1003)..(1007): n is a, c, g, or t
  misc_feature (1009)..(1010): n is a, c, g, or t
  misc_feature (1012)..(1016): n is a, c, g, or t
  misc_feature (1018)..(1026): n is a, c, g, or t
  misc_feature (1028)..(1028): n is a, c, g, or t
  misc_feature (1030)..(1031): n is a, c, g, or t
  misc_feature (1033)..(1037): n is a, c, g, or t
  misc_feature (1039)..(1040): n is a, c, g, or t
  misc_feature (1042)..(1045): n is a, c, g, or t
  misc_feature (1048)..(1051): n is a, c, g, or t
  misc_feature (1053)..(1054): n is a, c, g, or t
  misc_feature (1056)..(1057): n is a, c, g, or t
  misc_feature (1061)..(1065): n is a, c, g, or t
  misc_feature (1067)..(1067): n is a, c, g, or t
  misc_feature (1070)..(1070): n is a, c, g, or t
  misc_feature (1072)..(1084): n is a, c, g, or t
  misc_feature (1086)..(1086): n is a, c, g, or t
  misc_feature (1090)..(1094): n is a, c, g, or t
  misc_feature (1097)..(1107): n is a, c, g, or t
  misc_feature (1109)..(1113): n is a, c, g, or t
  misc_feature (1116)..(1116): n is a, c, g, or t
  misc_feature (1119)..(1119): n is a, c, g, or t
  misc_feature (1121)..(1121): n is a, c, g, or t
  misc_feature (1125)..(1131): n is a, c, g, or t
  misc_feature (1133)..(1134): n is a, c, g, or t
  misc_feature (1136)..(1136): n is a, c, g, or t
  misc_feature (1138)..(1143): n is a, c, g, or t
  misc_feature (1145)..(1152): n is a, c, g, or t
  misc_feature (1154)..(1154): n is a, c, g, or t
  misc_feature (1156)..(1157): n is a, c, g, or t
  misc_feature (1159)..(1159): n is a, c, g, or t
  misc_feature (1162)..(1163): n is a, c, g, or t
  misc_feature (1165)..(1168): n is a, c, g, or t
  misc_feature (1170)..(1171): n is a, c, g, or t
  misc_feature (1173)..(1176): n is a, c, g, or t
  misc_feature (1178)..(1183): n is a, c, g, or t
  misc_feature (1185)..(1187): n is a, c, g, or t
  misc_feature (1189)..(1189): n is a, c, g, or t
  misc_feature (1191)..(1191): n is a, c, g, or t
  misc_feature (1193)..(1193): n is a, c, g, or t
  misc_feature (1195)..(1197): n is a, c, g, or t
  misc_feature (1199)..(1199): n is a, c, g, or t
  misc_feature (1203)..(1206): n is a, c, g, or t
  misc_feature (1208)..(1211): n is a, c, g, or t
  misc_feature (1213)..(1220): n is a, c, g, or t
  misc_feature (1222)..(1223): n is a, c, g, or t
  misc_feature (1225)..(1226): n is a, c, g, or t
  misc_feature (1228)..(1228): n is a, c, g, or t
  misc_feature (1230)..(1232): n is a, c, g, or t
  misc_feature (1234)..(1236): n is a, c, g, or t
  misc_feature (1238)..(1243): n is a, c, g, or t
  misc_feature (1245)..(1245): n is a, c, g, or t
  misc_feature (1247)..(1248): n is a, c, g, or t
  misc_feature (1250)..(1250): n is a, c, g, or t
  misc_feature (1254)..(1256): n is a, c, g, or t
  misc_feature (1258)..(1260): n is a, c, g, or t
  misc_feature (1263)..(1269): n is a, c, g, or t
  misc_feature (1271)..(1301): n is a, c, g, or t
  misc_feature (1303)..(1304): n is a, c, g, or t
  misc_feature (1306)..(1308): n is a, c, g, or t
  misc_feature (1310)..(1316): n is a, c, g, or t
  misc_feature (1318)..(1320): n is a, c, g, or t
  misc_feature (1326)..(1332): n is a, c, g, or t
  misc_feature (1334)..(1344): n is a, c, g, or t
  misc_feature (1346)..(1347): n is a, c, g, or t
  misc_feature (1350)..(1350): n is a, c, g, or t
  misc_feature (1352)..(1352): n is a, c, g, or t
  misc_feature (1354)..(1354): n is a, c, g, or t
  misc_feature (1357)..(1365): n is a, c, g, or t
  misc_feature (1367)..(1374): n is a, c, g, or t
  misc_feature (1376)..(1376): n is a, c, g, or t
  misc_feature (1378)..(1378): n is a, c, g, or t
  misc_feature (1381)..(1387): n is a, c, g, or t
  misc_feature (1389)..(1398): n is a, c, g, or t
  misc_feature (1400)..(1403): n is a, c, g, or t
  misc_feature (1405)..(1406): n is a, c, g, or t
  misc_feature (1408)..(1410): n is a, c, g, or t
  misc_feature (1412)..(1412): n is a, c, g, or t
  misc_feature (1415)..(1416): n is a, c, g, or t
  misc_feature (1419)..(1419): n is a, c, g, or t
  misc_feature (1421)..(1422): n is a, c, g, or t
  misc_feature (1424)..(1424): n is a, c, g, or t
  misc_feature (1426)..(1426): n is a, c, g, or t
  misc_feature (1428)..(1429): n is a, c, g, or t
  misc_feature (1432)..(1433): n is a, c, g, or t
  misc_feature (1435)..(1436): n is a, c, g, or t
  misc_feature (1439)..(1440): n is a, c, g, or t
  misc_feature (1442)..(1444): n is a, c, g, or t
  misc_feature (1446)..(1446): n is a, c, g, or t
  misc_feature (1448)..(1450): n is a, c, g, or t
  misc_feature (1453)..(1454): n is a, c, g, or t
  misc_feature (1456)..(1457): n is a, c, g, or t
  misc_feature (1459)..(1464): n is a, c, g, or t
  misc_feature (1466)..(1466): n is a, c, g, or t
  misc_feature (1468)..(1469): n is a, c, g, or t
  misc_feature (1471)..(1471): n is a, c, g, or t
  misc_feature (1474)..(1476): n is a, c, g, or t
  misc_feature (1478)..(1479): n is a, c, g, or t
  misc_feature (1482)..(1483): n is a, c, g, or t
  misc_feature (1486)..(1489): n is a, c, g, or t
  misc_feature (1491)..(1492): n is a, c, g, or t
  misc_feature (1494)..(1494): n is a, c, g, or t
  misc_feature (1496)..(1496): n is a, c, g, or t
  misc_feature (1498)..(1500): n is a, c, g, or t
  misc_feature (1504)..(1504): n is a, c, g, or t
  misc_feature (1506)..(1506): n is a, c, g, or t
  misc_feature (1509)..(1514): n is a, c, g, or t
  misc_feature (1516)..(1517): n is a, c, g, or t
  misc_feature (1519)..(1520): n is a, c, g, or t
  misc_feature (1522)..(1522): n is a, c, g, or t
  misc_feature (1524)..(1526): n is a, c, g, or t
  misc_feature (1528)..(1531): n is a, c, g, or t
  misc_feature (1533)..(1533): n is a, c, g, or t
  misc_feature (1535)..(1538): n is a, c, g, or t
  misc_feature (1541)..(1541): n is a, c, g, or t
  misc_feature (1543)..(1543): n is a, c, g, or t
  misc_feature (1545)..(1551): n is a, c, g, or t
  misc_feature (1553)..(1556): n is a, c, g, or t
  misc_feature (1558)..(1558): n is a, c, g, or t
  misc_feature (1560)..(1560): n is a, c, g, or t
  misc_feature (1564)..(1568): n is a, c, g, or t
  misc_feature (1570)..(1572): n is a, c, g, or t
  misc_feature (1575)..(1576): n is a, c, g, or t
  misc_feature (1578)..(1579): n is a, c, g, or t
  misc_feature (1581)..(1583): n is a, c, g, or t
  misc_feature (1586)..(1590): n is a, c, g, or t
  misc_feature (1597)..(1597): n is a, c, g, or t
  misc_feature (1599)..(1599): n is a, c, g, or t
  misc_feature (1601)..(1602): n is a, c, g, or t
  misc_feature (1605)..(1607): n is a, c, g, or t
  misc_feature (1612)..(1612): n is a, c, g, or t
  misc_feature (1614)..(1619): n is a, c, g, or t
  misc_feature (1621)..(1624): n is a, c, g, or t
  misc_feature (1627)..(1628): n is a, c, g, or t
  misc_feature (1632)..(1633): n is a, c, g, or t
  misc_feature (1638)..(1644): n is a, c, g, or t
  misc_feature (1647)..(1649): n is a, c, g, or t
  misc_feature (1651)..(1653): n is a, c, g, or t
  misc_feature (1657)..(1657): n is a, c, g, or t
  misc_feature (1659)..(1659): n is a, c, g, or t
  misc_feature (1661)..(1661): n is a, c, g, or t
  misc_feature (1663)..(1679): n is a, c, g, or t
  misc_feature (1681)..(1681): n is a, c, g, or t
  misc_feature (1683)..(1685): n is a, c, g, or t
  misc_feature (1687)..(1692): n is a, c, g, or t
  misc_feature (1696)..(1698): n is a, c, g, or t
  misc_feature (1700)..(1700): n is a, c, g, or t
  misc_feature (1703)..(1703): n is a, c, g, or t
  misc_feature (1707)..(1711): n is a, c, g, or t
  misc_feature (1713)..(1714): n is a, c, g, or t
  misc_feature (1716)..(1727): n is a, c, g, or t
  misc_feature (1729)..(1729): n is a, c, g, or t
  misc_feature (1734)..(1736): n is a, c, g, or t
  misc_feature (1742)..(1743): n is a, c, g, or t
  misc_feature (1748)..(1748): n is a, c, g, or t
  misc_feature (1767)..(1767): n is a, c, g, or t
  misc_feature (1989)..(1989): n is a, c, g, or t
  misc_feature (2326)..(2326): n is a, c, g, or t
  misc_feature (2358)..(2358): n is a, c, g, or t
  misc_feature (2366)..(2366): n is a, c, g, or t
  misc_feature (2398)..(2398): n is a, c, g, or t
  misc_feature (2567)..(2567): n is a, c, g, or t
  misc_feature (2574)..(2574): n is a, c, g, or t
  misc_feature (2576)..(2578): n is a, c, g, or t
  misc_feature (2581)..(2582): n is a, c, g, or t
  misc_feature (2586)..(2586): n is a, c, g, or t
  misc_feature (2590)..(2590): n is a, c, g, or t
  misc_feature (2598)..(2598): n is a, c, g, or t
  misc_feature (2600)..(2600): n is a, c, g, or t
  misc_feature (2605)..(2605): n is a, c, g, or t
  misc_feature (2615)..(2615): n is a, c, g, or t
  misc_feature (2619)..(2619): n is a, c, g, or t
  misc_feature (2623)..(2626): n is a, c, g, or t
  misc_feature (2628)..(2629): n is a, c, g, or t
  misc_feature (2631)..(2632): n is a, c, g, or t
  misc_feature (2634)..(2636): n is a, c, g, or t
  misc_feature (2638)..(2639): n is a, c, g, or t
  misc_feature (2641)..(2643): n is a, c, g, or t
  misc_feature (2645)..(2646): n is a, c, g, or t
  misc_feature (2650)..(2652): n is a, c, g, or t
  misc_feature (2654)..(2654): n is a, c, g, or t
  misc_feature (2656)..(2657): n is a, c, g, or t
  misc_feature (2660)..(2661): n is a, c, g, or t
  misc_feature (2663)..(2663): n is a, c, g, or t
  misc_feature (2665)..(2666): n is a, c, g, or t
  misc_feature (2673)..(2673): n is a, c, g, or t
  misc_feature (2680)..(2681): n is a, c, g, or t
  misc_feature (2685)..(2686): n is a, c, g, or t
  misc_feature (2688)..(2688): n is a, c, g, or t
  misc_feature (2693)..(2693): n is a, c, g, or t
  misc_feature (2695)..(2696): n is a, c, g, or t
  misc_feature (2698)..(2698): n is a, c, g, or t
  misc_feature (2700)..(2701): n is a, c, g, or t
  misc_feature (2703)..(2703): n is a, c, g, or t
  misc_feature (2705)..(2707): n is a, c, g, or t
  misc_feature (2711)..(2711): n is a, c, g, or t
  misc_feature (2715)..(2715): n is a, c, g, or t
  misc_feature (2717)..(2717): n is a, c, g, or t
  misc_feature (2721)..(2721): n is a, c, g, or t
  misc_feature (2723)..(2725): n is a, c, g, or t
  misc_feature (2727)..(2728): n is a, c, g, or t
  misc_feature (2730)..(2730): n is a, c, g, or t
  misc_feature (2732)..(2733): n is a, c, g, or t
  misc_feature (2735)..(2737): n is a, c, g, or t
  misc_feature (2741)..(2741): n is a, c, g, or t
  misc_feature (2743)..(2746): n is a, c, g, or t
  misc_feature (2748)..(2750): n is a, c, g, or t
  misc_feature (2752)..(2752): n is a, c, g, or t
  misc_feature (2754)..(2755): n is a, c, g, or t
  misc_feature (2758)..(2759): n is a, c, g, or t
  misc_feature (2761)..(2762): n is a, c, g, or t
  misc_feature (2764)..(2764): n is a, c, g, or t
  misc_feature (2766)..(2769): n is a, c, g, or t
  misc_feature (2774)..(2775): n is a, c, g, or t
  misc_feature (2779)..(2779): n is a, c, g, or t
  misc_feature (2781)..(2782): n is a, c, g, or t
  misc_feature (2784)..(2784): n is a, c, g, or t
  misc_feature (2792)..(2793): n is a, c, g, or t
  misc_feature (2795)..(2795): n is a, c, g, or t
  misc_feature (2800)..(2801): n is a, c, g, or t
  misc_feature (2806)..(2806): n is a, c, g, or t
  misc_feature (2808)..(2808): n is a, c, g, or t
  misc_feature (2810)..(2811): n is a, c, g, or t
  misc_feature (2813)..(2814): n is a, c, g, or t
  misc_feature (2816)..(2818): n is a, c, g, or t
  misc_feature (2820)..(2820): n is a, c, g, or t
  misc_feature (2823)..(2824): n is a, c, g, or t
  misc_feature (2827)..(2828): n is a, c, g, or t
  misc_feature (2830)..(2830): n is a, c, g, or t
  misc_feature (2835)..(2842): n is a, c, g, or t
  misc_feature (2844)..(2845): n is a, c, g, or t
  misc_feature (2847)..(2847): n is a, c, g, or t
  misc_feature (2849)..(2850): n is a, c, g, or t
  misc_feature (2852)..(2855): n is a, c, g, or t
  misc_feature (2857)..(2859): n is a, c, g, or t
  misc_feature (2862)..(2862): n is a, c, g, or t
  misc_feature (2864)..(2864): n is a, c, g, or t
  misc_feature (2866)..(2867): n is a, c, g, or t
  misc_feature (2870)..(2871): n is a, c, g, or t
  misc_feature (2873)..(2873): n is a, c, g, or t
  misc_feature (2875)..(2876): n is a, c, g, or t
  misc_feature (2880)..(2880): n is a, c, g, or t
  misc_feature (2882)..(2882): n is a, c, g, or t
  misc_feature (2884)..(2885): n is a, c, g, or t
  misc_feature (2887)..(2887): n is a, c, g, or t
  misc_feature (2889)..(2890): n is a, c, g, or t
  misc_feature (2892)..(2894): n is a, c, g, or t
  misc_feature (2896)..(2896): n is a, c, g, or t
  misc_feature (2898)..(2899): n is a, c, g, or t
  misc_feature (2901)..(2901): n is a, c, g, or t
  misc_feature (2906)..(2909): n is a, c, g, or t
  misc_feature (2911)..(2912): n is a, c, g, or t
  misc_feature (2917)..(2917): n is a, c, g, or t
  misc_feature (2919)..(2921): n is a, c, g, or t
  misc_feature (2923)..(2925): n is a, c, g, or t
  misc_feature (2927)..(2927): n is a, c, g, or t
  misc_feature (2930)..(2931): n is a, c, g, or t
  misc_feature (2940)..(2941): n is a, c, g, or t
  misc_feature (2943)..(2943): n is a, c, g, or t
  misc_feature (2945)..(2947): n is a, c, g, or t
  misc_feature (2950)..(2951): n is a, c, g, or t
  misc_feature (2955)..(2956): n is a, c, g, or t
  misc_feature (2960)..(2961): n is a, c, g, or t
  misc_feature (2968)..(2968): n is a, c, g, or t
  misc_feature (2973)..(2973): n is a, c, g, or t
  misc_feature (2978)..(2978): n is a, c, g, or t
  misc_feature (2980)..(2980): n is a, c, g, or t
  misc_feature (2984)..(2986): n is a, c, g, or t
  misc_feature (2988)..(2991): n is a, c, g, or t
  misc_feature (2993)..(2993): n is a, c, g, or t
  misc_feature (2995)..(2996): n is a, c, g, or t
  misc_feature (2998)..(3004): n is a, c, g, or t
  misc_feature (3006)..(3007): n is a, c, g, or t
  misc_feature (3009)..(3012): n is a, c, g, or t
  misc_feature (3014)..(3014): n is a, c, g, or t
  misc_feature (3020)..(3020): n is a, c, g, or t
  misc_feature (3022)..(3022): n is a, c, g, or t
  misc_feature (3026)..(3026): n is a, c, g, or t
  misc_feature (3031)..(3032): n is a, c, g, or t
  misc_feature (3035)..(3035): n is a, c, g, or t
  misc_feature (3038)..(3038): n is a, c, g, or t
  misc_feature (3040)..(3040): n is a, c, g, or t
  misc_feature (3042)..(3042): n is a, c, g, or t
  misc_feature (3044)..(3044): n is a, c, g, or t
  misc_feature (3046)..(3046): n is a, c, g, or t
  misc_feature (3052)..(3053): n is a, c, g, or t
  misc_feature (3055)..(3058): n is a, c, g, or t
  misc_feature (3063)..(3064): n is a, c, g, or t
  misc_feature (3066)..(3066): n is a, c, g, or t
  misc_feature (3069)..(3069): n is a, c, g, or t
  misc_feature (3073)..(3073): n is a, c, g, or t
  misc_feature (3080)..(3083): n is a, c, g, or t
  misc_feature (3087)..(3087): n is a, c, g, or t
  misc_feature (3091)..(3091): n is a, c, g, or t
  misc_feature (3094)..(3095): n is a, c, g, or t
  misc_feature (3098)..(3101): n is a, c, g, or t
  misc_feature (3104)..(3104): n is a, c, g, or t
  misc_feature (3106)..(3107): n is a, c, g, or t
  misc_feature (3112)..(3114): n is a, c, g, or t
  misc_feature (3116)..(3119): n is a, c, g, or t
  misc_feature (3123)..(3123): n is a, c, g, or t
  misc_feature (3127)..(3127): n is a, c, g, or t
  misc_feature (3129)..(3131): n is a, c, g, or t
  misc_feature (3133)..(3136): n is a, c, g, or t
  misc_feature (3138)..(3138): n is a, c, g, or t
  misc_feature (3141)..(3141): n is a, c, g, or t
  misc_feature (3143)..(3144): n is a, c, g, or t
  misc_feature (3150)..(3150): n is a, c, g, or t
  misc_feature (3155)..(3158): n is a, c, g, or t
  misc_feature (3160)..(3164): n is a, c, g, or t
  misc_feature (3166)..(3166): n is a, c, g, or t
  misc_feature (3170)..(3170): n is a, c, g, or t
  misc_feature (3172)..(3177): n is a, c, g, or t
  misc_feature (3179)..(3181): n is a, c, g, or t
  misc_feature (3184)..(3185): n is a, c, g, or t
  misc_feature (3189)..(3191): n is a, c, g, or t
  misc_feature (3193)..(3193): n is a, c, g, or t
  misc_feature (3196)..(3197): n is a, c, g, or t
  misc_feature (3199)..(3199): n is a, c, g, or t
  misc_feature (3204)..(3204): n is a, c, g, or t
  misc_feature (3208)..(3211): n is a, c, g, or t
  misc_feature (3213)..(3214): n is a, c, g, or t
  misc_feature (3217)..(3218): n is a, c, g, or t
  misc_feature (3220)..(3220): n is a, c, g, or t
  misc_feature (3222)..(3222): n is a, c, g, or t
  misc_feature (3226)..(3226): n is a, c, g, or t
  misc_feature (3228)..(3229): n is a, c, g, or t
  misc_feature (3231)..(3231): n is a, c, g, or t
  misc_feature (3233)..(3235): n is a, c, g, or t
  misc_feature (3240)..(3240): n is a, c, g, or t
  misc_feature (3243)..(3244): n is a, c, g, or t
  misc_feature (3246)..(3246): n is a, c, g, or t
  misc_feature (3249)..(3249): n is a, c, g, or t
  misc_feature (3251)..(3251): n is a, c, g, or t
  misc_feature (3253)..(3253): n is a, c, g, or t
  misc_feature (3255)..(3259): n is a, c, g, or t
  misc_feature (3262)..(3262): n is a, c, g, or t
  misc_feature (3264)..(3265): n is a, c, g, or t
  misc_feature (3270)..(3271): n is a, c, g, or t
  misc_feature (3273)..(3281): n is a, c, g, or t
  misc_feature (3287)..(3287): n is a, c, g, or t
  misc_feature (3289)..(3289): n is a, c, g, or t
  misc_feature (3291)..(3294): n is a, c, g, or t
  misc_feature (3296)..(3298): n is a, c, g, or t
  misc_feature (3301)..(3301): n is a, c, g, or t
  misc_feature (3305)..(3306): n is a, c, g, or t
  misc_feature (3311)..(3318): n is a, c, g, or t
  misc_feature (3323)..(3323): n is a, c, g, or t
  misc_feature (3328)..(3328): n is a, c, g, or t
  misc_feature (3331)..(3331): n is a, c, g, or t
  misc_feature (3333)..(3333): n is a, c, g, or t
  misc_feature (3336)..(3336): n is a, c, g, or t
  misc_feature (3342)..(3342): n is a, c, g, or t
  misc_feature (3344)..(3346): n is a, c, g, or t
  misc_feature (3349)..(3349): n is a, c, g, or t
  misc_feature (3355)..(3359): n is a, c, g, or t
  misc_feature (3361)..(3361): n is a, c, g, or t
  misc_feature (3363)..(3363): n is a, c, g, or t
  misc_feature (3365)..(3365): n is a, c, g, or t
  misc_feature (3370)..(3370): n is a, c, g, or t
  misc_feature (3373)..(3374): n is a, c, g, or t
  misc_feature (3380)..(3382): n is a, c, g, or t
  misc_feature (3387)..(3397): n is a, c, g, or t
  misc_feature (3400)..(3400): n is a, c, g, or t
  misc_feature (3402)..(3402): n is a, c, g, or t
  misc_feature (3406)..(3406): n is a, c, g, or t
  misc_feature (3408)..(3416): n is a, c, g, or t
  misc_feature (3420)..(3422): n is a, c, g, or t
  misc_feature (3425)..(3425): n is a, c, g, or t
  misc_feature (3431)..(3433): n is a, c, g, or t
  misc_feature (3435)..(3441): n is a, c, g, or t
  misc_feature (3447)..(3448): n is a, c, g, or t
  misc_feature (3452)..(3453): n is a, c, g, or t
  misc_feature (3456)..(3456): n is a, c, g, or t
  misc_feature (3458)..(3459): n is a, c, g, or t
  misc_feature (3462)..(3462): n is a, c, g, or t
  misc_feature (3465)..(3465): n is a, c, g, or t
  misc_feature (3467)..(3468): n is a, c, g, or t
  misc_feature (3470)..(3472): n is a, c, g, or t
  misc_feature (3479)..(3479): n is a, c, g, or t
  misc_feature (3483)..(3483): n is a, c, g, or t
  misc_feature (3486)..(3492): n is a, c, g, or t
  misc_feature (3494)..(3494): n is a, c, g, or t
  misc_feature (3497)..(3497): n is a, c, g, or t
  misc_feature (3499)..(3501): n is a, c, g, or t
  misc_feature (3504)..(3505): n is a, c, g, or t
  misc_feature (3507)..(3508): n is a, c, g, or t
  misc_feature (3510)..(3511): n is a, c, g, or t
  misc_feature (3518)..(3519): n is a, c, g, or t
  misc_feature (3523)..(3523): n is a, c, g, or t
  misc_feature (3527)..(3529): n is a, c, g, or t
  misc_feature (3531)..(3531): n is a, c, g, or t
  misc_feature (3533)..(3535): n is a, c, g, or t
  misc_feature (3537)..(3537): n is a, c, g, or t
  misc_feature (3539)..(3539): n is a, c, g, or t
  misc_feature (3543)..(3543): n is a, c, g, or t
  misc_feature (3545)..(3546): n is a, c, g, or t
  misc_feature (3549)..(3551): n is a, c, g, or t
  misc_feature (3556)..(3557): n is a, c, g, or t
  misc_feature (3559)..(3560): n is a, c, g, or t
  misc_feature (3564)..(3566): n is a, c, g, or t
  misc_feature (3568)..(3571): n is a, c, g, or t
  misc_feature (3573)..(3573): n is a, c, g, or t
  misc_feature (3576)..(3576): n is a, c, g, or t
  misc_feature (3578)..(3579): n is a, c, g, or t
  misc_feature (3583)..(3587): n is a, c, g, or t
  misc_feature (3592)..(3593): n is a, c, g, or t
  misc_feature (3595)..(3595): n is a, c, g, or t
  misc_feature (3597)..(3598): n is a, c, g, or t
  misc_feature (3602)..(3603): n is a, c, g, or t
  misc_feature (3605)..(3605): n is a, c, g, or t
  misc_feature (3609)..(3613): n is a, c, g, or t
  misc_feature (3615)..(3617): n is a, c, g, or t
  misc_feature (3620)..(3621): n is a, c, g, or t
  misc_feature (3625)..(3625): n is a, c, g, or t
  misc_feature (3627)..(3628): n is a, c, g, or t
  misc_feature (3633)..(3634): n is a, c, g, or t
  misc_feature (3638)..(3641): n is a, c, g, or t
  misc_feature (3644)..(3644): n is a, c, g, or t
  misc_feature (3646)..(3651): n is a, c, g, or t
  misc_feature (3653)..(3653): n is a, c, g, or t
  misc_feature (3655)..(3656): n is a, c, g, or t
  misc_feature (3658)..(3658): n is a, c, g, or t
  misc_feature (3660)..(3660): n is a, c, g, or t
  misc_feature (3662)..(3668): n is a, c, g, or t
  misc_feature (3670)..(3671): n is a, c, g, or t
  misc_feature (3674)..(3676): n is a, c, g, or t
  misc_feature (3679)..(3679): n is a, c, g, or t
  misc_feature (3681)..(3682): n is a, c, g, or t
  misc_feature (3685)..(3689): n is a, c, g, or t
  misc_feature (3691)..(3691): n is a, c, g, or t
  misc_feature (3693)..(3695): n is a, c, g, or t
  misc_feature (3697)..(3697): n is a, c, g, or t
  misc_feature (3699)..(3700): n is a, c, g, or t
  misc_feature (3702)..(3702): n is a, c, g, or t
  misc_feature (3704)..(3704): n is a, c, g, or t
  misc_feature (3706)..(3706): n is a, c, g, or t
  misc_feature (3709)..(3709): n is a, c, g, or t
  misc_feature (3711)..(3714): n is a, c, g, or t
  misc_feature (3716)..(3716): n is a, c, g, or t
  misc_feature (3718)..(3719): n is a, c, g, or t
  misc_feature (3721)..(3721): n is a, c, g, or t
  misc_feature (3725)..(3725): n is a, c, g, or t
  misc_feature (3730)..(3734): n is a, c, g, or t
  misc_feature (3736)..(3739): n is a, c, g, or t
  misc_feature (3741)..(3741): n is a, c, g, or t
  misc_feature (3743)..(3743): n is a, c, g, or t
  misc_feature (3745)..(3745): n is a, c, g, or t
  misc_feature (3749)..(3751): n is a, c, g, or t
  misc_feature (3755)..(3758): n is a, c, g, or t
  misc_feature (3760)..(3760): n is a, c, g, or t
  misc_feature (3762)..(3762): n is a, c, g, or t
  misc_feature (3764)..(3764): n is a, c, g, or t
  misc_feature (3766)..(3767): n is a, c, g, or t
  misc_feature (3769)..(3771): n is a, c, g, or t
  misc_feature (3777)..(3778): n is a, c, g, or t
  misc_feature (3780)..(3780): n is a, c, g, or t
  misc_feature (3782)..(3783): n is a, c, g, or t
  misc_feature (3786)..(3787): n is a, c, g, or t
  misc_feature (3789)..(3794): n is a, c, g, or t
  misc_feature (3796)..(3801): n is a, c, g, or t
  misc_feature (3804)..(3805): n is a, c, g, or t
  misc_feature (3807)..(3807): n is a, c, g, or t
  misc_feature (3809)..(3809): n is a, c, g, or t
  misc_feature (3813)..(3813): n is a, c, g, or t
  misc_feature (3816)..(3817): n is a, c, g, or t
  misc_feature (3819)..(3819): n is a, c, g, or t
  misc_feature (3822)..(3822): n is a, c, g, or t
  misc_feature (3825)..(3825): n is a, c, g, or t
  misc_feature (3827)..(3828): n is a, c, g, or t
  misc_feature (3830)..(3833): n is a, c, g, or t
  misc_feature (3835)..(3836): n is a, c, g, or t
  misc_feature (3842)..(3842): n is a, c, g, or t
  misc_feature (3845)..(3845): n is a, c, g, or t
  misc_feature (3847)..(3847): n is a, c, g, or t
  misc_feature (3850)..(3851): n is a, c, g, or t
  misc_feature (3853)..(3854): n is a, c, g, or t
  misc_feature (3860)..(3861): n is a, c, g, or t
  misc_feature (3865)..(3867): n is a, c, g, or t
  misc_feature (3869)..(3869): n is a, c, g, or t
  misc_feature (3873)..(3873): n is a, c, g, or t
  misc_feature (3875)..(3875): n is a, c, g, or t
  misc_feature (3880)..(3880): n is a, c, g, or t
  misc_feature (3883)..(3883): n is a, c, g, or t
  misc_feature (3887)..(3887): n is a, c, g, or t
  misc_feature (3892)..(3894): n is a, c, g, or t
  misc_feature (3902)..(3902): n is a, c, g, or t
  misc_feature (3905)..(3908): n is a, c, g, or t
  misc_feature (3911)..(3911): n is a, c, g, or t
  misc_feature (3913)..(3915): n is a, c, g, or t
  misc_feature (3918)..(3918): n is a, c, g, or t
  misc_feature (3922)..(3922): n is a, c, g, or t
  misc_feature (3924)..(3926): n is a, c, g, or t
  misc_feature (3928)..(3928): n is a, c, g, or t
  misc_feature (3931)..(3931): n is a, c, g, or t
  misc_feature (3933)..(3933): n is a, c, g, or t
  misc_feature (3937)..(3937): n is a, c, g, or t
  misc_feature (3939)..(3939): n is a, c, g, or t
  misc_feature (3945)..(3945): n is a, c, g, or t
  misc_feature (3948)..(3951): n is a, c, g, or t
  misc_feature (3954)..(3954): n is a, c, g, or t
  misc_feature (3956)..(3956): n is a, c, g, or t
  misc_feature (3958)..(3958): n is a, c, g, or t
  misc_feature (3961)..(3962): n is a, c, g, or t
  misc_feature (3968)..(3969): n is a, c, g, or t
  misc_feature (3971)..(3971): n is a, c, g, or t
  misc_feature (3976)..(3976): n is a, c, g, or t
  misc_feature (3978)..(3979): n is a, c, g, or t
  misc_feature (3985)..(3985): n is a, c, g, or t
  misc_feature (3988)..(3988): n is a, c, g, or t
  misc_feature (3993)..(3993): n is a, c, g, or t
  misc_feature (3995)..(3996): n is a, c, g, or t
  misc_feature (3998)..(3999): n is a, c, g, or t
nnnnnnnnnnnnnnncncnnnnnnntnnnnnnnnnnnnnnnnnnnnnncnnnnnnnnnnnnnnnnnntnnnnnnnnnnnnnnnnnnnnngnnnnnnnntnnnnannnntnntnntnnnnnnnnaannnnnnnnnnnnnnnnnnnnnnannnnnnnnnnnnnnnnnnnnnncnnnnnntnnnnnnnnnnnnncnnnncnncnnnnnnnnnnnnncnnnnnnnnnntnnnnnnnnnnnnnngnngnnngnnnnnnnncnnnnnnnncgnnnnnngnnnnnnnnnnnnnnnnnnnnnnnngnnnnnnnannngnnnnnnnnnnnnnnnngnngnnnnnnnngnnnnnnnannntnnnnnnnnnnnnnnnnngnnnnnnnnnnnnnnnnnnnncnnnngnngnnngnnnnngnnnnnnnnnntnnnncnnnnnnnnccnccnnnnnncncnnnncnccnnnncgnncnnnnncnncnnnncnnnngnnnnngnngnnnnnnnnnnnnccngngcggnnngnnncaannaannnnnnnnnnngngngcgcccnnnnncgnnncnngnnngnggnnnnnnncnnnnnnnnnnnnnnnnntnnnnnnnnnnnnnannnnnnnnnnnnnnnnnnnnnnnnannnnnnnnnnnnnnannnnngnnnnnnnnnnnnnnntnnnnnnnnnnnnnnannnnnnnnnnnnnnnnnncnnnnnnngnnnnnngnnnnncnnnnnnnnnnnnnnnnnnnnnngcnnncnnnnnnnnnnnncnccnnnccncccgnncncncccccnnnnnncgnnnnnggnngnnnnnnnnnnngnnnnnngnnnnnnnntgncnnncggtncgncgnnnngnnnngngnnnnncngnnnnngnnnnnnnngnnnngngnnngnngnngnngtnnggcnnnnnannccnccnnngcnnnncncnccngcnncnnnnncnngnnnncnccncnnnncnncnnnnngnncangncnccnnnncnnnnggnnnnncnngnnnnncnnnnnnnnntnannannnnnannannnnaannnnannannatannnnnantancnnnnnnnnnnnnngnaagnnnnnagnnnnnnnnnnngnnnnncgngcngnccgnnnnnnngnntngnnnnnngnnnnnnnngncnnancgnncnnnngnncnnnngnnnnnngnnncngngngnnngngagnnnngnnnngnnnnnnnncnngnncncnnngnnncnnnnnngncnngncggnnngnnnggnnnnnnngnnnnnnnnnnnnnnnnnnnnnnnnnnnnnnntnnannncnnnnnnngnnngatagnnnnnnngnnnnnnnnnnnanngangnanagnnnnnnnnnannnnnnnnananagnnnnnnnannnnnnnnnngnnnngnngnnngnggnnggngnngngngnnggnngnnggnngnnngngnnnggnngnngnnnnnncncnncncgnnncnncgnncgnnnngnngngngnnncgcngnggnnnnnngnncnngngnnngnnnncncnnnnggncncnnnnnnngnnnngncngggnnnnngnnngcnncnncnnngcnnnnnccctcgngngnnccnnngcgcncnnnnnncnnnnccnngggnnccccnnnnnnnccnnntnnnaaancngncnnnnnnnnnnnnnnnnngngnnngnnnnnngggnnnanaanccgnnnnngnnannnnnnnnnnnngnggggnnncccctnncgggntgcaccgccgaccgacccngatcttctgtgaagggttcgagtgggagcatgcctgtcgggacccgaaagatggtgaactatgcctgagcggggcgaagccagaggaaactctggtggaggcccgcagcgatactgacgtgcaaatcgttcgtctgacttgggtataggggcgaaagactaatcgaaccatctagtagctggttccctccgaagtttccctcaggatagctggagcccgcgngcgagttctatcgggtaaagccaatgattagaggcatcgggggcgcaacgccctcgacctattctcaaactttaaataggtaggacggcgcggctgcttcgttgagccgcgccacggaatcgagagctccaagtgggccatttttggtaagcagaactggcgatgcgggatgaaccggaagccgggttacggtgcccaactgcgcgctaacctagaacccacaaagggtgttggtcgattaagacagcaggacggtggtcatggaagtcgaaatccgctaaggagtgtgtaacaactcacctgccgaatcaactagccccgaaaatggatggcgctnaagcgcgcgacccacacccggccatcggggcnagcgccangccccgatgagtaggagggcgcggcggccgcngcaaaacccggggcgcgagcccgggcggagcggccgtcggtgcggatcttggtggtagtagcaaatattcaaatgagaactttgaaggccgaagaggggaaaggttccatgtgaacggcacttgcacatgggttagccgatcctaagggacgggggaagcccgtcaganagcgcgncnnngcnngagntccnaaagggantngggtnaaaatccccnagcngggnnnngnngnngnnngnnannntnnggannncngnnganncngnngggggcnccgggannagtnntnttttntnntnanngncnnncccncccngnaaangnnncnncngnngnnngggncnnnngnnngnannagnncnncncnnnncgcgnngtcngnngngcccccgnngnccctnnaaaancngnngnncnnngngcnnccnncncccgnnnnnnnncnnancnncnnnngnnntcnangnngannancnnctgncnanngnannannntngnnangggannnngnnaaaangnnncnnnanctnngggaaaagnntngnnnctnngggnngggnncgggggncccgnccccnancccnnngnnnntngnngnnnnnnncnngnnnncncgcggngngagnggggnnccncgngncngncngggggnngnnnnggganngnccncccnggggggnnnncccngcgncgnncannnnacncnnaactnnnannnngaangggnannngnnnntntantnntaaaanaaaannnngnnnnncnctgngnnnnnncnnncannatgnnntntgnncnctgcnctgnnnntnnaanngnanaganannanannnagcgnggnnanggngngngnnnnnatnannctctnntnnnnnnnnnaagccncntnnnntnnnatntganncgcgnnnnnnnngaatngaganacncnctntccccntnnnctntctacnnnnnancnanaccanagnnaagggnnngggcnnnnnnnnnnnagngngganannnnnnnnngttnnnctngactcnnntnnnnnnntgtganntganntgngnngtntangnnannngggagcnggcncgnnnnnnnanaantnnnatnncnntnnttttaannttantttnnntntnnngngngacngnngcnnngcccnncnnctcnnntnnnntntangnncgcnnnnngcggnncnanncggnngnaagnnnnngnnnggnngggngnntggcnngggnnnnacntnnnnnnananntnangnnnnnnncnnaannngancnnaannnnnanannnancnngngngnaanannnngntnnangctngtttnnnnntnnnntncngnacgnnnacgnnnngngnangnntnnnctatcnntncnntanncnnnnnnannnnnnagnnanangtgncannanagntancnnannnntnnctggcntgngncanncnngcgttnntagnnncnttgntntttgntcnttcnatgtnnnctcttccnatnnnngtnannnagnattnannnantgntngatngntcaccnacnnnnagngnangtnngctggnntnagacngnngtgagncangttantnntnnc

SEQ ID NO: 788 - DNA, 4000 bp, Escherichia coli
  misc_feature (14)..(14): n is a, c, g, or t
  misc_feature (35)..(35): n is a, c, g, or t
  misc_feature (53)..(53): n is a, c, g, or t
  misc_feature (224)..(224): n is a, c, g, or t
  misc_feature (269)..(269): n is a, c, g, or t
  misc_feature (302)..(302): n is a, c, g, or t
  misc_feature (314)..(314): n is a, c, g, or t
  misc_feature (356)..(356): n is a, c, g, or t
  misc_feature (374)..(374): n is a, c, g, or t
  misc_feature (1222)..(1222): n is a, c, g, or t
  misc_feature (1300)..(1300): n is a, c, g, or t
  misc_feature (1339)..(1339): n is a, c, g, or t
  misc_feature (1519)..(1519): n is a, c, g, or t
  misc_feature (1933)..(1933): n is a, c, g, or t
  misc_feature (3067)..(3067): n is a, c, g, or t
  misc_feature (3302)..(3302): n is a, c, g, or t
gaccagaagaattnattaagacaatgtgggctttnggtgatgggatacctgtngataataagatactcgaagaaagaatcgcagaagcagtttatttaattgttgaaaaacaacttaatgctggaattgatattattaatgatggagaaatgtcaaaaccaagttacgccacttatgttaaagataggttgagtggatttggaggtgaatctccagagaactanttttttgctgatctgcatgatttccctaaaagcaatgaaattgtnggagcaaatcctggtcgaaaaaaaagaaccgcnccagcttgcaangagtccttggaagtcgctgatccaaaagcagcagaattaganatggtaaatttaacaaangcagcaaaaaaatttaatgcaccatttatgttttcaagctcagcttctccaggagtcatatccttgttttttaaaaacacattttataaaactgatgaagagtatgtttttgcaatagcagatgcaatgcaacacgagtacgaggccattgcagcaacaggagcattcgttcagcttgattgcccagatttagcgatgggacgtcatacagagtatgctgaattagatgaaaaagcatttcaaaaacgtgccgccatgaatatcgaggctctgaatcattcagttagaaatataccctctgaacaattaagaatgcatttgtgctggggcaattatccaggccctcatcattgtgatatttcaatcgaaaaaattattgatttggtgtggaaagcaaagccaaacacaattttatttgaagcagcaaaccccaggcatgcacacgaatgggagttattcaaaaatcataagttaccagatgataaggttatttgtcccggggtaattgagccccaatctaactacattgagcatcctcaattagttgctcagcgcatagagcgatatgcaaatctagtaggcaaggagagagttatggcaggagtagactgcggtttcagcatccatgttgggatgcaaggaattgatccagatgtagcatttgcaaagcttaacgctctagctgaaggagcggcaattgctacagatcgattgtggaggtagaggtagatatagttccaagattaaattttaatatacaacgctgcaattttcgtatctataagcctggacaatctcttcattgaaatttttcaattcactaatcatggtagtcaacatttttttgngcaccttcccatagcgcggaagctgctggagtatttaattcttccatcaagtgaccaaccaaaccagcacatcttgcngttaaaacaactcctctcatcatattggagggaatggangcttctgctaacgcagctccaattgcagcagagacatttgtaacaatttttttacccagttcctctgaaagagaagactccattaaatgcatcgcctcaataaatcttccatcaacccctgtctcttggcaaatttctaataagcgatttactcttaaatcttttgatttatgaattggntgcccaaatcctggaaccggttttttgttagagcgatattcttttataataatttttgcttctatttgcatatcttcagaattacaaattcgctcaaaaattgctccacactcacttgcagttccagcatacctatcgccaacacctaacaacccagctgcgatggcgccttgaaaggactcaggtgccccatgaatagtgagccgtgtcgctattgcagagggaactaatccgtgctccataattgtaactagcacagcatctacaattgttagttgcagctctgaaggatctttccctagggcttggagtaaccatgcttgggtaaaactgtattttccaactaaatcttgaactaaatttttatccctaattaaaatatggtcctcatcaaaatcacatatacttgtctgncccttttttgtagtatctttattcatttactttataagcataagttatattttccatgctaatattataagctatattctgaatgttaattcatttcagaaagggggaaccaatacaaatgaaaaatttaaatcaatacataaaacctatctttgctttgacaagtatattttttctagcagatctctcatctcaggaaagatcttctgcaaatacagttcgtggatacgaagaagtagttgtaaccgctagaaaaaaagatgaatcactctcagaggctcctgtttctgttaaagccttcacctcagaagaaataagatctgcaggtatagaatctgcgcaagatttcatcaacttaaccccaaacgtaactcttgtccaaactcaaaatgcagggaattcttttttaacccttcgcggtgtatcgcaagctagaaacagtgatatgtctgctgctgtgttagttgatggggtgttgatgtcaaatcctactcaattaaatcaagttctatttgacatagatcaagttgaagttcttagaggcccccaaggagctttatatggtcgaaatgctattggtggggctataacaatcacaaccaaggaaccgggtgaagaaacggatggaagatttactgtaggcgttgatagcggaaatggttatgctcttaaaggtgctgtcagtggagccttaaacgaagatgcatctatgagatatagattatcaggctcatttaaggaaaccgatggatttcttgataacgtttatttaaacacagaggcagatcctgttgaggacctttcaacaagattaagagttatatgggatgcttcagatactttttctgctgacgctagaatttcaacatcaaaattaaaaaccactgcactgtattttgtaattggtgcagaggctgataatacttctatcgatattatgactaataatcttggttacaatgaaaggaacttcacaagcgctagcttgaagttagattgggatttaggagatagagtttttacatccatcactgcatatgatgatgtagatgagatcttatacggcgatcaatttaatttcttgccgctagaacatcctttcaattattttaataatgatccatttggagattntattaagttcttaactggagatgattatgttgacttaagtcaaaatcaatatcttgaagtagaatccataagtcaggagtttagattatcctcgaatactcaagatggccctcaatggattgtaggggcgtattttatttctacagaccgttatatctcaactggtaatcagatagatagaggcttaggagtctatccagtcaagaaacaatttaggccatcagtatttgttgancctggaaacattagccctcaattaaatattttagctgacgctcaggacaattttgcttgggcaatctttggtcaaatttcatatgatatttctgaagctatagaagctagtttctctttacgttacgatgatgatgagcgcgaaaacaccaccatgaccccagctctctataatacatctggccttgatttagtgcttggagaaaagagaaaagaaagttgggatgaacttcagccaaaatttactttgcgttatcaaccgaatgaaaatacaactacatattttgatatcagtcgtggtttcagatcaggtggattcaatcagacaggtgtagggcaagctgtcccaacaccaggcgtgagtgatatttttgatgcgcaagttgctgataccatcgaagttggactgaaaaatgtttcagaagatcgacgttacaccacatctatagccctgtatcaaactaactttgacaatgcatatttctttgtatttgatccaggcactagtacacaaaaccttggaactgttgatgaagtgacatactcaggcgctgagcttgagcttagcgctctacttaatgactacacaagtctttattttggtctaggcttaactgatagcgagattgataaagctccgaatccagcacatgttggaaatcaagctccattagtatctgaatctacaatgaatatcgg

SEQ ID NO: 789 - DNA, 4000 bp, Escherichia coli
  misc_feature (1)..(1): n is a, c, g, or t
  misc_feature (3)..(13): n is a, c, g, or t
  misc_feature (15)..(60): n is a, c, g, or t
  misc_feature (63)..(65): n is a, c, g, or t
  misc_feature (67)..(78): n is a, c, g, or t
  misc_feature (80)..(83): n is a, c, g, or t
  misc_feature (85)..(95): n is a, c, g, or t
  misc_feature (97)..(113): n is a, c, g, or t
  misc_feature (115)..(126): n is a, c, g, or t
  misc_feature (128)..(138): n is a, c, g, or t
  misc_feature (140)..(140): n is a, c, g, or t
  misc_feature (142)..(161): n is a, c, g, or t
  misc_feature (163)..(164): n is a, c, g, or t
  misc_feature (166)..(169): n is a, c, g, or t
  misc_feature (171)..(191): n is a, c, g, or t
  misc_feature (193)..(202): n is a, c, g, or t
  misc_feature (204)..(212): n is a, c, g, or t
  misc_feature (214)..(214): n is a, c, g, or t
  misc_feature (216)..(231): n is a, c, g, or t
  misc_feature (233)..(242): n is a, c, g, or t
  misc_feature (244)..(244): n is a, c, g, or t
  misc_feature (246)..(254): n is a, c, g, or t
  misc_feature (257)..(263): n is a, c, g, or t
  misc_feature (265)..(273): n is a, c, g, or t
  misc_feature (276)..(278): n is a, c, g, or t
  misc_feature (280)..(280): n is a, c, g, or t
  misc_feature (283)..(284): n is a, c, g, or t
  misc_feature (286)..(292): n is a, c, g, or t
  misc_feature (296)..(296): n is a, c, g, or t
  misc_feature (298)..(299): n is a, c, g, or t
  misc_feature (301)..(301): n is a, c, g, or t
  misc_feature (303)..(305): n is a, c, g, or t
  misc_feature (307)..(309): n is a, c, g, or t
  misc_feature (311)..(311): n is a, c, g, or t
  misc_feature (314)..(315): n is a, c, g, or t
  misc_feature (318)..(324): n is a, c, g, or t
  misc_feature (326)..(330): n is a, c, g, or t
  misc_feature (332)..(333): n is a, c, g, or t
  misc_feature (335)..(336): n is a, c, g, or t
  misc_feature (338)..(346): n is a, c, g, or t
  misc_feature (348)..(356): n is a, c, g, or t
  misc_feature (358)..(375): n is a, c, g, or t
  misc_feature (378)..(378): n is a, c, g, or t
  misc_feature (380)..(387): n is a, c, g, or t
  misc_feature (389)..(391): n is a, c, g, or t
  misc_feature (393)..(418): n is a, c, g, or t
  misc_feature (420)..(420): n is a, c, g, or t
  misc_feature (422)..(422): n is a, c, g, or t
  misc_feature (424)..(427): n is a, c, g, or t
  misc_feature (429)..(429): n is a, c, g, or t
  misc_feature (431)..(437): n is a, c, g, or t
  misc_feature (439)..(449): n is a, c, g, or t
  misc_feature (451)..(453): n is a, c, g, or t
  misc_feature (455)..(456): n is a, c, g, or t
  misc_feature (458)..(461): n is a, c, g, or t
  misc_feature (463)..(464): n is a, c, g, or t
  misc_feature (466)..(477): n is a, c, g, or t
  misc_feature (479)..(479): n is a, c, g, or t
  misc_feature (481)..(481): n is a, c, g, or t
  misc_feature (483)..(485): n is a, c, g, or t
  misc_feature (487)..(492): n is a, c, g, or t
  misc_feature (496)..(498): n is a, c, g, or t
  misc_feature (500)..(501): n is a, c, g, or t
  misc_feature (503)..(505): n is a, c, g, or t
  misc_feature (507)..(512): n is a, c, g, or t
  misc_feature (514)..(516): n is a, c, g, or t
  misc_feature (518)..(518): n is a, c, g, or t
  misc_feature (521)..(522): n is a, c, g, or t
  misc_feature (525)..(528): n is a, c, g, or t
  misc_feature (530)..(535): n is a, c, g, or t
  misc_feature (537)..(542): n is a, c, g, or t
  misc_feature (546)..(559): n is a, c, g, or t
  misc_feature (561)..(566): n is a, c, g, or t
  misc_feature (568)..(579): n is a, c, g, or t
  misc_feature (581)..(593): n is a, c, g, or t
  misc_feature (595)..(596): n is a, c, g, or t
  misc_feature (598)..(602): n is a, c, g, or t
  misc_feature (604)..(607): n is a, c, g, or t
  misc_feature (611)..(622): n is a, c, g, or t
  misc_feature (625)..(651): n is a, c, g, or t
  misc_feature (653)..(654): n is a, c, g, or t
  misc_feature (657)..(661): n is a, c, g, or t
  misc_feature (663)..(665): n is a, c, g, or t
  misc_feature (669)..(685): n is a, c, g, or t
  misc_feature (687)..(687): n is a, c, g, or t
  misc_feature (689)..(703): n is a, c, g, or t
  misc_feature (707)..(712): n is a, c, g, or t
  misc_feature (715)..(716): n is a, c, g, or t
  misc_feature (719)..(720): n is a, c, g, or t
  misc_feature (722)..(725): n is a, c, g, or t
  misc_feature (727)..(735): n is a, c, g, or t
  misc_feature (737)..(748): n is a, c, g, or t
  misc_feature (750)..(769): n is a, c, g, or t
  misc_feature (771)..(771): n is a, c, g, or t
  misc_feature (773)..(773): n is a, c, g, or t
  misc_feature (775)..(776): n is a, c, g, or t
  misc_feature (781)..(781): n is a, c, g, or t
  misc_feature (783)..(784): n is a, c, g, or t
  misc_feature (788)..(797): n is a, c, g, or t
  misc_feature (800)..(802): n is a, c, g, or t
  misc_feature (804)..(824): n is a, c, g, or t
  misc_feature (828)..(837): n is a, c, g, or t
  misc_feature (839)..(844): n is a, c, g, or t
  misc_feature (846)..(848): n is a, c, g, or t
  misc_feature (855)..(855): n is a, c, g, or t
  misc_feature (857)..(858): n is a, c, g, or t
  misc_feature (860)..(862): n is a, c, g, or t
  misc_feature (869)..(869): n is a, c, g, or t
  misc_feature (871)..(878): n is a, c, g, or t
  misc_feature (880)..(890): n is a, c, g, or t
  misc_feature (892)..(899): n is a, c, g, or t
  misc_feature (902)..(905): n is a, c, g, or t
  misc_feature (907)..(907): n is a, c, g, or t
  misc_feature (910)..(910): n is a, c, g, or t
  misc_feature (913)..(918): n is a, c, g, or t
  misc_feature (921)..(923): n is a, c, g, or t
  misc_feature (925)..(926): n is a, c, g, or t
  misc_feature (928)..(929): n is a, c, g, or t
  misc_feature (935)..(936): n is a, c, g, or t
  misc_feature (938)..(947): n is a, c, g, or t
  misc_feature (949)..(965): n is a, c, g, or t
  misc_feature (968)..(970): n is a, c, g, or t
  misc_feature (973)..(976): n is a, c, g, or t
  misc_feature (978)..(979): n is a, c, g, or t
  misc_feature (981)..(983): n is a, c, g, or t
  misc_feature (987)..(995): n is a, c, g, or t
  misc_feature (999)..(999): n is a, c, g, or t
  misc_feature (1001)..(1009): n is a, c, g, or t
  misc_feature (1011)..(1011): n is a, c, g, or t
  misc_feature (1013)..(1019): n is a, c, g, or t
  misc_feature (1021)..(1023): n is a, c, g, or t
  misc_feature (1025)..(1029): n is a, c, g, or t
  misc_feature (1031)..(1031): n is a, c, g, or t
  misc_feature (1034)..(1035): n is a, c, g, or t
  misc_feature (1037)..(1037): n is a, c, g, or t
  misc_feature (1039)..(1039): n is a, c, g, or t
  misc_feature (1041)..(1042): n is a, c, g, or t
  misc_feature (1044)..(1045): n is a, c, g, or t
  misc_feature (1048)..(1049): n is a, c, g, or t
  misc_feature (1052)..(1056): n is a, c, g, or t
  misc_feature (1058)..(1060): n is a, c, g, or t
  misc_feature (1066)..(1075): n is a, c, g, or t
  misc_feature (1077)..(1088): n is a, c, g, or t
  misc_feature (1090)..(1097): n is a, c, g, or t
  misc_feature (1100)..(1101): n is a, c, g, or t
  misc_feature (1103)..(1106): n is a, c, g, or t
  misc_feature (1108)..(1108): n is a, c, g, or t
  misc_feature (1110)..(1111): n is a, c, g, or t
  misc_feature (1113)..(1116): n is a, c, g, or t
  misc_feature (1118)..(1121): n is a, c, g, or t
  misc_feature (1123)..(1127): n is a, c, g, or t
  misc_feature (1131)..(1134): n is a, c, g, or t
  misc_feature (1136)..(1163): n is a, c, g, or t
  misc_feature (1166)..(1169): n is a, c, g, or t
  misc_feature (1171)..(1174): n is a, c, g, or t
  misc_feature (1176)..(1177): n is a, c, g, or t
  misc_feature (1179)..(1181): n is a, c, g, or t
  misc_feature (1184)..(1185): n is a, c, g, or t
  misc_feature (1187)..(1188): n is a, c, g, or t
  misc_feature (1190)..(1192): n is a, c, g, or t
  misc_feature (1197)..(1202): n is a, c, g, or t
  misc_feature (1204)..(1211): n is a, c, g, or t
  misc_feature (1213)..(1218): n is a, c, g, or t
  misc_feature (1220)..(1229): n is a, c, g, or t
  misc_feature (1232)..(1233): n is a, c, g, or t
  misc_feature (1235)..(1235): n is a, c, g, or t
  misc_feature (1238)..(1239): n is a, c, g, or t
  misc_feature (1242)..(1243): n is a, c, g, or t
  misc_feature (1245)..(1247): n is a, c, g, or t
  misc_feature (1250)..(1253): n is a, c, g, or t
  misc_feature (1256)..(1258): n is a, c, g, or t
  misc_feature (1264)..(1279): n is a, c, g, or t
  misc_feature (1281)..(1294): n is a, c, g, or t
  misc_feature (1298)..(1298): n is a, c, g, or t
  misc_feature (1301)..(1301): n is a, c, g, or t
  misc_feature (1306)..(1306): n is a, c, g, or t
  misc_feature (1309)..(1309): n is a, c, g, or t
  misc_feature (1312)..(1312): n is a, c, g, or t
  misc_feature (1319)..(1319): n is a, c, g, or t
  misc_feature (1321)..(1324): n is a, c, g, or t
  misc_feature (1329)..(1329): n is a, c, g, or t
  misc_feature (1331)..(1360): n is a, c, g, or t
  misc_feature (1367)..(1367): n is a, c, g, or t
  misc_feature (1369)..(1370): n is a, c, g, or t
  misc_feature (1372)..(1372): n is a, c, g, or t
  misc_feature (1375)..(1375): n is a, c, g, or t
  misc_feature (1380)..(1380): n is a, c, g, or t
  misc_feature (1386)..(1386): n is a, c, g, or t
  misc_feature (1390)..(1390): n is a, c, g, or t
  misc_feature (1395)..(1426): n is a, c, g, or t
  misc_feature (1463)..(1466): n is a, c, g, or t
  misc_feature (1468)..(1487): n is a, c, g, or t
  misc_feature (1489)..(1492): n is a, c, g, or t
  misc_feature (1529)..(1545): n is a, c, g, or t
  misc_feature (1547)..(1558): n is a, c, g, or t
  misc_feature (1595)..(1610): n is a, c, g, or t
  misc_feature (1612)..(1617): n is a, c, g, or t
  misc_feature (1619)..(1624): n is a, c, g, or t
  misc_feature (1661)..(1668): n is a, c, g, or t
  misc_feature (1670)..(1679): n is a, c, g, or t
  misc_feature (1681)..(1683): n is a, c, g, or t
  misc_feature (1686)..(1690): n is a, c, g, or t
  misc_feature (1727)..(1727): n is a, c, g, or t
  misc_feature (1729)..(1741): n is a, c, g, or t
  misc_feature (1743)..(1745): n is a, c, g, or t
  misc_feature (1748)..(1756): n is a, c, g, or t
  misc_feature (1793)..(1811): n is a, c, g, or t
  misc_feature (1813)..(1813): n is a, c, g, or t
  misc_feature (1815)..(1822): n is a, c, g, or t
  misc_feature (1859)..(1875): n is a, c, g, or t
  misc_feature (1877)..(1888): n is a, c, g, or t
  misc_feature (1925)..(1947): n is a, c, g, or t
  misc_feature (1949)..(1951): n is a, c, g, or t
  misc_feature (1953)..(1954): n is a, c, g, or t
  misc_feature (1991)..(1998): n is a, c, g, or t
  misc_feature (2000)..(2004): n is a, c, g, or t
  misc_feature (2006)..(2014): n is a, c, g, or t
  misc_feature (2016)..(2020): n is a, c, g, or t
  misc_feature (2736)..(2736): n is a, c, g, or t
  misc_feature (2751)..(2751): n is a, c, g, or t
  misc_feature (3045)..(3045): n is a, c, g, or t
  misc_feature (3136)..(3136): n is a, c, g, or t
  misc_feature (3142)..(3142): n is a, c, g, or t
  misc_feature (3157)..(3157): n is a, c, g, or t
  misc_feature (3250)..(3250): n is a, c, g, or t
  misc_feature (3376)..(3376): n is a, c, g, or t
  misc_feature (3490)..(3490): n is a, c, g, or t
ntnnnnnnnnnnnannnnnnnnnnnnnnnnnnnnnnnnnnnnnnnnnnnnnnnnnnnnnnatnnntnnnnnnnnnnnntnnnntnnnnnnnnnnntnnnnnnnnnnnnnnnnntnnnnnnnnnnnnannnnnnnnnnntnannnnnnnnnnnnnnnnnnnntnntnnnnannnnnnnnnnnnnnnnnnnnntnnnnnnnnnntnnnnnnnnnanannnnnnnnnnnnnnnntnnnnnnnnnnangnnnnnnnnngtnnnnnnntnnnnnnnnnccnnnanttnnannnnnnnattnannantnnntnnnantannatnnnnnnnannnnntnnannannnnnnnnngnnnnnnnnnannnnnnnnnnnnnnnnnntanannnnnnnntnnnannnnnnnnnnnnnnnnnnnnnnnnnnantnannnntntnnnnnnntnnnnnnnnnnntnnntnnannnntnntnnnnnnnnnnnntnantnnnannnnnntgannnanntnnntnnnnnntnnncnatnnaannnnannnnnnannnnnnttannnnnnnnnnnnnnannnnnnannnnnnnnnnnnannnnnnnnnnnnntnntnnnnnannnnatannnnnnnnnnnnttnnnnnnnnnnnnnnnnnnnnnnnnnnntnnaannnnncnnnaaannnnnnnnnnnnnnnnncnannnnnnnnnnnnnnntcannnnnnttnnatnnannnntnnnnnnnnncnnnnnnnnnnnntnnnnnnnnnnnnnnnnnnnntnantnntattnannatannnnnnnnnnaannnannnnnnnnnnnnnnnnnnnnnaagnnnnnnnnnnannnnnntnnnatataanannannntaaaacncnnnnnnnnannnnnnnnnnntnnnnnnnnttnnnntnctnttnnnnnnaannntnntnnaaaacnntnnnnnnnnnntnnnnnnnnnnnnnnnnnttnnngtnnnntnnannntaannnnnnnnnaaancnnnnnnnnntnannnnnnncnnnannnnngnttnnantncnntnnaanntannnnnannntaaaannnnnnnnnntnnnnnnnnnnnncnnnnnnnnttnnannnntntnnannnnannnntnnnnnaaannnnannnnnnnnnnnnnnnnnnnnnnnnnnnnttnnnntnnnntnnannntannannannntaaannnnnnannnnnnnntnnnnnntnnnnnnnnnnttnnantannatnnannntannnntannntaaaannnnnnnnnnnnnnnntnnnnnnnnnnnnnngttncantactnttnaanataacantnnnntaaancnnnnnnnnnnnnnnnnnnnnnnnnnnnnnngtttcantnntnttnaatanaacacnactntaaannnnnnnnnnnnnnnnnnnnnnnnnnnnnnnngtttcagtactattcaatataacactactgtaaaacnnnntnnnnnnnnnnnnnnnnnnnntnnnngtttcagtactattcaatataacactactgtaaaacnnnnnnnnnnnnnnnnntnnnnnnnnnnnngtttcagtactattcaatataacactactgtaaaacnnnnnnnnnnnnnnnntnnnnnnannnnnngtttcagtactattcaatataacactactgtaaaacnnnnnnnnannnnnnnnnngnnntannnnngtttcagtactattcaatataacactactgtaaaacncnnnnnnnnnnnnntnnntcnnnnnnnnngtttcagtactattcaatataacactactgtaaaacnnnnnnnnnnnnnnnnnnntngnnnnnnnngtttcagtactattcaatataacactactgtaaaacnnnnnnnnnnnnnnnnntnnnnnnnnnnnngtttcagtactattcaatataacactactgtaaaacnnnnnnnnnnnnnnnnnnnnnnnannntnngtttcagtactattcaatataacactactgtaaaacnnnnnnnntnnnnntnnnnnnnnnannnnngtttcagtactattcaatataacactactgtaaaacctcatatgtgcggttttacagaggtaaacgcggtagcgcttacttgatattatcgtgaattagtactaaaatcataaaaatcgtcatctatggacaaaagtccttcgctgtctaatttgtctttacagattttttcaataaaaagtactgaaaaatgattatcttctacgtattgtaaaagagcccgcaactcactatgcgataatagttggcgctgattgaccaaaactactagctgttttgacagtaattgttgcgctgaatctatgataccataaagtctatcaatatagttattccttaaatttacctccaatcccacatgcgccatctttaagatgtcattcatggaaatggttgattggtaactcaaattttgtgagaaatcgatatttatattatcaaggatatcaaatatgcttgattctatctgctctatttttgtctgatctatatcgctgttgtcctgaatgtttttatataacgccgcagtaatagttcgactggatagatcgtatgaatatatgtcggtaattattagtgagtcttttgttatatctagcgggttacaattatcatcgcaaattacaatgcgattattctcttctctttttgtgtatgcatcaagtatattttctataatttttctaaaaaacaaatcattgtgaatggctagtgtngcaattcccccattntctggtatcgatactgcattgtcgaatcctgaaactttaattctcataaaattactgtcctgtctgtattttgaattgataattcatcatattttccagccagatattccatcgatgcgaattgattttcggttacggtcaataattgaactatgccgttttctggtattatttttttgattctgtcgtgagttgatttttcatttgtggaattgagcaccaatttagtgtagacagattgctgcatcataacaaatccttcttgggtgagtcttttgcgaaaagtggtgtatnttttacgctcgttagcattggtcattggtaagtcgaagaatataatcattctcatatagcgcactctcatagttatattaattcatattcnggtagntcgtcgtcccctgtntccattgtcctgaaaaatagcttcacgtagatactgatagcgtttgataggaactgttctttgccgaggataacaactttatggttaagaatntcaatcagtctactcttaaagaagtcgtcaaatgcaaaattgcggcatttgtaaacttcgctgtcgactataggtctgaacgactccatgaggtcgcaagtaagattgaacgggttgtattcattncagtgattgacgcctatagttgttgaatatccagcagccgtaatctctcgattgaaggcagacagaagaatagcgtagccataatttaatgccgcatttatatcattagagctntctcgtgaaaattttggaccaaacaattctttgaagtagagcttggctgcatgagcttccctgttggtgagatctccgggagatacgttcgcggcgaagttcattagcgcttcgcaggcggaactattgccagtttctctatagatcgtctgggcttgcttaattatcttttgagtaacgattgttttccataagttatttttggtcgattgcgaccactggctttgctttgacatctgtttgcttgcgttgtgagatccgtaataaggaattatctctccatacggattacgctgatgatcacagaatatcactttgactttatagcgagataattcacacagtagataagccgtcagattaacagcggtattttcaattattaaagtgccaatttcacttatgtggagtgttttttcattgccgtcgctagtaataagcatataatcatttttatagcttaatttacagcgatttttgacgattacagttcgccaagacatatcttaa

SEQ ID NO: 790 - DNA, 4000 bp, Escherichia coli
  misc_feature (612)..(612): n is a, c, g, or t
  misc_feature (3570)..(3570): n is a, c, g, or t
  misc_feature (3583)..(3583): n is a, c, g, or t
  misc_feature (3787)..(3787): n is a, c, g, or t
tggcctttttatctttgtgtcatcccagcagcatggggctcggggatgaataatacttcgacctttgccctagcttccaagctaactcccccggaagatcagggaagtctttttggcgttcttggagcagtgcagagccttggaagaattctgggccctgctatcggcacccttgcatttgctcaatacggctatcgtatgcccttccatgttgctgtggggttcattgtattagccttaggtgtagccgtagccctactttcagcccagcccaataatgattcaaacaactctcatcatccctagaggttagcggcgcatggaccccttcgatcgatcacaacctgcgactatcctttttgatcttgatgggactctcgtagatcccttcttgggaatcaagcattgtctccaaaagatttcgcaatcgcacaactttccaatgcccgaggacaatcaaatcaaagactccattggtttgggtatgaaagaagcgcttcgtcgactaaatctatttagcgatgccaaggatcttgaccatgcgctcctttctttttgggacgcctaccgtgaagatgggctattcgagcacgaactttatccaggtatctncggcctattacatcgacttaaacgtcaaggacatcgtatctacatcgtgagttcaaaaccgggcatttttgcccgaagaattgcctatcagttcgacctaaatctaatttttgatgccatattggggtcctctctcacagaggaatggcaaactaaaaaagaggttttagatgggttgattgcctctggcgccattcagggtcgaggcatcatggtcggcgatcgcgctgatgatatcctcgctggtaaaattcacggtctttacacgattgcggtgagctacggctacggatccccttttgaaattaaggaaagtcaaccagatttcactgctcggtcggtggccgatcttgatcaatggtttcaatctacattcccctcggatgaactatttgatcctttcaatcgatccgagtagagacctaggactgatttctgggattgctaaatcaatagaccttacgatgcaagtcatgacatagttatggatatggaatttatttatgccattatcttaggagccattcaagggattacagaatttttacctgtgagctctacggcgcatttgactctagcagagcatctattgctcggaaaaggaatgccactagcgtttgatgtcttacttcatgtagggacgctcttggcactcctaatctattttcgcgatgatctcagattgatctatcagggacttcggggcagaaatcacgagggatccaatctgggtcgcatgattgcttttgctatggttcctacagttgtatttggatttttaaccaggtccactaagggatgggctaaggatcatttatgggtctatggcttaggtttattaattacagcttggatgctttatcaagccaatcttaaatctagtcaaaactccgggaaacctctttcgtcgctaaagaagcaagatgccttggcgatcggagccatgcaaggaattggtgggggttttggtatttcaagatctggatcgaccatttcgattggcaccttgagagggcttagtttaaacgctgcaacgcgatttagtttcctgttgggaatccccaccatagcggcagcgacgctgttcgaatttagatattttataaaggcatgggtttttaatactcctctgcctgactcaattggatttgagggtgggaattacccgctgctatcgtgcctcacgggtgtcatcgtcgctttcgtgtcgggttatttttctatctccctactcgaccgcctgacaaaaaatccaaagctaaatggtttcgctttctattgcctatgtatgggaacgctacttctgattttggggaccgttggtgttgatggactccagaatttaggtggaattcctcatcgataaaatatgttacactactgcctctaagggaaacacacaatgattgaggtttctgatgtttataagtcattcacactaaaagataagagaactttaaagatcaaaacgattgccgcagtccagggggtatcctttcaggttcagcctggcgagatatacggacttctgggccctaacggagcaggcaaaagcaccactcttcgtatgattgcaacgttaatgcgtccagaaaaggggtttatcaaagtggccggactatcgaccttggaccagcccaatgaggtaagaggaaaactgggtttcttagcgacggatatgggtatttatgagcgtttcacacctcgagagcaacttcgaattttcggagagtttcaaggaatggactcagagactgccgaaaagcgtgggttaaaattgctcgacgacctgggaatatcagattttgcaaatgtcaagatggatggcttctcttccggtcaacgacagaagtttaatatcgctcgtgcgcttcttcacgatcctcaggtaattatttttgacgaacccactactgggcttgatgtacttacggctaaaactgtattagatctacttttgcatctaaaaatgcaaggcaaaaccatcatactttctacacatatcctacccatggtagaaaaaatatgctcgcgagttggaattatctaccagggaagacttcgagctgaaggttctcctcggcaggttatggaaacatataattctcatagcctcgatgaagtattttttacgctagccgcctctaaagaaccggaggagattcaatgaagggctcttggttagtactcaaaaaagaaatgtactattggactaaagatcgacgtacgctctttttaacgctgttctttcctttaattctttatcctcttttgtttggcatcatgaccaaaatgggaatgaaggactctcagagactcaacactacagttacacaggtctccatggaagacccagctaatatcctctcccctacccttttcagagaaggctcgggttttgaaagattcaccggacccaacgtaaatatacctctagccttgagccaagaagaatttcatttatttatcaaagtaccccatgatgccaatcttaatgtgaaatctcaaaaaccgattgctcttgaaatcacttacgatccctcgaaagatgtatccaaaaaggggttttcgagaattcagaagtttatcaaagataacgatgctttaatcgtagtcgaaagattaagtgaattaaaaatatctcctgagattttagaacctacccgaatctcggtcattaagacgactggggccaatgaagaaattggcaagttaatcggactcttcctgccctactttttattaatttctatgtatgcaggcgcaatgcagttcggagctgatatcaccgctggcgaaaaagaacgtgggacacttctctctctattaaccactcgactttcaaggctagaaattatgcaaggaaagatgctggctattttctgtgtctctatcttagggatcgctataaatcttctagccataggcctagggggattcacagcaggaaatctcgtnctttctgatcgtnttgaacaagccaaagggttagcgaccagtcttggctcatctatgccacccaatagtgtcaatattgaccttcagtcgatcctgacacctcaagcaattttgctgacactcggcttattaattcctctaggattgctattctcagctatcattctgaccataggggctcagtctaaaagcgtaagagaggccaatgtcgccatgntgcctggaatttttgtagtcgtagctataggtgtcttctcccttgcgcctggcatcgaaaaacttgcttacctaccctttgtgccgcttatgaatatcaccgtagtgataaggaaactattcgccggacaatttgttatgtgggaataccttattacccttttaatgaccctccttctaacttggtttacagtggctctgtcggggcgtctgt

SEQ ID NO: 791 - DNA, 4000 bp, Escherichia coli
  misc_feature (1)..(1): n is a, c, g, or t
  misc_feature (3)..(6): n is a, c, g, or t
  misc_feature (8)..(10): n is a, c, g, or t
  misc_feature (14)..(14): n is a, c, g, or t
  misc_feature (16)..(17): n is a, c, g, or t
  misc_feature (19)..(19): n is a, c, g, or t
  misc_feature (22)..(28): n is a, c, g, or t
  misc_feature (30)..(39): n is a, c, g, or t
  misc_feature (41)..(43): n is a, c, g, or t
  misc_feature (45)..(45): n is a, c, g, or t
  misc_feature (47)..(48): n is a, c, g, or t
  misc_feature (50)..(56): n is a, c, g, or t
  misc_feature (58)..(64): n is a, c, g, or t
  misc_feature (67)..(67): n is a, c, g, or t
  misc_feature (70)..(70): n is a, c, g, or t
  misc_feature (72)..(87): n is a, c, g, or t
  misc_feature (89)..(100): n is a, c, g, or t
  misc_feature (102)..(102): n is a, c, g, or t
  misc_feature (104)..(104): n is a, c, g, or t
  misc_feature (107)..(110): n is a, c, g, or t
  misc_feature (114)..(116): n is a, c, g, or t
  misc_feature (118)..(123): n is a, c, g, or t
  misc_feature (125)..(131): n is a, c, g, or t
  misc_feature (133)..(141): n is a, c, g, or t
  misc_feature (143)..(158): n is a, c, g, or t
  misc_feature (161)..(167): n is a, c, g, or t
  misc_feature (169)..(169): n is a, c, g, or t
  misc_feature (173)..(173): n is a, c, g, or t
  misc_feature (175)..(178): n is a, c, g, or t
  misc_feature (180)..(181): n is a, c, g, or t
  misc_feature (184)..(184): n is a, c, g, or t
  misc_feature (186)..(186): n is a, c, g, or t
  misc_feature (188)..(188): n is a, c, g, or t
  misc_feature (190)..(190): n is a, c, g, or t
  misc_feature (192)..(194): n is a, c, g, or t
  misc_feature (197)..(199): n is a, c, g, or t
  misc_feature (202)..(204): n is a, c, g, or t
  misc_feature (206)..(206): n is a, c, g, or t
  misc_feature (208)..(211): n is a, c, g, or t
  misc_feature (213)..(216): n is a, c, g, or t
  misc_feature (218)..(219): n is a, c, g, or t
  misc_feature (221)..(229): n is a, c, g, or t
  misc_feature (231)..(232): n is a, c, g, or t
  misc_feature (234)..(242): n is a, c, g, or t
  misc_feature (245)..(245): n is a, c, g, or t
  misc_feature (248)..(258): n is a, c, g, or t
  misc_feature (260)..(261): n is a, c, g, or t
  misc_feature (263)..(263): n is a, c, g, or t
  misc_feature (265)..(266): n is a, c, g, or t
  misc_feature (269)..(270): n is a, c, g, or t
  misc_feature (272)..(274): n is a, c, g, or t
  misc_feature (276)..(282): n is a, c, g, or t
  misc_feature (284)..(288): n is a, c, g, or t
  misc_feature (290)..(290): n is a, c, g, or t
  misc_feature (292)..(304): n is a, c, g, or t
  misc_feature (306)..(306): n is a, c, g, or t
  misc_feature (308)..(318): n is a, c, g, or t
  misc_feature (320)..(320): n is a, c, g, or t
  misc_feature (322)..(324): n is a, c, g, or t
  misc_feature (326)..(328): n is a, c, g, or t
  misc_feature (330)..(336): n is a, c, g, or t
  misc_feature (338)..(341): n is a, c, g, or t
  misc_feature (344)..(345): n is a, c, g, or t
  misc_feature (348)..(348): n is a, c, g, or t
  misc_feature (350)..(353): n is a, c, g, or t
  misc_feature (355)..(357): n is a, c, g, or t
  misc_feature (359)..(359): n is a, c, g, or t
  misc_feature (361)..(361): n is a, c, g, or t
  misc_feature (365)..(369): n is a, c, g, or t
  misc_feature (372)..(373): n is a, c, g, or t
  misc_feature (375)..(377): n is a, c, g, or t
  misc_feature (380)..(383): n is a, c, g, or t
  misc_feature (385)..(388): n is a, c, g, or t
  misc_feature (392)..(396): n is a, c, g, or t
  misc_feature (399)..(400): n is a, c, g, or t
  misc_feature (402)..(402): n is a, c, g, or t
  misc_feature (405)..(411): n is a, c, g, or t
  misc_feature (414)..(417): n is a, c, g, or t
  misc_feature (419)..(419): n is a, c, g, or t
  misc_feature (421)..(421): n is a, c, g, or t
  misc_feature (423)..(423): n is a, c, g, or t
  misc_feature (426)..(427): n is a, c, g, or t
  misc_feature (429)..(429): n is a, c, g, or t
  misc_feature (433)..(433): n is a, c, g, or t
  misc_feature (435)..(435): n is a, c, g, or t
  misc_feature (438)..(440): n is a, c, g, or t
  misc_feature (443)..(444): n is a, c, g, or t
  misc_feature (446)..(446): n is a, c, g, or t
  misc_feature (448)..(448): n is a, c, g, or t
  misc_feature (450)..(450): n is a, c, g, or t
  misc_feature (452)..(453): n is a, c, g, or t
  misc_feature (456)..(458): n is a, c, g, or t
  misc_feature (460)..(460): n is a, c, g, or t
  misc_feature (462)..(463): n is a, c, g, or t
  misc_feature (465)..(465): n is a, c, g, or t
  misc_feature (468)..(469): n is a, c, g, or t
  misc_feature (471)..(471): n is a, c, g, or t
  misc_feature (475)..(475): n is a, c, g, or t
  misc_feature (477)..(478): n is a, c, g, or t
  misc_feature (480)..(481): n is a, c, g, or t
  misc_feature (486)..(486): n is a, c, g, or t
  misc_feature (489)..(490): n is a, c, g, or t
  misc_feature (492)..(495): n is a, c, g, or t
  misc_feature (498)..(503): n is a, c, g, or t
  misc_feature (506)..(507): n is a, c, g, or t
  misc_feature (509)..(509): n is a, c, g, or t
  misc_feature (511)..(513): n is a, c, g, or t
  misc_feature (515)..(515): n is a, c, g, or t
  misc_feature (519)..(520): n is a, c, g, or t
  misc_feature (522)..(522): n is a, c, g, or t
  misc_feature (524)..(527): n is a, c, g, or t
  misc_feature (529)..(531): n is a, c, g, or t
  misc_feature (533)..(540): n is a, c, g, or t
  misc_feature (542)..(545): n is a, c, g, or t
  misc_feature (547)..(550): n is a, c, g, or t
  misc_feature (552)..(553): n is a, c, g, or t
  misc_feature (556)..(556): n is a, c, g, or t
  misc_feature (558)..(559): n is a, c, g, or t
  misc_feature (561)..(564): n is a, c, g, or t
  misc_feature (566)..(567): n is a, c, g, or t
  misc_feature (570)..(570): n is a, c, g, or t
  misc_feature (573)..(574): n is a, c, g, or t
  misc_feature (577)..(578): n is a, c, g, or t
  misc_feature (581)..(581): n is a, c, g, or t
  misc_feature (583)..(583): n is a, c, g, or t
  misc_feature (586)..(586): n is a, c, g, or t
  misc_feature (589)..(599): n is a, c, g, or t
  misc_feature (601)..(604): n is a, c, g, or t
  misc_feature (607)..(608): n is a, c, g, or t
  misc_feature (610)..(610): n is a, c, g, or t
  misc_feature (612)..(613): n is a, c, g, or t
  misc_feature (615)..(615): n is a, c, g, or t
  misc_feature (619)..(621): n is a, c, g, or t
  misc_feature (624)..(624): n is a, c, g, or t
  misc_feature (626)..(626): n is a, c, g, or t
  misc_feature (631)..(632): n is a, c, g, or t
  misc_feature (635)..(635): n is a, c, g, or t
  misc_feature (637)..(644): n is a, c, g, or t
  misc_feature (651)..(652): n is a, c, g, or t
  misc_feature (654)..(654): n is a, c, g, or t
  misc_feature (659)..(659): n is a, c, g, or t
  misc_feature (661)..(662): n is a, c, g, or t
  misc_feature (668)..(668): n is a, c, g, or t
  misc_feature (670)..(673): n is a, c, g, or t
  misc_feature (676)..(676): n is a, c, g, or t
  misc_feature (678)..(680): n is a, c, g, or t
  misc_feature (682)..(683): n is a, c, g, or t
  misc_feature (686)..(689): n is a, c, g, or t
  misc_feature (692)..(692): n is a, c, g, or t
  misc_feature (698)..(700): n is a, c, g, or t
  misc_feature (703)..(703): n is a, c, g, or t
  misc_feature (705)..(705): n is a, c, g, or t
  misc_feature (708)..(710): n is a, c, g, or t
  misc_feature (713)..(713): n is a, c, g, or t
  misc_feature (715)..(716): n is a, c, g, or t
  misc_feature (719)..(726): n is a, c, g, or t
  misc_feature (729)..(729): n is a, c, g, or t
  misc_feature (731)..(732): n is a, c, g, or t
  misc_feature (735)..(736): n is a, c, g, or t
  misc_feature (738)..(739): n is a, c, g, or t
  misc_feature (741)..(743): n is a, c, g, or t
  misc_feature (747)..(758): n is a, c, g, or t
  misc_feature (760)..(764): n is a, c, g, or t
  misc_feature (766)..(768): n is a, c, g, or t
  misc_feature (770)..(770): n is a, c, g, or t
  misc_feature (772)..(772): n is a, c, g, or t
  misc_feature (774)..(775): n is a, c, g, or t
  misc_feature (778)..(780): n is a, c, g, or t
  misc_feature (786)..(786): n is a, c, g, or t
  misc_feature (788)..(788): n is a, c, g, or t
  misc_feature (791)..(793): n is a, c, g, or t
  misc_feature (796)..(796): n is a, c, g, or t
  misc_feature (802)..(806): n is a, c, g, or t
  misc_feature (809)..(809): n is a, c, g, or t
  misc_feature (811)..(813): n is a, c, g, or t
  misc_feature (816)..(816): n is a, c, g, or t
  misc_feature (818)..(819): n is a, c, g, or t
  misc_feature (821)..(827): n is a, c, g, or t
  misc_feature (840)..(845): n is a, c, g, or t
  misc_feature (849)..(849): n is a, c, g, or t
  misc_feature (853)..(854): n is a, c, g, or t
  misc_feature (856)..(856): n is a, c, g, or t
  misc_feature (858)..(858): n is a, c, g, or t
  misc_feature (860)..(862): n is a, c, g, or t
  misc_feature (872)..(873): n is a, c, g, or t
  misc_feature (877)..(877): n is a, c, g, or t
  misc_feature (879)..(881): n is a, c, g, or t
  misc_feature (883)..(885): n is a, c, g, or t
  misc_feature (893)..(895): n is a, c, g, or t
  misc_feature (897)..(899): n is a, c, g, or t
  misc_feature (903)..(904): n is a, c, g, or t
  misc_feature (906)..(906): n is a, c, g, or t
  misc_feature (909)..(909): n is a, c, g, or t
  misc_feature (911)..(911): n is a, c, g, or t
  misc_feature (914)..(914): n is a, c, g, or t
  misc_feature (918)..(921): n is a, c, g, or t
  misc_feature (923)..(923): n is a, c, g, or t
  misc_feature (925)..(925): n is a, c, g, or t
  misc_feature (928)..(930): n is a, c, g, or t
  misc_feature (938)..(940): n is a, c, g, or t
  misc_feature (942)..(945): n is a, c, g, or t
  misc_feature (949)..(953): n is a, c, g, or t
  misc_feature (957)..(960): n is a, c, g, or t
  misc_feature (962)..(963): n is a, c, g, or t
  misc_feature (969)..(970): n is a, c, g, or t
  misc_feature (976)..(978): n is a, c, g, or t
  misc_feature (983)..(983): n is a, c, g, or t
  misc_feature (987)..(987): n is a, c, g, or t
  misc_feature (989)..(989): n is a, c, g, or t
  misc_feature (991)..(992): n is a, c, g, or t
  misc_feature (998)..(998): n is a, c, g, or t
  misc_feature (1985)..(1985): n is a, c, g, or t
ngnnnngnnnagangnngnggnnnnnnntnnnnnnnnnnannncntnntnnnnnnntnnnnnnnagnagnannnnnnnnnnnnnnnncnnnnnnnnnnnntnanaannnnagannnannnnnnannnnnnnannnnnnnnntnnnnnnnnnnnnnnnnaannnnnnngncgangnnnncnncgncntnangnnnttnnncannnanannnngnnnnannannnnnnnnncnncnnnnnnnnnttnttnnnnnnnnnnncnncngnngannannncnnnnnnntnnnnnanannnnnnnnnnnnncncnnnnnnnnnnngngnnnannncnnnnnnntnnnngannaanannnncnnnangncgtnnnnnccnncnnncgnnnntnnnngaannnnntcnncngcnnnnnnnccnnnncngncnccnncnactncntcnnngannancnancnnctnnncncnncnacnncntccncnncnncctcntcnncnnnnaannnnnnatnntngnnnanaacnncncnnnncnnncnnnnnnnntnnnnannnngnngcngnngnnnnannccnccnncgnngangncgncgnnnnnnnnnnnannnngannananncncaannnaanangacgnngangnnnnnnnnaagaagnnanaggangnnggtggngnnnncgncnnntnntcnnnngangaagannnggngnagnnnaanannaannnnnnnnccncnncgnngnngnnnaatnnnnnnnnnnnntnnnnngnnntngntnnttnnntttttngnttnnnaanaaaatnnnnnttntnnnccnannannnnnnntcctcctcctccnnnnnngatnattnntntncnnntcgtcgtcgnngctnannnannnctcctccnnnannngtcnncnacnanaanaaannnnantnctnnntctttttnnntnnnnctcnnnnncaannnncnncgtcgnnctcgtnnntgttnttcntntnntgatgntgatgatgactcaaaaccaacccctaataacaccgttgtgaatttggacgtctccgggttacgccaggaaaccaaaaggcaagaaacgaaagcgttgaaaaaagtggcgaatgcgacgacgaaattacgactgtcgaaagaaaaaatgaacgagttgttagaaaatccaaacgcgacgacggagatgttggaagaatgtcccgacgtggattttttggaatcagacgtggaggagaagaaaaagcggttggaggaggtgcggacgctgctggcaatggtggagaactttacgggagggaagaagaataaagaagacgattcgaaatggcaagagtgcgcggagtttgcgatgaaattagggatatcggacgcgccaccgccgaaacctccacgagggccgaagaaggtaaaaaatgtgagcaaaaccgggcctcgtcgaccgtatttcgcgtacgcgtcggggaacgacgtaaacgacgacgaagacataccgacgaccgaaatccgcgtcggccgcacgtccgaagacaacgacatcgtctccttagacccaaccaacgacccgaacgagtggtggatgcacgccgccggatgtcctggttcccacgtcgtcatcaaatccaccgcgccgtccgacgccgcctttttcgacgccgcgttgctcgccgccaagtttagcaaagcctctcgcgttggtcgcgtgaaagtctccgtcgttcggtgcagacaagtgagcaaacctaaaggtgccaaacctggtttagttcggttatccggtgacgtgaggacgatggaagtgcgcgtggatgaaaatctcgatcgattggagatgttagagaggacgaaaacataataacatctctccgaaaaagctgttcgtttgtgtgtttggctaggtttagttcggttctccggtgacgtgcagacgatggaagtgcgcgcggatgaacatctgagtcgattggagatgtgtaagagaggacgaanttttttttttttctccttctaaaaagttgttttgtgtgcgttggttacgtcacaaaaatcttaacgagatccgatcagtcaacacttttcgacgagacaaacggacacaaacacaaaaatgactaaaattgccatcttgtgcacgtccgcgacgacgttcggcaaatccgcggagaagaaaccaaccggcgtgtggttggaagaaatcgccgtgccgtattattccatgatggaaaagaaattttcagtcgatttcttcagcgtcaaaggcggggaaatccccgtcgacggaggatcgcgaggcgaagggttttacacgccagagtgcgtgaaattcgataaagacgacaccgcgcaagctttgatgaagacatcgaaaggtttatccgaattaaacgtggaagaatacgacggcgttttcttacccggaggccacggatgttgcactgatttctaccaaaaccaagagttggcgaaaactatcgagcaatttttaacggcgaagaaagccgtcgcgctggattgtcacgcgccgattgcacttttatcgtgcaaaaaagcagacgggacgacaccgttggtgagtggaatgtccgtgactggcttttcggacgaggaagaggggcaggttgggatgcaagaagaggtaccggcgttgattgagaaagagatggtggcgcaaggcgccaagtactcgaaggcggaaggcgcgtggggcgctcacgcggttgtcgacgggacgttggtgacagggcagaatccagcgagcagtaaagtgtgcgtggagaagtttgttgaattgttggcgttaacgcaaactcaagtagtgaattaaaaccttaatttgtatttgttttttattacagatgttttataatataaatgggtaaatattttgatatagtagtacactctcgaaaacgaagacggggaggggatacattccttaccgcgtcgaagaagaagaggaagaaggagaagaagaagaactgctactctttgactttttcttcttgtagttcttcgacgtcactttcaacagcgtcttctccacgtccacgacgttgtttttaatcgaaacgtccccaaactgcaaatcgtccatgaagccatccggtattcgtttcacgtgtctcggatcgatgaacggaatccactcgtccggcggattcacgatcctggaaaactgcgaaaactccccggacgcgacgcacggctcctttgccggacggacgagcttcattccgctgcactgcttcaacatcttatctcctttgcgattgttacatttcgcgcacgctgtcgttaaattcgtccacgaccactcgccgcctttcgacgccggaacgatatggtcgatggtcaaatcgtccctcgcgccgcaatacgtgcacgaatgatgatctctaatcaacacgttcttcctcgataacgcgatcgatcctttctgtttatcatacactctcgttttcaccaccgcgggtaaataaaacgccgaatacgccgacgccaccatctcttcgtaatattccaaaacgtccaccttatcgaacatggctaaaatcaacgccttttgccaactcacgatgttgctcgtttgcatcgccacgtctaaaacgagcactcttcgttggtccaactctgagggcgaggatatgattcggctcttttccacttcctcgcgcaattcgtacatgttttcattcaagatcgttgcatttgttctcgacatggttgaaaaagagctgctactcatccgcgtcgtcgttttcccttgcgtcgtttgttttgctcgtctcatttgtttttcccgcgcgtgtttttgctcggcggtgttgcacttgctgctgttgttgttgcacttgctgttgttgttgctcaaatcgtgactaaaactgcgcgtcgcttttattacaacatcttctcttcgcatcactcgcgacgcttcgtttcctctccgtcgtaacgaccacaacttcattccatcgtttcccgaaaggcgatgcgtgctcgag

SEQ ID NO: 792 - DNA, 4000 bp, Escherichia coli
  misc_feature (554)..(554): n is a, c, g, or t
  misc_feature (664)..(664): n is a, c, g, or t
  misc_feature (1985)..(1986): n is a, c, g, or t
aaatctatctgagcgccgcgttttagtaagtgctgcacaatttcgagatgcccactctgagccgcgtacatcgctggggacattcccagtttattctgaaagtcagctcgagcgccatgtttcaataaagttttgagtacctcaatctgccctccgtgcgcggccagcattaaagccgtccacttttgattcgtttcagcattcggatttgcaccttgctggagtaaaaacaaaatggtatcaaggtgtccttttttagttgcctgaatcaatgccgttttgccttgggaatcagtatcattcaggcgggcacctctttctacaagtagctttactgtggccagagctccaattccggaagcaaagataagcggtgttacaccgtgaaactctttcgttccgcgaatgtttacgctcacaccttgtgccagcacccgctctactgcaggcacgctattcagaatggccaacatcagcctagtccattcgtcgcgtccttttacgctgattaagaaattctccaagcggtggctttcttgcgaatcagcttggtnagctgaggtttgagcaaaagccagcgatgataatgacaatccggaggaagtaaaaagaatatctgctgctggagggaaaagaagcgaaaaaagcagggctgtccggacantagatgtccgagaagaggtatggggccgaaaatactgaaacctacggaaaacccaagatggaataatcttacacattagactcgggcttgacagtaaaggataaaccattttcctgttttccatcagttggatgcagaaagctgctgatattgagtaaaagacctgttaaaaacatggcgaccacaagagatgtgcctccgtaactgatgaaaggaagcggcaagcccttagtcggcagcaagccaataacaacgaagagattgaggatgatttgcaggctgagtatagttgtggctccaaatgctaggtattttccaaatgcatcctgtgcattccacgcaatccagtaaccgcgccaaataaaaaccgcaaatagaataatcagaacacatacccacaaaaaccctaattcttctccaatgatggcaaaaataaaatcggtatgggcatcaggcaggaaaagccgtttctgaaggctttctcccagacccttaccaagccacccacctgttccaagtgcaatgaaagactgaattatttgaaacccagaattttgtggatcatcccaaggattcaaaaaagccagcattctctgtacgcgataggtatgtgaagcaatcaataatcctgcaataacaccaacacctaacaggctggtggcaatatgaatggggcggccgccgccgacatacagcatcagcaaaactgtcgttgctattaaaactaccgtgccaaagtccggttgtagcaggacaagaaaaaggtaaattcctgtgacaacaaagttaggcgtcaaaccgcggaagaaaaaagccagcatttcttgttttctctccaaatatgaagccacataaataatcaaaacgaccttcagtaattcggcaggctgcaaactcaacgacccgacacgtagccagcggcgtcctcctttaacctcgtgtcctagttcaggaatcaaaacaatgatcagtaaaaccaacattcccagcattagccaaatagaaagctgctgccatttgtgatagtctacaaccaacgcaactcccatcacggcaagtccaactagaatatgcatcaggtgcctgtataaaaagtactgaccatcattgtgttgaatgtctgcataaactccacctgtgctgtaaatcatgactgttccccaagatagcaaaaacagggttgctccaatcagaggcaggtcatatcgataatgcgtatttttttggggagacaaattctgttttggtatgaaaaataaagagaatattaaattctgagtttctaaccgggcagactttcaagttaatttcctaacaaacnntaaattatatcgttcttcttaagaagattcaaatgcacttttcgtgagtttttgctgcagggcctcaagattctgcggatttttttcacgttctgaataaatttctatcacagcagatttgttttcgcgaactgcttttgtataatctgactcaaaagcgctgatggaatcagggttgaaataacccaagtcaaacatttcagaaactgagctgaagtcgtaggagtggggtgtaccgaaaaatggttcaaatatctctgtttgccggataacgggtaggaatgagaaaatacccccgccgtggttattgagcaacaccagcaaaaccggttctggagaatcagcgagcagtttgaatgagtttaaatcatgtaatgcagacaaatctccaataagtaaagtgaccggccgctgcagtccggaagagtatccgcacgctgatgcaataaggccgtcaattccgctggcacctcgatttagagctgttgggatgtctgctccttttccggaaccaaccatgtctactgcacggactggtatgctgtttccgatgaaaaaaccgtgagtttctggaatgatttcagtcagcttccgcactaaaccgaactcgttaatctcctttttttccggattaacagaaaaatgctgtaccatcaaatcttcaattcgctctgatgcctgcagccattgttgagttattgactgaactagatcggcccttttttcttgctgcaaacccaccacaacatgctcgcaaaactcagcaatatctgcctcaattttccagcgaaagttatgggactggtcgtggcgttcagcatgatctgcgatccacaccatttgagatgcaggattctgttcccagcgtttgagccagcgttttgaagttggtgggaaaccaatgtgccaaactgcttcaattccccagtttgcaacggccgagtcgtccagtaacagctgatcgtagtaagtaatccggttgggacaattattacccagacgaagtccagaagtgacatctgcaaacaccggccagcctaactcttctgtcagttttctaaggggatcaagagagttcgacggaactcgtccaatgctcaaaattccggattctggacagtgttttaataaatcctgtatttctttagtgggcaggatttttcttgaagcagcataacgaacgtagctttttgttttcggtggctgtattaaattaatttttatgtctgtttcattgttttcaaagaaaggttcacggaatggaaaattcaagtgtactggtcctgacaaaggacggtgagttttggaaagtgcatggtcaatagtggaaagtaaagcttcggccgtgaactcaggtccaggacagccaggatcaaaaaaccagcggacgtgtgtgccaaaaagttgagtttggttaatagcttgattggctccggtgtcttgaagttccagtggtcggtcagcagtcagcaccagcagcggaatttgctcaactgaagattcaataactgctggtaagtaatttgcggcggcagttccggaagtgcagatcaaaactgccggatggccggttgcacgggcgtgaccgagggcataataagcggctgcacgctcatcgtaaaatatagtcgattttgctccttggttgcgcgccgctgcaatcgtcaaaggtgtggagcgtgatcccggagaaatgcaaaaacactccgtgccatgctgcactaattcctcaatgatccagtcaccccaacgttcattccagttcacgatcgtcctaataaagattgccagctttggagtttgacttctatctccctccactcttcttccggaacggatccttcaacaattccagctccagtataaatccgcaaagtgcgaccgcacaatagcccggatcgaataccaacggcaaattccgcctgaccacgttttatccagcccaccggtccggcataccacccacggtcaaatggttcaagctctcggattagtgcacgagcctccggatcag

SEQ ID NO: 793 - DNA, 4000 bp, Escherichia coli
  misc_feature (7)..(7): n is a, c, g, or t
  misc_feature (1421)..(1421): n is a, c, g, or t
  misc_feature (2927)..(2927): n is a, c, g, or t
  misc_feature (2960)..(2960): n is a, c, g, or t
tttaatnataccattaggaataccttatggtataattggtacctataaatatattttttataagaatttcatatgagtattaaatctacaggtaagaatatcagtaccctcaagagtaaggacgaggagaaacaattaattaaagaattgaaagaggatgccaagtacaaggcagctgcccttacaggtaagaaaccttctgatattgttgttgaggtaaagaagactagaggtgaaggttatggtaagatatccagaggagctggaggtaaggctgccagaagacctaagggtaaggtgtacaaacctacagatgatgattatgataaggtagaggaaatggtaatcattggcttagaccagcatactattgctaagattatgggtgtgtctaatgctacactattgaaatattataggcatacattagagacagctagagataagcgtactgctaatgtagctggtgttgcttataagatggctatgagtggtgagtctgccagtatgactaccttctggttaaagacacaaggtggctggaccccgaaacaacatattattactgaggaccgtaactttgatattagctggtcagcagatgaagaagatattgctgatgctaataacagaatagagaatcagacggaacactgagaggatgcaggtacaggagaagcgtaaaggggttgtgataccctatacacctagaacattacaagctaagctacataatgagttaggtagatttaatgtggtagtatgtcacagaagatttggtaagactgtatttgctattaatcaaatgattaagtcagctatacaagacttacagacaggtaagaaagcacctaggtatgcatacttagccccgctgtttaagcaggctaagactgtagcttgggacgaattaaagagattactgagggagtttcctgatgttaagtttaatgaagctgagctaagggctgactttatgggggctaggatacaactatatggagctgataatcctgatacactacgtggtatctatcttgatggtgtcatcttagatgagtatgcacagatgaatcctaagatgtactctgaggttattcgtcctgcactatcagatagaaagggttggggtatttttattggtacccctaaaggtaagaatgaattttatgatatttatcattcagccaaagaaaagaagggctggaagagattcttattcaaagccagtgatactggtattctggatgatgaagagctagagatggcccagcaggatatggctgagacagagtatgctcaagagtatgagtgtagttggtcagcggctctaagaggtgcttattatgccagggagttggaacttgcctatgatgaggagcgtattggtaaggtaccatatgacccctctaagcaggtantaacagcctgggacttaggtgtatctgacagtacctccatatggtttgctcagtatgatggtaaggctattaatttgatagattactatgagaactctggtgagggactgcctcattatattgatgtcttaaatcagaagggctataattatggtgcacatatagcaccacacgatattgtagtcagagaattcagtacaggcaagagtcgtaaagatttagctttctctttaggtattgactttcaagttgcacctaagttaaaggtaatggatggtattgatactgtacgtactacattaaacaagtgttggtttgatgaggataaatgtaaaaagggtttagatgcccttttgcagtaccgtagctcttatgatgataagaagaagatatggagtcagaagccagtacacgactggacttcacacgccagtgatagcttcagatacttatgtaatacagaggtagtgttcacaggtaacgacagtatatggggaaaggaattaccaaagcaagattttagttgggtaatataacgaacgggagtgagtagggatgaatccaagatggctagagaataaaattattgagatgtctgaggacattaaagaattaaaagaattactgaaggttgcagcacagactgtacctaaaacaaaaggtaaataatttatgagtaagaggatgactaagagagaactagcagcatacgtagagcaagagattcaagggtctcttggctacggtgatggtaagttaacacaacagcgtaccgatgctatggaccgttactacggtaagaagtatggtaatgagcaagagggtcgttctcagattgtaacacgtgatgttgctgatgtaattgaatggattatgccaagcttgatgaagatattcacaggcggggataaggtagtacagtttgaaccacaaggtcctgaggatgtagaggctgctaagcaagctactgactatacgaaccacgttataatgaaacagaacccagggttcaatattatctacagttggtttaaggatgctctattacaaaagaatggtattgtcaaacattattgggatgataccacagagattactagagaggaatataagaacctcactgaggaagaattcacatctctattgatggatgatactgtagaggtagttgagcatacagccaacggagaactatcagaagaagatatgatggtagggatgcagcagcaacctctactgcacgatgtagtaatcaaaagaacaaacgagagtggtcaggtaagaattgaacctgtgccgcctgaagaatttttaattaataaatatgctaaaagtgttgaagatgcacgctttgttggtcatagagttaagagaactaagagtgatttaattgctcaaggctatcctaaggctaagattgagagagcattctctgcagaagaagctgaatataagtctgaacgtctagcacgctttgactttgatggtgactctacttatggtggngatgtggatgagggtatttgggtaactgaatgntatatacacgtagactttgataatgatggtattgacgaattaagaaaagtaacgaaggttggagatgagattttagataatgaggcagtggacagtgttcccttctcctcccttacacctgtaccaatgcctcataagttctacggtctgagtatttatgacttaatctctgaccttcaactaattaagactaccttaatgcgtaacttgttggacaatatgtacctaacaaataatgggcgttatgaagtagtcgagggtcaagttaatttagatgacctaatgacaagcagacctggtggtattgtacgagtacgtactccaggtgctgtaagtccactggctacgccacagttagaccagaactctttcaatatgctgggctatcttgatagtatcagagaagaaagaactggtgttaacaagaacagtatgggtattggagatggtggcttaaagtcacaccaaaccgctactggcgtagctcaagttatgacagctgctcaacagaagattgaacttattgcacgtgtattcgcagagacaggaatgaaggacctcgccactagtgtgtaccaattagtgcagaagtatgaatctcctgagaagattgtcagactaaataataagtgggttactctataccctgctgattggaaagagaaactagactgtactgcacaggtaggtctaggcttcggcaacaaggatatgaacctgcttcatttgggtcaactatcacagactattcaaatggttgctggtcatcctgctgctggtatgatgattaagcctaagaatgtatataatcttattgcagaacaaatcagagctatgggtatgaagaatgtagatgacttcatcacagaccctggtgagggtgatttacctcagcaaggtcctggtccagaagaacaagctaagcaagcagagatgcaacttaaggctgaagaactaaagctgaagttacagaagatgcaaacagaatcagctcttaaacagaaagagatggaactggaggcacagctagctcaacaaga

SEQ ID NO: 794 - DNA, 4000 bp, Escherichia coli
atcgaccccgcgcgcctcgccgcctcgttcgcgagctcgctcgcctcgttcggcagcgactcgaagaacgccgcgccgtccgtcgtaaacctttcccgatcgatcgccggcagtccctcgaacgcgtccgtcagcgccttcaccagtgtcgacatcacatcgatcccaccaccgtcgacgaccgaatcaaacgccgccatcgccgtccgcgccgcgcgttccagcgcgtcccacgtcgccgcgctcgccgccgcctccgccgcgtccgcgctcgccgccgccgcgcgcgccgcctccatcgcgcgtcgtcccgcgccctccgcgctcgcgagatcgatcgtcgccgtcgcttcgagcgccgtcgcgcgcgcgcgctcgagcgcgtcgtccgcgacgctcccgcgcgcgacgccgcgtcgacgtcgtcgctcggcgtcgagattccgccgcgagcgtcgctcgcgccgcgcgccgcgcgcgtcggcgacgcgcgcgatcgacgcgcgaggcgcgcgcgcggcgcccgtcgccatcccgcgcgtcggcgtcgcgcgcggcgtcgagcgtcggcgtgtgtggcgccgcgcgcgccgggccgcacttcgccccgcgcgacgcgccatgtcgagcgacgcgcgcgtcgccgagctcgatcgacgcgggtactacgtcgccgtcgacgtcccgcgcggggcgacgttcgcgctggacacggcggagtggacgtgcgacgaacgcttcgtgggcgtcaaggcgctggcgcgtggattgcacttcgtcgccgtgcgcgacgcgaacgagcgaggcgcgggcgaacgcgtgggagagttcatcgacgccgcgccgggaagcgtggagatccggaggtgggacgccgcggtggagacgctgggggagggagaggggatgagcgcggaggacgcggagcgcgcgcgcgcggcgacgcgggaaggacgagcgttcgatggagggttagcgtggtatccgaccgaggtcgagacgcgatggatgggattgagcggatggatcacgcgggacagcttgcggaggtgtggggtggattgcgggacgcgcgtggtggcgggcgacccggaggcggagacgcgcggcgacgaacggggaggagtggtgccgtatttcgataacatacagcgcgcgccgacgtttacggtgaatgcggtgcggaaaaggccgagtgggatgacgccggcggaggtgtcggcgataaatatcgatgcgaacgcgcggctggcgcacgcggtggcgtgcttcggcgacgacggctggcgcgggttgttgggagagtttcaactcgccttcgttctcttgatggggctgtcctccatggcggcgctggagcagtggaaacatctcgcgcacgtggtgtgctcgtgcgcggagacggcggtgttcgactatccggagctttacctcgggtttgtcgacgcgctcgatgcgcagctcgcgcgcgcgggcgaagactttttcgtggacgattacaccgaggacaacttcttgcggccgtgcatggtagcactgatgcgcatcgacgtcgacgacaccccgaagcgagaagtcacggacatggatgtcgaatcgacgctggacgcgatttcgagcaagctcgccgcgctcgctcgcggcgtgcgcgagaaattcgacgtcgacctcatcgaggaagctcgcgaggcgaagctcgcggactcgagcgtcgtcgacgccgaagaagacgccccggtcgtcgtcgagttgagtgagggtcattacatggccatgaacgcgaccgacgtcgacgtcgagtccgacgccttcaaaacggacgccgaatccggcgccgagcgcatgggctggatgcgcgacggcgccgatgtatcatcttagtcattcttagcgcttggtttagctcactgtacagtagcgcgtctttgtagtctcagctcgtccgacgctcgtctcgccgaaacgaaacaaactgcctcaaaacccggccacagggatcgccgcaaagatggcctcgccgttcgccgtcccgccgctccggcggcgcgccgccgtcctcgcggcgtgggaaactatcacagacgttatcgcggacgaaggtgcgcgcgcgcgcgcgcggtgacgagaaaacgacgtcgacgaagacgggcacgcgatgtgtcggatgtgtcgaaagcgacctcgcgagcgtggactgacggacgctgcggcgcgacgaacaggactggcgtcgacgcatgacgtgcaaacgttgataaagtcaatatttgctcacgtgcgagacgcgcgatggcgggtgaaggaggtgcgggaggcgatggagacggcgacgagcgccgcgagcgggagagacgcgggatttcgaagcgtcttcgtcgcggcgtgcgggaaagcggtggaaaagggagggtttagtgaacacgagtgttacgtcgcgagtcgattgatgtgcgccgtgatgagcgcgatgacgttggagagcgaggatgggttgttggcgaagtcgctggagacgctcgcgaggctgcgagcgaagggcgccaaggcgttctcggctaaggcgtttaaacagatggtgctcgcgcacgggggggatgtggttttggatagatacatcgagcttgtgcaaagtagtggtgggacgaatccggttctgtgcgcgttggcgcacgaagcgttcgccgtggccaaaacgacttctcggcgaccagccgagatccgcaaggcgcttttggaggtgttttgtaccgtcgtgcttggcgccgacgcgaaagtcgccaaagttggagtgtcgagcgagtcgtttgcgtccattttgacgaatgctacgagcgaagaactcaacgagaccttgctcccaaaagccgttcgacagttgcgtcgcagtcccgaagctgtcttgcccgccgttctcggcgcgttgaagacgttgagcgcggacgtgagcaacatgtgcgcggaaatggggccggtaatactgcctctggcgaagcacgcaaacgaagatcgtcgcgcgatggctctggagatcgtaagcgccctcgtgaatggttctgccgatgcgagcgtcgtcaaggagcacatttttgcgccgtgcacgagcgagttttcttcaggacctcgaccgaaggagtggaccgctcgcaccggtttgtacgctgtgattgcgtcctgttcgcagttgagcgactgcaaagcgagagagttgctcagcgccgacgccatcggtgttctctcagcggaactgaccgtggaaaagcaactcgaagcgaaagccgcagcgctcagcgctctaactgcatggcttcgtcatgcgagtgaatgcccagaatcgctcgctagtctggtaaaggaggcttcgaaggacacgacggagcgctgctcgacatttcagtgcgtagcacaggctttgcgcgtaaactctgcgcttccggcagggctatcaggcgtcgtcgccaacttgtctccgattgcggtggcgggcagtggtaagctagcactacgtgccgagggcttaagctcactatacatacttctgcgcgttgcagcagaagacccatctactgctgaagcgctgaagacgaacaaggtttgggattctgtcgcggcgtactttgagcctgcgaccatgacacgcttggacgacgagagtactgaaattcttgccgcgacgggtcagtccatcatggctttccacgcctcacatgcggcgaagatggggttggtagattcggtgattcaagcgattgcttttttgactgtgcacgctcactcacgaacacgagcggcggcgagagaggctgtgcgaggcgcaatttctgttggacaaccatccgtcaaaatgatccaagggctgcgacattggctcgcttgggccgaggctggaaagtgggagggtatgatggacgacacgttcccgtcgcaatacgccggtgcttcactgatagcatattgcgagttcaatgaagacgagcaagccctgacacttccgaatgatttg

SEQ ID NO: 795 - DNA, 4000 bp, Escherichia coli
  misc_feature (9)..(9): n is a, c, g, or t
  misc_feature (315)..(315): n is a, c, g, or t
  misc_feature (317)..(318): n is a, c, g, or t
  misc_feature (519)..(519): n is a, c, g, or t
  misc_feature (534)..(534): n is a, c, g, or t
  misc_feature (756)..(756): n is a, c, g, or t
  misc_feature (767)..(767): n is a, c, g, or t
  misc_feature (1080)..(1080): n is a, c, g, or t
  misc_feature (1097)..(1097): n is a, c, g, or t
  misc_feature (1242)..(1242): n is a, c, g, or t
  misc_feature (1985)..(1985): n is a, c, g, or t
  misc_feature (2016)..(2016): n is a, c, g, or t
  misc_feature (2522)..(2522): n is a, c, g, or t
  misc_feature (3128)..(3128): n is a, c, g, or t
  misc_feature (3152)..(3152): n is a, c, g, or t
  misc_feature (3595)..(3595): n is a, c, g, or t
cgccgctcnagccccgcgctgaccatacagacggccagatcgagctggaaaccgagctccaaggcctgggtgagatcgctgttccagacctcgcccttgtcctcgacgagcacctgctggtagcgctcgcgcaggtcttccagcagctcgagctggcgacgcatcttgccctcctcgcggaagacgccgaagttctcgtgcatcgaggcgccgagctcgtcgcggatcgaacggggccgctcgccctcgcggcgctcgagcaacttcacaatctctcgctcgccgcccgagcgggcgctcggcccgagctcggcncnnccgctctttcccagcgcctcttccgccgcggcgcgtcccgcgcgccgcccgaacacgatcgtctccatcagcgagttgccgcccagccggttggcgccgtgcagcgagacgcaggccacctcgccggcggcgaagacgttcgcgatctccgtgcgcccgtcgacgttggtggccacgccgcccatgtggtagtgggcgccnggccgcaccggaatnggccgctcgagcggatcgatgccggcgtaggtgagggcgaggtcgcgcgtgccgtggaagcgctcgagcatcttctcgcgcccgaagtgacgcatgtcgagcagcagcgagccttcaaccgagcgaccctcgtcgatctcggtctgctcgccgcgcgagacgacgtcgcggctggccagctccatcgcctcgggcgcgtagtggcgcatgaagcgtgcgccnctcgagttcancaggtagccaccttcgccgcgcaccgcctcggtcaccaacagcccgctcggaaagagcgtggtcggatggaactgtacgaactccagatcctcgagcggcagccccgcgcgcagcgccatcgccatgccgtcggcggtgcaggcgtgggcgttggtggagccgtggtagacacgcccggatccgccggtggccaggatcacggccttggccgcaagcgccctcactcccccgcgcgccagatcccaggccagcacgccctcgcaaccctcgtcgccgagcacgaggcgccaggcgaagtactcctcgtatacntagatcccgcgcgccancagttgttcgtacatgacctgcagcagcacgtggccggtgacgtcggcggcgtggacggtgcgcggggtaccggcgccgccgaaggcgcgctgcgcgagcctcccctcggcgtcccggtcgaacagggcgccccagcgctcgagntggtagatgtcggcgggcgcctcggcgcagaacagttcgatcgcgtcctggtcgccgaggtagtcggagcccttgaccgtatcggcggcgtgctgctcgggactgtccgcgccggcgttcccgagcgccgcgttgatgccgccgcgagcggcgccggaatggctgcgggtcggatgcagcttggagaccagcgcgacgtcggcgcccgcgtcgtatgcctcgatcgcggcgcgcataccggcgcaaccggcgcctattacgagcacgtcgtgagagctctccacgtcctccagaccgtacacaatcgccccccgcagagacccatagggtcgcccgcctacgcttttccttcctccgctgttgatataaatgggacttccttcgggagcgaggcaggcagaaagcgggcaaccgccggccgcttcagttaccacgaagggataatcgggtacccgaacgcgaccgagaggtcgaattcaacacaagcccgcgaccgccgacccggcggccggctagaaagagtggggcacgtggccagcaaagcgtttcaactccctccagctctcgagctgatcgacaatccgtcacccgccgagctcaagcagctcacggcgaagatgccaaacgcacgccagacgcgctacggcaacctgaacgtccagacacgggtggttgcccgctcgaagggctcgaccttcctggtcatggacgagcccgacggtcagaaccaatcgatcacgcangagaaagcggcggagatggccaagcgccagnacgagtacatcgccgctaccgagatggtgttgatcgacggctggatcggcaaccactccgaattccgcacccgcgcccgcctctacatcgaggccgcgaacgccaacatcgccgccatgcagcagcagctctacttccacggcgacgaggagacggccgagcccgagctgaccgtcgtctacacgcccaacctgaccgcgcccggcttccccgacgaccgcctgatcatggtcgacgtcgaggccggcgtcacgcgcgtcttcaactccgactacttcggcgagtcgaaaaagggcggccttcggatgtggaaccggcgcgtcttcgacgcgggcggcctggcgctgcacgccggctgcaagatgatccccactggtaacgaagccaagatcggcctgatcgtcggcctctcgggcaccggcaagaccaccaccaccttcacccgccagaacaactcgctgccgatccaggacgacttcgtggcctggatgccgggcgggcgcgtntatgccaccgagcgcggctgcttcgccaagaccttcgccctctcgaaggaggacgagccgaccatctacggcgctgtcacccggcccgaggcctacctcgagaacgtgtcacaagacggggcaggcgagctcgacttcttcgacacctcctacaccaagaacggccgcggaaccttcaccttcgactcgatcgactcggccgccaatgagccgatcgagcacgccgacttcctgctcatcctgaaccgcaacgagggcgtgattccagccgtcgccaagctcgaaggagcgcaggccgccgcctacttcatgctcggtgagacgaagggaacgagcgcgggcggagccgacgaggcgggcaagttcctgcgcgtaccgggcaccaacccgttcttcccgctgccccacgacatgcagggcaaccgcttcctcgagctgctctcagaccatccgctcgaggtctacctgatgagcaccggccgcgtcggcggccccgaggacgacgagcgctcgaagaaggtgcgcatcccccactcctcggcgatcgtcaagggcatcgcggaaggcacgatcgagtgggagaccgaccccgacttcggctacctngtagccggctcggtgccgggcatngacgacatcgagctactgcagccgaagcgcctttacgaacgcaccggccgcagcgccgagtacgccgagatcgtgaccgggctcaaggccgaccgggccgagttcctgagcaagttcccgagcctgagcgaggagatcgtcgccgcggttcgctgataggcaacgtggttctgcttctttggttgggcccgcggtagcgggcccttcctgttggcagctaccttcaggacgacccatcgcgcctgagcgcggccaggcgacggagtgcttcgtctcgagacgcgctgcttcagctacagctggaaggcgagcggccaaggaagcgcaggatgccgcgacacatgccgacggccgccttctgctgaccggcgctgctcgccagcacgcgatcctccgtggggttggtgagaaagccgagctcgggcaggatcaccggcacgttngcccagttgaagcccgtgatgtcggagcgggcgtcgagtccgcggttggggaagcgaagcgacccaaccagcccggcctgcacgagcttcgccaatttcaggctcgacttgtaaatgtcactcgtccagcccgcccgataggccgggtagagggtgtgcgttccggtcgcgcccgaggtggaaccgtcacagtgcacgcgcacgagagcggcggcgtgcagccggttggcgatctgggcgcgcgcgacattccccatcgagacgtggctcgtcgtggtgcgtgtcatcacgacgcgcactcccgctcgccgaagcagcgcctccaggcgcttcgagacggcgaggttgatgatggcttccggcttacccgagacgaccccgcgcgttccgccgccgtccttgatc

SEQ ID NO: 796 - DNA, 4000 bp, Escherichia coli
  misc_feature (83)..(83): n is a, c, g, or t
  misc_feature (786)..(786): n is a, c, g, or t
  misc_feature (816)..(816): n is a, c, g, or t
  misc_feature (822)..(822): n is a, c, g, or t
  misc_feature (825)..(825): n is a, c, g, or t
  misc_feature (836)..(836): n is a, c, g, or t
  misc_feature (912)..(912): n is a, c, g, or t
  misc_feature (915)..(915): n is a, c, g, or t
  misc_feature (947)..(947): n is a, c, g, or t
  misc_feature (957)..(957): n is a, c, g, or t
  misc_feature (959)..(959): n is a, c, g, or t
  misc_feature (1003)..(1003): n is a, c, g, or t
  misc_feature (1006)..(1006): n is a, c, g, or t
  misc_feature (1031)..(1031): n is a, c, g, or t
  misc_feature (1054)..(1054): n is a, c, g, or t
  misc_feature (1056)..(1056): n is a, c, g, or t
  misc_feature (1060)..(1061): n is a, c, g, or t
  misc_feature (1067)..(1067): n is a, c, g, or t
  misc_feature (1070)..(1070): n is a, c, g, or t
  misc_feature (1076)..(1076): n is a, c, g, or t
  misc_feature (1085)..(1085): n is a, c, g, or t
  misc_feature (1097)..(1097): n is a, c, g, or t
  misc_feature (1100)..(1100): n is a, c, g, or t
  misc_feature (1106)..(1106): n is a, c, g, or t
  misc_feature (1169)..(1169): n is a, c, g, or t
  misc_feature (1172)..(1172): n is a, c, g, or t
  misc_feature (1187)..(1187): n is a, c, g, or t
  misc_feature (1190)..(1190): n is a, c, g, or t
  misc_feature (1241)..(1241): n is a, c, g, or t
  misc_feature (1256)..(1256): n is a, c, g, or t
  misc_feature (1265)..(1265): n is a, c, g, or t
  misc_feature (1625)..(1625): n is a, c, g, or t
  misc_feature (1812)..(1812): n is a, c, g, or t
  misc_feature (1994)..(1994): n is a, c, g, or t
  misc_feature (2788)..(2788): n is a, c, g, or t
  misc_feature (2860)..(2860): n is a, c, g, or t
attctgggctttgaaacctcgaatatttcttttaatcccaactattgttgacgttattgtatgtgatttaatttattcgaatngatctatctgctgcaaaacgattaattatctagcatttctcatctagcttaaatgagtaattgggaactaattatgccaggtggcgggcttactgcaattggattggccggtatagttctatcctatgcaggaatagcacatacatttgttgatggattgcatgcacttacaggcttgttatttttctttgggttaatcttcctgggtgctggaattctagatggcggagtatcaacatcgaacagaacaaaagctacagttttggttgttatagccataattctaggatttggcgctgcggcattcataggcaacgaaagtactacgctgccaacagtcgcaggactcttagtcatggttacaattccaggcattgttatagcatacatggctatgaagatgccacaatatgtaaaacctgttggcttaatcttcatatttgcaattggcttgggcattacagtatttgttggctttggtgtatatggtcccactggatatttgcttccagaagtgattgaagaagctgttgaagagattgttcaagaggttcctatgggtaaaatttttgctatctcaatcttggagggatctgcaaaccagggaaatccagactatgatccagatactagtactatctcacaaggtttggtaattgaatggacaaatcatgatcaagtgatgcatactgtaactagttcncttgactttggggaaacttttgattctggnttactnaangctggtgaaanatttcttgttgattcaggtaaattagatatcggttcttatgagtacatgtgcatagttcatccttggatggttgcnagnattgtaatagatgaaccagttgaataaataanttggaatgtntngttttaacacaaaaagaaaaagataaacttgttgcccatgcganagngcaacaacctagtgaatcatgtgcnatgctacttggaaaaaaagttgntnatanntggaangtnaaagangtttttctnacacaaaatatnganaactcncaaacaaactttacaatttctccagaggaactattaaaaggataccaacttgcggaaaaaatncanttagaattagttggngtntttcactctcatcctaattcagatgcaattccttcaagtacggataaaaanttcatgcaaaataancccgtaccntggataatattttcaggtataactaatgatcttagcgcatacttgttagattccgatgtaatagaaatcccaataaaaatagattaactaattttcctgaaagaaatttttgttccgtcattaaaattttcaagaatagatttttcaggatcagttatttttcctaccacattgacaggtgaatatggtttaatctctccttttttaccaattggggtgggaccaaaaaacaggcatattgcctttccacttggccaataagcaacatcattaagatcaactaaggcttttgcgttttcttcagcttgagagatgggggattcatcagtatagatctcttctccccagagatgtgcattnactgagaatggtaatgaatcaagaatatccttacaagttttaggtgaaaaagcatcatccagttctatggttatattttcaagtccttgaatattagcaagaatcttttttttcatggattattgtttagattaaatactccctaattttatgcattattatggcaatggatatacatgtctacganacttatgttaaagccaaagatggtcatactatgcactttgatgttctaacagaagtgaaggaacttgaaaaagcacttgaatatgcaaaacaatggctagcaacagttggtgaagatggcgcaaaggtaacaggagaagaatgcaatttttgtcacacacaagaagccccaccacaagttgnaaacgaaataaaagaaaagggattcttcattcaaaaaatggacggatgcccataaaataattttttaatttagatttttttaaactttattggtttcgtattattaccaatagttatgttagaaaaaaaatactatcgctcaacaattgagggcgaaaaaagcactcaatggatttgtggttgttttgaaaccaaggatggatttttcaaattttgcgacaaacacgaagacacattacgcaaagctgtagtggcacagattgatgagcttgatatgacaagaattgaaaattgatgtttacagtgctattatagctacaaatacggaaacaaaaactattgatactgtacttagtaattttataacagtatttagtgcaggtccagctgtgtctttgtatgggtcacctataatatcaccaactattgcaactttgtgttcttcagttcctctttctcccttcatttctatgagttttttagcattatcccatgcccctccagtatttaccatatgataagcaagaaatatgccagtaactactgcgcccattaacaaaccagccactgcaggaggacctagtaaaattccaagaactataggagccgcaacagcaatgcttgcagttttccaaagttctttgattgatgcgacagtggctatatctacacacttggcataatctggttttgacttgccagtaagtattccaggatctctcttgaattgacctcttatttcgtcaataagcgtgaaagcagcacgtgaaacaccagagattaattggcctgtnataatgaaaggaattagaccgccaaccaatagacctacaataactgcaggatttgttaatgaataatcaaangcggtgtgaaaaaattctgctgcttcgtattgaaaagcctgaatcatagctaaagcagcaagtcctgcactagcaattgcaaatcctttagttattgcctttgttgtgtttcctacggcatcaatttgatcagtaattttacggttttcttctcccatacctgtcatctcaacaattccacctgcattatcagcaatgggaccaaaagcatcaatacttaacacaattcctgcaagacttagcattgacattgcagtaagcgatgttccaaatattccgtacaaaagtgcttgagatggatccggtgcaaatgaagaggccaatgaaaatgatacaataattgcaactaccaatgcaatcatgaaaggacctgtagaacgcatgccatgtatgatacccattagagtcaatgaggcatagccccattttgctgactctgcaatttctttgacaggtttggatttggaatttgtgaaactatcagtaattttttgtattacaggtacaagaatcacaccaactacagtagtaccaaataacgcatatgtaagatcagagttgccaagaaatagataagcaaagacgaagtttagggtgattgcaactgccgctgaaacgtaaaaagacacgttaagaggtttcataacatcagtaacgtttctagaggttatagtggctgcacctattatggaagcaattattcctgatgcgccaactagaatcggataaagtacaatgtcaggaaatccgataagagctgcaatcaacaaagatgctaacatagtaactatgtatgactcgtaaacatctgagcccatgcctgcggcatcaccaacattatcgccaacattatccgcaattgtagctgggtttcgtggatcatcctctggaatatttgcctcaacttttccaactaaatctgcagccatatctgccgctttagtgaaaatgccgccaccaactctaatgaataacgcaattaaacttgctccaattccgacgccagctatcgtaattggatcaggatatacaagataaagtgatgccattgcgactaaagccattgctggaattgtaagacccacagtcgcgccacctctgaatgctaatacgaaagtttttcccagtccactattagta

SEQ ID NO: 797 - DNA, 4000 bp, Escherichia coli
  misc_feature (1927)..(1928): n is a, c, g, or t
  misc_feature (1939)..(1940): n is a, c, g, or t
  misc_feature (1961)..(1961): n is a, c, g, or t
  misc_feature (1982)..(1982): n is a, c, g, or t
  misc_feature (1987)..(1987): n is a, c, g, or t
  misc_feature (1990)..(1991): n is a, c, g, or t
  misc_feature (1993)..(1994): n is a, c, g, or t
  misc_feature (1996)..(1996): n is a, c, g, or t
gagcttattaactatgaaaaaaccagaaacaattactactaaaattgccatatttaagggcaaaaaagtaaggaaaaccattcacaataatgagtggtggtttgtgataaacgacgttatccaatctttgacagattcaagagacccatcccaatacttcaaaagacttaaaacaagagatgtggagttagctaagttgaccgatgaggggggggtacaatttgtaccaccccttatgctagaaatcgaaactccaggtggtaggcaaaaggcttattgttggaatacagagggaatatttagacttatccagtctatcccttctcccaaagcagaacctttcaagcgttggctagccaaagtcggttatgaacgagtacaagagatagaagacccagagttagccacaaaacgcactagagccatatataaggctaaaggatatcctgattcttggattgagaaacgcatgcgcggaatagaaatccgcgagactctgacagacgaatggaaaaagagaaatgttggtcaagaccgcgagtatgcaatcctaacagcagaaatctccaaggctacctttgggatgactccctcagaatacaaaaaattcaaaggacttgagcgtgagaacttgcgagatcatatgaatgatctggagttaatcttctccatgctgggggaggcctctactaccgaaattgctaaaaataaagatgctcgagggttttcccaaaacaaacaagccgccaaagaaggtggtaagattgctgggaacgccaaacaagagcttgaagagaaaagtggtaagaaagtgtcaactaaagctaattacttgcctccctcaaaaaagaaacaactaacatgaagactttactacacaaactcaagctctacttcttctccccaagatggcatttgtcccgctttcagcttaatgcgtttactgtcctgatttcttctattggtcttgtaactggtatctatttagcactattcgaggtcttccccaatgtatttgccctcaatgacactagcaaaaactggacgtttagtaccggggaggcggctaactacacttatgatagtaatctggtggcagtagatggttctggagctcatccagtctctggagttaacaagttcactaaccctgatttttctgccgacaactcctcttggtcgatcacccctattgccggctcgactacccctgctggatatatccccgtaccaggtaacagcacctttatgacgggtggagatgacaaagccttcttagcgatggcctatgaagccaagtatgactgtacagcagacggagacggtgatacggctgccacctgtagcgctcctgctgactcaggctctggactagactatcgtgacattgctagctttgatactgccaaggtggtctcttcagcaaacggtgcgccaattgtgcacatcactcaaacccaggcactctcagcttgtccatctggctatcatctcatctctaacactgagtggatgaccattgctagaaatgccgagtcccaagcctctaactgggcagacggcacagtaggctccactgtagctgcgggtggtggaatgttccgaggtaatgtgggtgaaaccacgagtgttggttacaacggcgctgatccagaatacggtacaggccgagacactaaagccaagctaacccttagtaacggcaccgagatttgggatatgtctggcaacgtctgggactggaatagtgatgtgcaaacagaagcaattaatactactgtcggctggttagactggaaccatgccaatatagcagcgggcgctattgacctatatgggccagctagtggctatctatcagctcacggcatgggtcaagtttatggtggggcattgaacaatgccttccgccgcggcggtaattggnntaatacgtccnncgccggggcattcgctttgantctgggtaatgcgccaggcgntcagnacnncnntnttggctttcgctgcgccagtgatcccgtagacctctcttcctctttctcctcttctcttggtcgcgaagcgaccggcggcgaccaaattttggtggggtctatttctgacgctaaagttacccaatcagtcaacgtcggtgacacctcaacttacgatctttcggcttatgtctatgacaacaccagtgggagtgagggaggaactgtctcatcctcgattgcccagctttattacaacggctcaactgtcaccactacctacactgatcagggatctggctggtggaaacttgcgggtcaagtcacgggagctgctgaatcccgcaattatggtgtgttagtaaagtcaggcaagactgttattttagacgactttaccttgtcccaaaacggcacctacagtgtctacacgactctggcttattccaattcttccgtttcctcatgggacagcttttgtgagggcactctcacggggagtacctgtagcgatgacggagtgacggctagcggcaacgccagtgtggtctaccagctctgcctagatgacggctccacttgtgagtcaggtgggagttggaattattgggatggtggagcatgggcaacagctagtaacactactacccatgtcaacacagccgccgagctgactcaatctgctatgcaagccttgtctgtaacttcccaaaaaatctcaattaaagccattatgggctttggtggggcggatacgccttcaataaccaacctgagtattgggctcactactgatactgcggcacctgacactaatgcctcggccatcgcgatgactagaactaatggtggtactagcatgagcagtaacgactggacaaataatattgccccgtattatagctggacggctggcgctgataatgcaggtggggtgggactcaaaggctactgtttatatttggggactgaccctgacggagatccggccactagtaaaggcttgcttggtacctcgccggtatctaccgccggctcgacttgtcagtttatcgtggctggtaccagcattgattttgccaccactagctatcgaggtagcacttggttaactactggcagtgatccgtattatcttaatattaaagcaattgataacgctgaaaacgtgttcactggagcaagtgaacaattccaatttagatttgataataccccacctaccaatgtttcctacgtctcttgtccgggtgggagctttgccaatgtggcggacatgaacttctcctggcctactagtggcgcaaccgcgacagttgatgataacgccgggactttgggctggcagtatcagatcaataccacgggtggcacttggcttggaactacaactgagtcagtgttgggaattaataactatattcccacttcagaaacatcccgcaccctgactgacgcgcaagacggaagcggtatcgccaccggcagtaacattgtctattttcgtagcgttgatgcagccggaaacgtcagcgctgatgctagtattcgcacctgtagtttggagtatggcggggctgcaccaacctttggcgggagtgatactattactgttgctcctagttcttcgacggccaactcttttgctctgagctggcctgaggccactgcaacattaggccagagtgtaactaattactactacatggtcaacgtcgctcctccctcgacactctcaaccataactggcaatgccgctacatatattgataacgggacggcaatcaccgtggatgctacggctctaccaggggtaaataaggggagtaatacggtctacgtggtagcggtcgatgatgcggataactatagccccagtaactatatctcgggtacttttaccctcaactcgactgaccctgataatgtcagtaatttggtggcctccgactcatcaatcaaatctgagtccaagtggtatgccactctgacctggactgcacctagctaccaaggggcaggca

SEQ ID NO: 798 - DNA, 4000 bp, Escherichia coli
  misc_feature (153)..(153): n is a, c, g, or t
  misc_feature (171)..(171): n is a, c, g, or t
  misc_feature (214)..(214): n is a, c, g, or t
  misc_feature (342)..(342): n is a, c, g, or t
  misc_feature (345)..(345): n is a, c, g, or t
  misc_feature (471)..(471): n is a, c, g, or t
  misc_feature (507)..(507): n is a, c, g, or t
  misc_feature (665)..(665): n is a, c, g, or t
  misc_feature (1043)..(1043): n is a, c, g, or t
  misc_feature (1082)..(1082): n is a, c, g, or t
  misc_feature (1163)..(1163): n is a, c, g, or t
  misc_feature (1178)..(1178): n is a, c, g, or t
  misc_feature (1226)..(1226): n is a, c, g, or t
  misc_feature (1317)..(1317): n is a, c, g, or t
  misc_feature (1355)..(1355): n is a, c, g, or t
  misc_feature (1655)..(1655): n is a, c, g, or t
  misc_feature (1676)..(1676): n is a, c, g, or t
  misc_feature (1679)..(1679): n is a, c, g, or t
  misc_feature (2069)..(2069): n is a, c, g, or t
  misc_feature (3569)..(3570): n is a, c, g, or t
  misc_feature (3573)..(3573): n is a, c, g, or t
  misc_feature (3675)..(3675): n is a, c, g, or t
  misc_feature (3705)..(3705): n is a, c, g, or t
  misc_feature (3717)..(3717): n is a, c, g, or t
  misc_feature (3754)..(3754): n is a, c, g, or t
  misc_feature (3986)..(3986): n is a, c, g, or t
aagctggccaagggcatccgcgccgaaccccggagcgaagctttcgccagctacgccggtttcgaggatgacgtgcatgcggggctgacccgcgcgtcctgtgtgcgggtcacgaacctctatcccaagggtaccgagatccggaacgtgcgncagctgtcgatcctgtcngcggaagaaatggccctgatcgcggccgacatggggatggagncactggaccccgtgcaccttggcacgtcgatggtgatcaagggcatccccgatttcacccatgtgccgcccaatgcgcggctgcaggctgcctcgggtgcgacgatcacgattgataccgaaaaccgnccntgcgtattgcccggtcgcgagatcgaacaagacagccccggccacggtcccaagttcaaatccgcggccgagaaccgtcgcggcgtgaccgcctggatcgaacgcgaggggctattgcgcgtcggngatacgctgcgcctgttcatccccgaccagccagcntggcagcacggctagacccaatggggcgcggggtcacagcgacccgccatgctcaaatcagcgacacacccgccggatcgccgcatcaagcgccggatatgtcggaattgccccctctgcccatgccctcacaggcgtattgaggacataagaaacanagaacgccgacggcgcatcagggaggacatatgacctttaaatccgacatccaaatcgcacgcgaagccagcaaacgccccattcaggagatcgggcaaaagctgggcatcagcagcgatgatctgctgccctacggccatgacaaggcgaaggtgtcgcaaaagttcatcaactcggtgcaggaccgtcccgatggcaagctgatcctcgtcaccgcgatcaaccccacccccgcgggcgaggggaaaaccacgaccaccgttggtctgggcgacgggttgaaccgcatcggcaagaacgcggccgtctgtatccgcgaggcgtctcttggtccgaatttcggcatgaagggcggggccgcggggggcggctatgcncagatcgtcccgatggaagagatgaacctgcatttcacnggtgacttccacgccatcacctcggcgcacaacctgctcagcgcgatgatcgacaaccacatctattggggcaacgcgctngagatcgacctgcgncgcgtcgtctggcgccgcgtcgtcgacatgaacgaccgcgccctgcgncagatcacggcgtccttgggcggtgtgtcgaacggtttcccccgcgaggccgggttcgacatcaccgtcgcgtccgaagtcatggcgatcntgtgcttggccaaagacctgaacgacctgcaaaagcgncttggcgacatgatcgtcgcctatacccgcgagcgtaaaccgatctatgcgcgcgatatcaaagcggatggtgcgatgaccgtgctgttgaaagacgcgatgcagccgaaccttgtgcagacgctggaaaacaaccccgctttcgtccacggcgggcctttcgccaatatcgcgcatggctgcaactctgtcatcgcgaccaccaccgcgctgaagctggcggattatgtggtgaccgaagcgggctttggtgccgatctgggggcagagaagttcctgaacatcaaatgccgcaaggcngggttggcaccgtcctgcgtngtngttgtggccaccgtgcgcgcgatgaagatgaacggcggcgtggccaaggccgatctgggcgctgaaaacgtcgacgccgtgcaggccggttgccccaaccttggccgccacatcgagaacctgaaatcctttggcgtgcccgtcgtcgtcgcgatcaaccatttcgtcaccgacaccgacgcagaggtgcaagcggtcaaagactatgtcgcctcgcaaggggccgaggccgtgctgtcccgccactgggaattgggcagcgctggctctgccgaacttgccgagaaagtggtcgagacgattgataagggccaggcggatttcgccacgctctaccccgacgcgatgccgctggccgataagatcaacaccatcgccacaaagatctancgcgcggatggggcggtgatggatcagaagatcctcaaccagttgaaagactgggaagagcagggatatggcgatctgccggtctgtatggccaaaacgcaatacagctttaccaccgatcccgaagcccgcggcgcgccaaccggctttaccatccccgtgcgcgaggtgcgcctgtctgccggcgcgggctttgtcgtggccatctgcggtgagattatgaccatgccgggcctgccgcgggtgccttctgccgaaaatattcgtctcaatgacatcggcgatgttgaaggtctgttctaagcgcgtatgaacagggcgcggagggtcgccccttcgcgccttcgcctgctgtggcaggtgatagcagcgccacaacagacaaaggacggtccccatgacagcgacgatcattgacggcaaggcatttgcagcacaggtgcgggggcaggtcgcccagcatgtcacgcggctgaaggacgatcacgggatcacgccggggctggctgtggtgcttgtcggggccgatcctgcctccgaggtctatgtcaaatccaagggcaagatgaccaaggaagtgggcatgaaatcggtcgaacaccggctggcagacaccacatcagaggcggagcttctgaccctgatcgacacgctgaacaacgatgatacgatccacggtatcctcgtacagctccccttgcccgatcacctgaacgaagaccttgtgatcagcgcgattgatccggccaaggatgtcgacgggtttcatatctcgaacgtcggtctgttgggcacggggcagaaatccatggtgccctgcacgccgcttggctgtctgatgatgctgcgcgaccaccacggcaccctgtcggggatggatgccgtcgtgatcgggcgcagcaatatcgtgggcaaacctatggcccagcttctgctcaacgacagctgcaccgtgaccatcgcccattcgcggaccaaagaccttgccgctgttgtgcgccgcgctgatatcgtgatcgccgccgtgggccgccccgagatggtgccgggcgactggatcaaaccgggggccacaatcatcgacgtgggcatcaaccgtctcgacgcgccagagcggggtgagggcaagacccgtctggtgggtgatgtcgactttgacagctgcgccaaggtggccggtgcgatcaccccggtgccggggggcgtgggcccgatgacgatcgcctgcctgctggccaatacggtcacggcctgttgccgtgcccatgacctgcccgaacccgaagggctgaccgcctaagcggcggtcgccggaaccggcaccatcgtgccctgaagcaaggcgatcagcacctgctggtcgccggtttgggcaaagacctcggccgtgaccacacaaagccgcttgcccggtttcaccaccttgccaatcgcgatcagccggtctccgcgggcgggggccagcaggttgatcttgatctctgcggtgacgacctcggnntcnaagggcagtgtcgtcagcgcggcatagcccgcagcgctgtccccgatagagaacgtcagccccgcgtggccaaacccctgctgctggcgcgtgccgggcagnatcggtgcctcgatccggatgagccccttngatacatcactnagttcagcgccgagggtctgcatcatcgattgtgcgncaaagctgtcgcggatgcgggcgatttcttgcggggtcataggggctctttcaacatggatagccggccccgtggctgcgcttagcgcggcatggggatcgcggtgggctgcggtccggtaagtatggcgcaggcctgcggacccatcaatgcctgtagcaccggcgcgtcactgtacaagccaccggtataggtgccaaaggcaggcatgatcagccgtcggtcgtcatanaggaaggccggacg

SEQ ID NO: 799 - DNA, 4000 bp, Escherichia coli
  misc_feature (1993)..(1993): n is a, c, g, or t
  misc_feature (2454)..(2454): n is a, c, g, or t
  misc_feature (3019)..(3019): n is a, c, g, or t
  misc_feature (3896)..(3896): n is a, c, g, or t
tttgattgcagcatcttaaaatcagacaccatcgggacgcatcatgtgattttcggcgtggtgcgcgccgtgaccctatccgatcagaccgacccgctgatttaccacaaacgccgctttcgcgcccttgcgcccgaaaccaaataaagggatgcgccatgtatgatcgtgatctgattgaaaatggcggcggttctatggcgcgccttctagagatcatgcgcgccttgcgcgacccagaggcgggctgcccttgggatatcgagcaagatttcgacagtattgccccttacacgattgaggaggcctatgaggtggccgatgcaatcgcgcgccgttcatggggcgaattgcgcggcgaattgggggatctggttctgcaatcggtctatcatgcgcaaatggcggaagaagcgggatatttcacctttgacgatgttctgcgcgacatttccgacaagatggtcgcgcgccacccacatgtgtttggcgcagaaaatcgcgacaaatctgcagaccaacaggtcgaagattgggaaaagatcaaggcccgcgagcgcgccgcccgtgcgaaaacgggggttttggccgatgtcgcactcggcttgcccgccttgatgcgggcggaaaaactacaaaagcgggcagcacgcgtggggtttgattggccgcaaattgatcaggtgatcgataaaatcgccgaagaatccgccgaattggccgaggcgcgcgcgacactcccccaagagaaaattgccgaagaaatgggggatttgctgtttgtgatggccaatctggcgcgccatctcaaggtcgaccctgaaacggccttgcgcaaagcgaatgaaaaattcacccgccgtttcaattatatagaaaacgaacttcgggctgttggtcgcagcgcagatcagtccaacctcgaagagatggaagccctgtggcaagaggccaagaccaaggggctgtaacgccgccatcttgccaagcctgtgattttggctaccttcctgccttggcgcgattttggggcgcctaacctaggaaagcgtgcactgatgagccaagcaaaccaacagcgccccgcattggcggcgctctggatgacgggggcaattgtcgcctttaccctaatggccatcgcagggcgcgctgtctcctttgaattggacacattcgagatcatgacctatcgctcggctgtgggggttgtggtggttgcgatccttgccacggtctttggcaaatggggcgaggtcaaacgcgacaagctgccgatgcatatggggcgcaatatctttcattttgcggggcaaaacctttggttttacgcgatcactgtgatcccacttgcgcaggtcttcgcgcttgaattcacctcgccgctttgggtcatgcttttggccgccctgtttttgggcgagcgtttgacgcggctcaagctatttgtcgcggttgtggggttcattggtatcttgcttgtcgtgcgcccttgggtggcgcccccctctgcgggaatgatcattgccgcagcggcggcgctttgttttgccagcaccgcgattttcaccaagcgcctgacgcagagccaaaccatcacctgcatcatgttttatctcacgatcatgcaactggtctttggactggtgtgcagccttgccgatggggatatggccttgccgacagggggcaatgtggcttggattgttttgatcggctttgcggggctcgtggcgcatttttgcctgacatccgccctcagtgtcgcgcccgcctcggtggtgatgccactggattttgtgcgcctgcctgtgattgccctgattggggtcatgctctatgccgaaccccttgacgccatggtgcttttgggggcagcccttattttcggggcgaattacctcaatattacaggcgccgcgcggctagaacgccgcaattcagccatcagctaaatgtaactttttaggcattttttatatatacaagaagngtgtgcttgcgcttaatgatcaccaagggggatcattgtaggagggacacccatcatgacccgtaagcgttggttgcttgcacccgtttattcacttttgtgcagcctgtgcattggccaagtcgcccatgcagggggcctagatcaaaccacattctcacctctcatcctgttcgaggatggcggttatgccgaaatcagcgcacagcgccgcgatattactgtgtcaggcgcacttgtcgccacgccaaacgtgggcgcacaaaatgtcctgcaaaaccgcaccacgctgaatttgggatataagcaagatttgggtgatcgcatgagcgtggccctgcaaatcaccaccccctatgctgccaacaccgcctataatgcggcgggctatccgctgaacggcaccactggcacattggaaagccgtgcgatcacggcgcttttatcctatgacatcggcnaaaacgcctttgcttatggtggtctgcgcctgttgcagtcggatggtgatatttacgtttcgctgaatgcaggcttgccgaatgtcttttcctaccgctttgatggcgacagcgatacgggccttggctatgttctggggcttgcctatagccgccctgaattcggcacccgtctggcccttagctataccagcccgattgatttgacgttttcaggccaagaggggcgggtattgggcgcggcaggcgcgacctctgccctcagcgacacgcggtttggcgttgagatgcccgcaaccctcagccttgattttcaacagggcattgcgaccaacaccgccctttttggccgcattcaacaaagccgttgggggggatttgagatcaggccaaacctctatcccgcaggggcattggtcacctatggcgatgatgtcatgcgctatgatttgggcgtgaagcatcgcctgagcgcggaatggggtatatcggccctttattcgcaagaaccacaaacgggcggcctatcaagcaaccttgcccctgttgatggcctacgcgcctncacgcttggggccgaatatacgcgcggcaatgcggccatcgggtttgccctctctgaggtgcgatttgacgacacaacaacggggcttggaaccacgccctttgcgcggttcaacggaaacagggcaaggcttgtcacgatccgtctcagccatcgcttttaaggcggcgcgcaaaatcgccattggaatttggcaggttttcgggatagacctgccaaaacaaggctttggcaaaggcggcaggccctatggaaatgctttataaatccgcaagcgattggcgtgcagcggcgcaaaaacaggttctttttttcgggatgtcaggccttggcaagacacggcttgccaatttgctacgcgatgcaggggattggttccactattccatcgattaccgcattggcaccgcctatatgggcgagcatattgtcgacaatctcaaacgtcaggcaatgcaagtgccgtttctggcagatttgctgaagtcggattcgatttatatcggttcgaacatcacgtttaacaatctcgcgccgctctctaccttcctcggaaaacctggtgatcctgccaagggtggggtcgggtttgacgaatatatgcgccgtcaggcgctgcatcggcgcgctgagatcaacgcccttttggacacgcccagctttatcatccgcgcgcgcgacctttatggatatgccaatttcgtctgcgacacgggcggctctatttgtgaggtggttgaccccaatgacccgcaagacgaggtgctgcgcacgcttgcgcaaaattgcctgatgatttggattgaaggcagcgaagatcatactgaggaattgatccgccgtttcacccgtgcgccaaagcccatgtattaccaancgcaatttctgaacgcgcgatgggctgactatctggcagaaacggggctgtcgcccgatgcggtcaatccagatgactttatccgtaacacctacgcggcggcc

SEQ ID NO: 800 - DNA, 4000 bp, Escherichia coli
  misc_feature (131)..(131): n is a, c, g, or t
  misc_feature (925)..(925): n is a, c, g, or t
  misc_feature (966)..(966): n is a, c, g, or t
  misc_feature (1678)..(1678): n is a, c, g, or t
  misc_feature (2896)..(2896): n is a, c, g, or t
  misc_feature (2904)..(2904): n is a, c, g, or t
  misc_feature (3921)..(3921): n is a, c, g, or t
gcagcttcgtgaaatgtcaggtcttgtggatgtatataaccacagcataaagcaccttcacctagttgatcaagatgctttaactttgcaaaacgaaatcaccttggctcaagaaagaataacaaaagaantgggtatagaagataaattttttgcctacccctatggagagtttgatgatgatacctattcacttctgagttctcttggatacattgggtttggtcagcaatcaggtgttgtaagtaatgagagtgattttttgaacttgccaagattctcaatgtcaggtccatatgcaacaatggatagctttactttaaagataaatactttgcatatgccagttgattcagaagagccgaaagctatggttatttctggtgactttatgcccttattaactttatccttttcacgttctttaacgagttatgagaaagctaatttttcatgttatgtttctggtcaagatcagccagagcttaaatggttgtcaccacaaatgctaactgttaagtcaaaaaagcctctgacagtaggaagaagtagatataactgtacaatgccttcagaagagagagggcggtactactggtattctaagctttggttaagactctaggtctatactagttcggctttgagagagttaccaacgccgtctgtaatttttacagaaacaagtttaccaatcaaatcactattaccaatgaagtgggctgtacgcatattttctgttctacctgaaagagtggggcctttttttgaaggaccctctacaagaactttttgaatacttccaatcatagacttggagatttcttcagtatttctattaagtttatcttgaataagagaaagtcgatgcttttttaccgatgatttgacatcatcaggcaggcttgatgctattgttcctggncgctttgaatatataaaactgaaggatttgtcaaaccctanctcatcaataagtttcattgtgttgttaaaatcttcttctgtttctccaggaaaaccaataatgaaatctgaagaaagagaaatatcaggtctaattttctttaaattacgaatcttcgatttgtattctacagcggtatgacctcgcttcattagacctaggattttgtctgatccactctggacaggtagatgaagatgagagactagttcaggcacctcagcataggcctgaatcaatcgttcactgaactctaccggatgagatgttgtgtatcgaatcctttcaatgccaggtacttgagcaacaattgcaatcaatagtgctaaatcagcaacctcaccatcatccataaggcccctgaaagcattaacattttgacctagtaggttaatttctttcacgccttgtgtagctaaggattcaacttcacgaatcacatcattaaaaggtcgagatatttcttcacctctggtatatgggacaacgcaaaaagtgcaatatttactacaaccttccattattgacacgaatgctgatgatccttcactgtgcggctcaggcaaataatcaaatttttcaatttctgggaaagaaatgtcaatacttatgtcactactatcaagtacttcattgagcatatttgggagcctatgaagtgtttgggggccaaaaatcatatcgacatatggtgctcttttaagtattagntcgccttcttgagaggcaacacagcctcctacaccaatcactaagtttggattattggtttttaattttttccagcgccctagttgatgaaataatttttcctcggccttttcgcgaattgaacaggtattaattaacagaacatctgcctgcttaatgtcatcagttacttcgagtccatgagaatgtttgagtacgtcactcattttgtttgaatcgtactcgttcatttgacacccgaaggtgcgtatatgcaatttagagatactcattactcgggtttttgaatatgcagagtttgagttggatatgcaatttcagcaccatgatcagcaataatgtcagctacatcaagtaatagtttgcctttgattttcttaaattctgctccctcggtgactgtacagaaggcccaaatcacaaagtcaagtgaggaggcattgaacaagtcaaaatacgcacgacaaggttcatcgtgattaatgtgttcatgatcagccaacaatttctcaaccttttcaataatactttgcatttgcgcaatatcatcataacggataccgataactgcactaatttcacggttagtcattctagaaggtgtctcaatgggaatggttgcaaaaataccgttggggacataaatagggtttttattaaaagtacgaagacgagtcattctccagccgattttttcgactacaccttctatacttttatctgtagttcgaatccagtctccagttgagaatggcttatccatttggatcattaagccaccaaaaacattggcaagcatatccttggcagcaaaaccgacaacaataccacccacaccacctaaagttaagatagaggaaacagcgtagccatagaattgagcaacaccaagaataattgcaaaaacaaaaagaatcttgattaggcgtgtaaataatctaactgaatctttatctacattaccttctttctctaacatataactttcggtactagatattagccttaggattccccaagtcaaaataaagatcggtgtaatacttatgtagccaacaatttgacccagagactgaatttcagatgttagctctagcaatgaaaagtatagccatccataccaaataaacaatttaagtggcgctgaaattgcattaattagataatcatctatctgtgttttagtgctgccagagtgttttgttatttgttttagancagaaccnagagctatatgtacaataatagcaagaaccaatagtacagctaccatctggattggacttatattttggataaaatcattcattaaagatattttaaaggattaataggctcttcgtattttttcatttcgaaataaaaaggtttatttccggttatagcgataacttgacctttttttattacatcgccttcactaactagcaagtcctgattttgattatagatgctataaaagccaaaagcatgcttgataataatcatttttccatagctcgtcattttgtctccactatagacgacctctccttttctaaccgctcggacattttgaccagcagtgttattgtaggtcaaacctaaatggttatttttttctgagtagttcttaagaattgaagaatcgacaggaagagaccaattcttatttacttttgcctctttggtattagaggatgcttgttgttcaacttcaattttattaaatgatttttcaacaacggtgacttgacctgggttatttgtgaaacagcccgaaagaaaaacaaataaaaaaattgttaaatatttagtagacataccatatacctagggcaacaacaataattagtaagtatcctaatctatcaatgtacttatttaaccatgcatcgcagcgttttccaaactttcttaccagaaaagcaatcaacaaatagcgagcactgcgtgcgaccaaagagaaaaccacaaagggtaagagaggcattgacatcattcctgcactaatagtgaagagcttatatggtattggactaaaacctgcaattagaatgatccaaattccgtaggtgttaaagtacttctcagctttatttaattctggtagataattcattgtatctaataatggcatgataaggttgattgcatagatgccgatgtagtagccagcaattgcgcctagtactgaacttaaagtgcaaataattgcaaagtagtaagccctatttctattcttgagtgacatagaggccagnaagatatcttgtatagggtagggtagaatcgaagattctaagaaactaattgtggacaaccaaataacagcaaatcgac

SEQ ID NO: 801 - DNA, 4000 bp, Escherichia coli
  misc_feature (1)..(182): n is a, c, g, or t
  misc_feature (1985)..(1985): n is a, c, g, or t
  misc_feature (1991)..(1991): n is a, c, g, or t
  misc_feature (2332)..(2332): n is a, c, g, or t
  misc_feature (2573)..(2573): n is a, c, g, or t
  misc_feature (2599)..(2599): n is a, c, g, or t
  misc_feature (2695)..(2695): n is a, c, g, or t
  misc_feature (2699)..(2699): n is a, c, g, or t
nnnnnnnnnnnnnnnnnnnnnnnnnnnnnnnnnnnnnnnnnnnnnnnnnnnnnnnnnnnnnnnnnnnnnnnnnnnnnnnnnnnnnnnnnnnnnnnnnnnnnnnnnnnnnnnnnnnnnnnnnnnnnnnnnnnnnnnnnnnnnnnnnnnnnnnnnnnnnnnnnnnnnnnnnnnnnnnnnnnnnnttttattacagctgaaacacgaagcgatctgatcgcacttgcagtcggaatgcttaaccaagctccaagcaactcactactcgatgagctcatcgctctctcaactgcaggcggttcacttgctgacgcagctgaacacattgctaagacagatgctttcaaagctgaatatcctagcttccagactgctgagcagtacgcaactgaaattttcgacaacatcacaactggcggtacagtaacagccgcgatccgcactgcggtcatcgaacttgctactggctacctcacaagtggggaaatgtcaaaatcaggtctggcggcagctatcattgacttcttgtcacagcctgcggctctccttaacagtgacttcgctgacatcgcgcaatctgtacaaaaccgttcagccgccgctgaatactttgtagtaactaaggaacttggtgggtcatctgacgcagagctcgccgctgcgatcgcttcggtaactagcgacgcagacacgcttacagctgcaaatgctgccgcagacgcagctgcagatggtggcgacgttgcccttggccagacttttacactcactacaggtgcggacagtcttcccggcacgagtgcagcggataattttagtgcgccactgtcacaagttatagatggaacaattgcaaatacccttgcatcgggagatgttattaacggtggagcaggtgaagacaccttaagggctgacgttattagggaggcaactaataaccgtggcggcggaaatatcgacatacaaccaacaactgtttcgattgaaaccgtaactttcgagaatcgcgatgattatggctcagttactgttgatgctaagcgcatgtctggagtcgacaccatcggttcactatattcagatggcgatctggtgattgaaaacctaacgacactggcaaatggacagattcgcctaacttcagatatgaccattaccatggcgtacaccgataacttcaacaccgatgcagatgcttctgacttatcggtttactttgacgaagattatctcaacacgtcagtcagcaacactggctcacggcttgagattaagctggttaacgccgtaacaaacgtagttggcggtaacccgctgttcggtacagactcgttcactttctcattcgacggcaccgaaatcgaagttgatatctcagagatcgcggcagatgaaactctcgatttctcaacagcttatcaagctgtcgcagacctgattactgagcagttggccgaagagtacccaacactcactgtaacactgggtgcacagcgcaacgctgccttctcaatcgacttggtaacggaagacgcgacctacgaaccaggcgacgaggccggtgtctacttcccaattttgatcacaaatagtggtcctgaagaattaaccgaagggtcattccaacaggcgcaggtagaagccgataccaacatcgcagctaaccaggatgatagtcctgccgccgaagttgagacagctatcagcataaacgtcgacctcgaaaaagttggccgcgatggcgaaggtggtaacctaatcattggcggtaaaaactccgatgcaactggtgatactgatgtcgaccaaaatgatggtatcgaagtattcaatatcaatgtgattggtgatgaagataagccatctaaccttggtcagataatgtctaccaacggcgcactgagaactgtcaacatctcgactgacagcggtgaaaatgccgaggacggctacgccgcattgactgttcgcggtgaaactgctgncggagncgctgccaatccttttggtggagcactcagcgctgttaacgcaaacggattccttggtgatctgactgttggtacgcttgcgtctaacaaccaagtgagcggcttagcgacattaataaacacaccaacctttactgcactaggtggtggtgatgtcactctcgcagctgcggttggtgttacggctgctcttgccaacagcccactgcgatctactgcaacaaacgccttcactatcgcaacaggtgctggtgacgacacaataggcgcgaacgccaaaggtggtgctcagctaacagtggttactggagcgggtgatgacgaaatctttgttgacctgnaaggaactgacaactcaggttcaactgatacgacagtcacgattagcgctgctggcggtgacaatactattgaagttgattcattaggtggtggtactcgcgcactgagagctacagtggtaactggtgctggtagtgatgaagtgactggtaacgatgctggtcttacagccttaactggcgccggtgacgacgttatttttgcagagaacacaggcacaggagctgtcgctacaattgncgatggcacatacgacacgttgattnctgctggtccacttactggcatgcggctatcaaatttcctcaatggtcgtgaagtctcgatcacagttgcaatgcctgaggaaactactggtggtncagntgaagcggttgacttcgtaaacggatacgaacttgaaacattcgtattccaatcagctgcacagctgtctactgaagttgagctttatcgagcagttgcgaacgcgataaatagtgatgcaaccatcaataagttggttactgcagccgttagctctacaggaaacctctcaatcacttacgcggtcgacgggtcaacaattaacggcgaagagctagtagaaataaatatttctgacgaatatgccgttgctggcgatatcccggatgcgctgctctcagcagttcaagcccgtatgagcaattcggcaatcactgcagctgacgtattaacgcaatatgacgcagcaacaactgcacacgcagataattatgcagtaacgagcggtggtacgagtgcgtcggtatcgttcgatgtgacaaccctcacggacggtgacgatcttacaattgtcctcgatggtcttcagtcagtgactttaactgacgttggaggggcagcggctgaagtcgaatttgctggtgacacctttgaagctcttggaactacctttaccgtatccagcactggagcaaacaacctcacaattacaagttcgggtgctggtctcgatttgactgcagttaccataattgatgaaacgctcggggcagctgtagctggtactgttacagatggaatcctgggaacaaatggtagcgattctgcttcctttggcgtcaatatagttaaccctggaactggtgacgacatcgttgtcctttcatctcaggatctgtctcgggatcaggtaagtttcagtgcaggtgatattggtaacgacgtgatagttcactttgaaactggtgtcggtggtgatgttttagacttctctgattggttggacagcgaaacctctgctagcggttcaagcgcttcagctcgagaaattactatcactgtagctgctggcctgacaaatatagttgccaacagcgttgtcattgaagactttgaccaggtacaaacagcctttggtgctggtgcaatcacgtttgcagaccttactgacgctcaactacttcaggctttgaacggaacagccgctggtggtaatgcaggtatcttcgaaaacgattccacatcgaatcttgtcggtggttctggtaaggcgcttatgctgattcagaacgatgacgacggagatggcgcggtagatgctggagataactttggcgagtatctagtcgtcgaggttgaattcaccgatgacggagctggtggtgcaaacaataacgacaacttcacagctgcgcgcattg

SEQ ID NO: 802 - DNA, 4000 bp, Escherichia coli
  misc_feature (27)..(27): n is a, c, g, or t
  misc_feature (1355)..(1355): n is a, c, g, or t
  misc_feature (1663)..(1663): n is a, c, g, or t
  misc_feature (1971)..(1971): n is a, c, g, or t
  misc_feature (1986)..(1986): n is a, c, g, or t
  misc_feature (1989)..(1989): n is a, c, g, or t
  misc_feature (1992)..(1992): n is a, c, g, or t
  misc_feature (3480)..(3480): n is a, c, g, or t
ttgagtacagcgtcatagatttcatcngagcccatcaaggcacctgtatgggacatcgctgccttggcaccctcagggcttctacctgccttcaagactagaactggttttttaatttcgttgtacttagtaatttgcttacagactttaagaaactcttgaccgttacccatgtcttctagatacatcacaattaccttggtctgttcgtggtctgctagcatttttaatacgtcaatctctgtcatgtctgccttgtttcccatgctaacaactgcagaaaatccaattccctgtgcacttgcgtcttctacaagtgctgcacaaattgcaccgctttgtgacacaagagcaatttgaccagacttgggagttatttttagaaaggtagagttcatcatagtttttggatccagattcattacgccaagacagtttggaccaatgacttttacaccgtacttggtggcaatatctttcagtttttgttctagttttttcccttcttcatctacttctttgaatcccgcagtgattacaatagcacccttgattcccttttttccacattcctctagaactattggaactatagtgttctttgtgatcacaaccgcaagatcaattggatcaggaacatccagaacactcttgtacgctttttgatcaaaaaccgtttctcttgttgggctaatcggatagactgttcctttgtagccattcataatattagatgtaattgcacgacctacgctaccttgtttatcagatgcacctattaccgcgatagattttggagaaagaaatactgattcagacattgtgatgaacttgctcaactaattttctgtaataaagctattcatgattatctaactgcctagcattttaccagcaagattttcacttcttggaacccacgtaagtttaagattggaaaattttgccattagtgaccaggcctctctcgctagagaacggagttcttcgttattaattgcaaattcatgatttagttggtttactgtattctttgaatcactgtaaattataatttcgtcatttgaattttcaaatttttttaatgcggaaattattgccatgtattctgcttgattattagtaatttctggtttattttcataattcgattcaccagtctccttaacaaaaaatccatagcctgaatttgttccaccggaaccgtcaacgtaaatgcttaatgtcatatttgaataacctcaaaaattttcctaatagtaatggtgtggtccacgttgctctttacctaatctatctaatctttcattatggtgttcgtgttttagacttcctcctttgtgggtatgtgttgnaccattagcatgagtatgcgtaaacatttcaggtgttttcataaaaatatcatcaattcctaataaaatcgagattacatcatttgtggtcttgataacttgttcttttagtatttttggttcgaagatttttttagagaatgtttcagtaatttttctttgattagtatcaattccataccactcacatctgccattattagaactagagatcttggagcgaagagctgataaagtggaaagatagtccatgcctgcatttgttgccaatgttaaaggtatttgttctaatgaatctgcaaattttnccattgctaattgctcctttccatccacagaagtcataacttttctaatcttatttgcaacaattgcttcaaatgcacctccgccacctacaatttttgggttttggataaaatcacgcaaaacataaattccatctaatatagttctatgaaactcgtcaagatattttttggaatgtgcgcggattaaaatcgtcacagattttggttttttacatccttcaacaaagaccattttgtcatcccctatttctttttcatatacatggtttgcagttccaatttcatttggagatattttctcaatngtttggcatattttngcnccngttgctttttcaagccaaaatagatcattttcctttacacgtctcaaggaaataattccatttcttgcaaagtaggtttgtgccatatcggatattccctttcgggaaaaaaccacatttgcaccagactcggctattttttttacttttctcagtacctcagttttttctgcttctagaaatgatgacatttgttctggtgatgtaataataatttctgattctgttttagttctaaccgcatctaattcctcattgatcaaaatgatttttgcattggaaatttgcctaggcataagactgttatcgatcgttttgtcaattatgacccctttaactaatttagtatcagacgcacttccaagtttttcttcaattttaatatcatccacttcaatgtagtttgtttttaaatcacatatactacaaacagcatctactataattttcgagagattttctgaatcatcaactagagacgacattgattttgaacttagagccgttcttaccaagtcgaaaaatattcccttttctaaattcctagtctcagatatttcgtttaaagtttctagggataattctgttgctcgttgataaccagtgattattacagctgggctaatgcccagtttaattaattcaatcgcgtttttggcaagactgcctactaaaatgacagaagattttgtaccatctccaacgctgttatccactgtgtttgctccgtcaatgacaacttttgctgacgggtgttcaacgtctatctttcgtaagaatgttccaccatcttttgtaattatagattctcccatgatatctatgtacattttttctaatccacaaggtccaaatgatgtttttatcgcgtcagaaagcatgctggctgctaatagattaccgatcaatgtctcacccctaccagcattcgtgatatcatctgcaagaataccttttggaatgctcaatcattgctttacttgtgagtaattaataaaatggatcaaaaaattttttgttgattttaaaaagaataatgatttatgcaaatacaagaatgcacgtaattactacaaatgaaccaataatttgcagtaatctagatttcttgttttcaaaagatagtctaccacatgaaaaacaataatgatcttttttcaacacaaaccatactaacacttgttttaaaaaattatctttttctataatcgcgagtaattctaaagagcaaccaaatacatgccattgcaatagttccaatccctaatcctacataaaatggatcaggtggctgtagctgtgttagaacaaaacccataagcatgaacattatagcaaccacatcacctttgttcatgtgatggatttggaatcaagccattaaaaagtagttattaatcaaaaaacttcaattaacagaaaaattgactatctgtaatgaaatttaagaactcgccaaaagaatcagacgaattaatctatgaagcngtttcattattcaagaaaaataaattcaaaatggcactatcaatttttgacaaacttttaaaaattaatccaaaaagcttgattgcattatcgcataaggctgctactctttatgagttatcaagatttgatgaggcgatgaaatactgtgatcaagttctggaagaagatccgctatatcttcacgcattgttttacaagggtttagtacttggaaaaatgggtgaacatcagaaggcaatcagcttctttgataaagttttacaaacagatcgtaaacatgtgttggcattatacaatgagggtgtacagtttggcaagattggcaaatatgaagatgcagtaaaattttttgaaaaaacattagaggctgagccagaaaattcaagtgcaatgtatgaaacaggtcgagccctagcaaaattgggtaaaaccaaggagagtttgttgtggtttgaccgggcaattaaagtcgatgcaaaagaatcaatgtcatattataacgagggggtagatctta

SEQ ID NO: 803 - DNA, 4000 bp, Escherichia coli
  misc_feature (39)..(39): n is a, c, g, or t
  misc_feature (151)..(152): n is a, c, g, or t
  misc_feature (169)..(169): n is a, c, g, or t
  misc_feature (269)..(270): n is a, c, g, or t
  misc_feature (327)..(327): n is a, c, g, or t
  misc_feature (395)..(395): n is a, c, g, or t
  misc_feature (792)..(792): n is a, c, g, or t
  misc_feature (807)..(807): n is a, c, g, or t
  misc_feature (1079)..(1079): n is a, c, g, or t
  misc_feature (1512)..(1512): n is a, c, g, or t
  misc_feature (2005)..(2005): n is a, c, g, or t
  misc_feature (2014)..(2014): n is a, c, g, or t
  misc_feature (2555)..(2555): n is a, c, g, or t
  misc_feature (2717)..(2717): n is a, c, g, or t
  misc_feature (2876)..(2876): n is a, c, g, or t
  misc_feature (2945)..(2945): n is a, c, g, or t
  misc_feature (3386)..(3386): n is a, c, g, or t
  misc_feature (3431)..(3431): n is a, c, g, or t
  misc_feature (3632)..(3632): n is a, c, g, or t
  misc_feature (3634)..(3634): n is a, c, g, or t
  misc_feature (3638)..(3638): n is a, c, g, or t
  misc_feature (3647)..(3647): n is a, c, g, or t
  misc_feature (3669)..(3669): n is a, c, g, or t
  misc_feature (3681)..(3683): n is a, c, g, or t
  misc_feature (3685)..(3686): n is a, c, g, or t
  misc_feature (3688)..(3700): n is a, c, g, or t
  misc_feature (3702)..(3702): n is a, c, g, or t
  misc_feature (3704)..(3704): n is a, c, g, or t
  misc_feature (3706)..(3708): n is a, c, g, or t
  misc_feature (3710)..(3711): n is a, c, g, or t
  misc_feature (3713)..(3714): n is a, c, g, or t
  misc_feature (3717)..(3721): n is a, c, g, or t
  misc_feature (3723)..(3725): n is a, c, g, or t
  misc_feature (3727)..(3728): n is a, c, g, or t
  misc_feature (3730)..(3735): n is a, c, g, or t
  misc_feature (3737)..(3739): n is a, c, g, or t
  misc_feature (3741)..(3747): n is a, c, g, or t
  misc_feature (3750)..(3752): n is a, c, g, or t
  misc_feature (3754)..(3754): n is a, c, g, or t
  misc_feature (3757)..(3761): n is a, c, g, or t
  misc_feature (3763)..(3764): n is a, c, g, or t
  misc_feature (3766)..(3766): n is a, c, g, or t
  misc_feature (3768)..(3769): n is a, c, g, or t
  misc_feature (3771)..(3772): n is a, c, g, or t
  misc_feature (3775)..(3779): n is a, c, g, or t
  misc_feature (3781)..(3782): n is a, c, g, or t
  misc_feature (3784)..(3784): n is a, c, g, or t
  misc_feature (3786)..(3786): n is a, c, g, or t
  misc_feature (3788)..(3791): n is a, c, g, or t
  misc_feature (3794)..(3794): n is a, c, g, or t
  misc_feature (3796)..(3801): n is a, c, g, or t
  misc_feature (3803)..(3808): n is a, c, g, or t
  misc_feature (3811)..(3811): n is a, c, g, or t
  misc_feature (3814)..(3821): n is a, c, g, or t
  misc_feature (3823)..(3823): n is a, c, g, or t
  misc_feature (3826)..(3827): n is a, c, g, or t
  misc_feature (3829)..(3829): n is a, c, g, or t
  misc_feature (3832)..(3833): n is a, c, g, or t
  misc_feature (3835)..(3836): n is a, c, g, or t
  misc_feature (3840)..(3842): n is a, c, g, or t
  misc_feature (3845)..(3846): n is a, c, g, or t
  misc_feature (3848)..(3860): n is a, c, g, or t
  misc_feature (3862)..(3862): n is a, c, g, or t
  misc_feature (3864)..(3864): n is a, c, g, or t
  misc_feature (3866)..(3869): n is a, c, g, or t
  misc_feature (3872)..(3875): n is a, c, g, or t
  misc_feature (3877)..(3924): n is a, c, g, or t
  misc_feature (3926)..(3928): n is a, c, g, or t
  misc_feature (3930)..(3930): n is a, c, g, or t
  misc_feature (3932)..(3932): n is a, c, g, or t
  misc_feature (3934)..(3938): n is a, c, g, or t
  misc_feature (3940)..(3971): n is a, c, g, or t
  misc_feature (3973)..(3977): n is a, c, g, or t
  misc_feature (3979)..(3982): n is a, c, g, or t
  misc_feature (3985)..(3997): n is a, c, g, or t
  misc_feature (3999)..(4000): n is a, c, g, or t
attggaccaaaggaaatcaaagtgaaagaccacgccaancaaatcttgtaatggaaccataggggttgaaagaagggtggatagggataatccaatcagcaaatagtaagcgacttataggttaaatcttttgaaacccttttacaaatcnntttaatagattggcagnttcaaaacgcgcgatggtttttatcccgttttcgtttgatttttgtgatttcataatgcgctgactatgagatggttaagcgattcttatggaatgacanngcttttaaacgacagaaacgcacatgatttgcggcagattgcgcggtaaaaagcatngattcaccgcttcgtttggtgcaaatcatcgtgtgatttggcgcaaatgatgatgcaaaacgggttgnaaggcgaagccgagagacgaaattcatggaatcaaagccatgaaagaagggtgtgtttatacttttttcgtgtctttgtttctatttcgtggtgcagtggagtgttaaaaacaaagaaatcatttgacaagattttcgtcgtccttttgtgcatatccgtcgctcttttcctatccatcgtccccttgtttgagttcatgagggtcctctcctgaccgagaatccctgttcacataaaacatttttctttgataatcattttcatttacaaataaaaatagctatctttgtaacattatgaaacgcaaaatagtttttatttcattgctaacgctctgcctaagtgtatcggcacagcaggcaaaagaagacattaggttaaacagactgttagtgnctggaaacaatctgntagtggctggaaactatctggcttatcctggcccattacaaaagtcacttacgcgagcgcctaaaggctacaaacctttttatctcagtcattatggacgacacggaagccgttggctcatcggagatcgcgactataatcagcctgttctcatgttagagagggccgattcattaggaaaactaacgccgaaggggcaggaagtgcttcgcgatttgcgtctgcttcgcgatgcagccaaggggcgtgacggcgaacttacaccgcttggngctgaacaacaccgtcagattgctgaacgcatggtgcggaatttccccgaaatctttaagggaaagacccatgttgacgctaaaagtacggtggttatccgctgtattctgagcatggaaaacgcgcttcagcagctcgttcgcatgaatccaaatctcgaaatcacgcatgatgcaagctatcatgacatgtattacatgaatcataacgacacttcgctcttcaaacagcgtatgccaaaggctgcacgtgaggcatttgacaacttcagtaaacgtcatattcatcccgaacgactaatgaatgagctcttcaatgatagcacttattggcaaaaagagataaatttcaaacaactatatagcacacttttcaagcaggcttctaatgttcagagtactgaactgcgtcatgagctctcattgtttaacntttttacagacaaagaactctatgatctttggaccacaaacaatgcttggtggtatatcaactatggcccttcacccctcaatggcggtcaacagccaacgtcacaacgctttcttttgcgcaagattgttagtgaagcagacagctgtttgatgttgaatcatcccagtgttacactgcgttatggacacgatacgatggtaatgccgttgacttgcctgttagatctcgacggcatgggtgtgcaagtagccgaccttgagcaagtaacgatgaagggatggaataattatcgcatcttccctatggcctgtaatcttcaatttgtgtactatcgtaagccgggaagtgacgatattctcgtcaagattctacgcaatgagaatgaagctaagctacccattgcaaccgatgtctacccatattatcattggaaggacgtcagagcgtattgtctaaaggtagccgctgacagaccattggtgaaagttgncgacccaanaaaacactaatgacgttgcaaagaacaaagaaagaaacagaaaactaactttaataaactcaaataataacactaaaccaaaaccagaatgaaaagaaagtttttgatattaatgcttttagcctgcacgtttttaggccatgcacaagttaatcggcctaagttggttgtaggaattgtagtagatcagatgcgctgggattatctttacttctataataaggagtatgttagcgacggattcaagcgacttttgtcagaaggatatagctgtcagaacactatggtgccttatattccaaccgtaactgccattggtcactcttgcgtttatacgggaagtgtgcctgctttgatgggaatcctcggcaataacttctatattaacggcaaggatacctattgttgtggtgatgaaacggtgcaaagcgtaggcagtgattcaaaagaaggcaagatgtctccacgcaatttgttggcttcaacgataggagatgagttgaaattggctacaaactataagtcaaaagtcttcggagtngcactcaaagaccgtgcttcaatcttgccagcaggccatagtgccgatgcagcttattggtgggatacgagtgccggccatttcgttacgagcacttattatatgaatcagctgccaacatgggtcaacgacttcaacaaagcccatcaacagaagccgggntatgacatcaaactcgatgtgaaaggcatcaccgtaacctttgatatggctgaggctatcttgaaaaatgagaatcttggtcagggaactgaaaccgatatgctcactgtaagcatatctcccaccgacgcaattggccataagttcagcacacgtggncccgaaaaccacgatgcttacattcaactcgaccgcgatcttgcccgtttcttcaagacgttggatgcncaagtagggcgcggaaactatctcgttttcctcacagctgaccatggtggctctcacaatcctaactttatgcgcagtcataagatgcccgcgggtggctttgaatgctggaatgtggtgaaagaacttaaccaacagctgcaacaagcgtttggaacaacaaccaattttgtgttgggtgagaatgcactccgcgttttcttagaccataagagcattgcttcggccaacttaaacctcaaggatgtgaaggcaaaagcaaaggaattgttagagaaaaagcctaatgtcacctatgttgttgactatgatgaggtggcaacgatgcctattgcacagcctattcgcgagcgaatcatcaacggatatagccgtgaacgtggtggagatctactcattgtgacgaatcccggatggataaacagctcggcaaatcctacntataagggcacaagtcatagtctttggaatccagacgacagtcanatcccattgattttcatgggttggggcgttaaaccgggtgagacttcacgtcctactttcatgaccgacatcgcaccgagtgtatgtagtctgctccacattcaaatgccgaatgcctgtgttggcaattccgttttttaggtttttgaatcaaaacacatagcatcgtcgtagccattgcgctattattctcatgcaatngntacncgctttgtntttatggaggtggcaacgctgnaagcgttgtacnnntnntnnnnnnnnnnnnncnancnnnannanngtnnnnncnnngnnannnnnnannngnnnnnnnaannntntannnnntnnancnntnnttnnnnntnntncnannnngcnannnnnnannnnnnatntcnnnnnnnnantgnntntanntnncaannncanngnnnnnnnnnnnnnantngnnnngannnntnnnnnnnnnnnnnnnnnnnnnnnnnnnnnnnnnnnnnnnnnnnnnnnntnnntngncnnnnntnnnnnnnnnnnnnnnnnnnnnnnnnnnnnnnntnnnnngnnnnttnnnnnnnnnnnnnann

SEQ ID NO: 804 - DNA, 4000 bp, Escherichia coli
  misc_feature (2732)..(2732): n is a, c, g, or t
  misc_feature (2738)..(2738): n is a, c, g, or t
  misc_feature (2741)..(2741): n is a, c, g, or t
  misc_feature (2743)..(2743): n is a, c, g, or t
  misc_feature (2762)..(2762): n is a, c, g, or t
  misc_feature (2780)..(2782): n is a, c, g, or t
  misc_feature (2849)..(2849): n is a, c, g, or t
  misc_feature (2867)..(2867): n is a, c, g, or t
  misc_feature (2881)..(2881): n is a, c, g, or t
  misc_feature (2897)..(2897): n is a, c, g, or t
  misc_feature (2907)..(2907): n is a, c, g, or t
  misc_feature (2921)..(2921): n is a, c, g, or t
  misc_feature (2923)..(2923): n is a, c, g, or t
  misc_feature (2996)..(2996): n is a, c, g, or t
  misc_feature (3034)..(3034): n is a, c, g, or t
  misc_feature (3071)..(3071): n is a, c, g, or t
  misc_feature (3077)..(3077): n is a, c, g, or t
  misc_feature (3079)..(3079): n is a, c, g, or t
  misc_feature (3084)..(3084): n is a, c, g, or t
  misc_feature (3086)..(3086): n is a, c, g, or t
  misc_feature (3094)..(3095): n is a, c, g, or t
  misc_feature (3098)..(3098): n is a, c, g, or t
  misc_feature (3119)..(3119): n is a, c, g, or t
  misc_feature (3143)..(3143): n is a, c, g, or t
  misc_feature (3146)..(3148): n is a, c, g, or t
  misc_feature (3203)..(3203): n is a, c, g, or t
  misc_feature (3247)..(3248): n is a, c, g, or t
  misc_feature (3257)..(3257): n is a, c, g, or t
  misc_feature (3260)..(3260): n is a, c, g, or t
  misc_feature (3269)..(3269): n is a, c, g, or t
  misc_feature (3271)..(3271): n is a, c, g, or t
  misc_feature (3294)..(3294): n is a, c, g, or t
  misc_feature (3310)..(3310): n is a, c, g, or t
  misc_feature (3315)..(3315): n is a, c, g, or t
  misc_feature (3319)..(3319): n is a, c, g, or t
  misc_feature (3329)..(3329): n is a, c, g, or t
  misc_feature (3334)..(3335): n is a, c, g, or t
  misc_feature (3344)..(3344): n is a, c, g, or t
  misc_feature (3364)..(3365): n is a, c, g, or t
  misc_feature (3367)..(3367): n is a, c, g, or t
  misc_feature (3383)..(3383): n is a, c, g, or t
  misc_feature (3389)..(3389): n is a, c, g, or t
  misc_feature (3396)..(3396): n is a, c, g, or t
  misc_feature (3410)..(3411): n is a, c, g, or t
  misc_feature (3417)..(3418): n is a, c, g, or t
  misc_feature (3420)..(3420): n is a, c, g, or t
  misc_feature (3422)..(3422): n is a, c, g, or t
  misc_feature (3427)..(3427): n is a, c, g, or t
  misc_feature (3429)..(3429): n is a, c, g, or t
  misc_feature (3439)..(3439): n is a, c, g, or t
  misc_feature (3450)..(3450): n is a, c, g, or t
  misc_feature (3456)..(3456): n is a, c, g, or t
  misc_feature (3471)..(3471): n is a, c, g, or t
  misc_feature (3477)..(3477): n is a, c, g, or t
  misc_feature (3489)..(3489): n is a, c, g, or t
  misc_feature (3501)..(3501): n is a, c, g, or t
  misc_feature (3504)..(3504): n is a, c, g, or t
  misc_feature (3540)..(3540): n is a, c, g, or t
  misc_feature (3555)..(3555): n is a, c, g, or t
  misc_feature (3573)..(3573): n is a, c, g, or t
  misc_feature (3582)..(3582): n is a, c, g, or t
  misc_feature (3597)..(3597): n is a, c, g, or t
  misc_feature (3606)..(3606): n is a, c, g, or t
  misc_feature (3615)..(3615): n is a, c, g, or t
  misc_feature (3654)..(3654): n is a, c, g, or t
  misc_feature (3669)..(3669): n is a, c, g, or t
  misc_feature (3671)..(3671): n is a, c, g, or t
  misc_feature (3675)..(3675): n is a, c, g, or t
  misc_feature (3677)..(3677): n is a, c, g, or t
  misc_feature (3693)..(3693): n is a, c, g, or t
  misc_feature (3717)..(3717): n is a, c, g, or t
  misc_feature (3723)..(3723): n is a, c, g, or t
  misc_feature (3726)..(3726): n is a, c, g, or t
  misc_feature (3735)..(3735): n is a, c, g, or t
  misc_feature (3738)..(3738): n is a, c, g, or t
  misc_feature (3741)..(3741): n is a, c, g, or t
  misc_feature (3745)..(3745): n is a, c, g, or t
  misc_feature (3756)..(3756): n is a, c, g, or t
  misc_feature (3762)..(3762): n is a, c, g, or t
  misc_feature (3768)..(3768): n is a, c, g, or t
  misc_feature (3771)..(3771): n is a, c, g, or t
  misc_feature (3777)..(3777): n is a, c, g, or t
  misc_feature (3798)..(3798): n is a, c, g, or t
  misc_feature (3813)..(3813): n is a, c, g, or t
  misc_feature (3828)..(3828): n is a, c, g, or t
  misc_feature (3831)..(3831): n is a, c, g, or t
  misc_feature (3836)..(3836): n is a, c, g, or t
  misc_feature (3843)..(3843): n is a, c, g, or t
  misc_feature (3852)..(3852): n is a, c, g, or t
  misc_feature (3891)..(3891): n is a, c, g, or t
  misc_feature (3900)..(3900): n is a, c, g, or t
  misc_feature (3903)..(3903): n is a, c, g, or t
  misc_feature (3912)..(3912): n is a, c, g, or t
  misc_feature (3948)..(3948): n is a, c, g, or t
  misc_feature (3962)..(3963): n is a, c, g, or t
  misc_feature (3966)..(3966): n is a, c, g, or t
  misc_feature (3972)..(3972): n is a, c, g, or t
  misc_feature (3975)..(3975): n is a, c, g, or t
  misc_feature (3980)..(3981): n is a, c, g, or t
  misc_feature (3984)..(3984): n is a, c, g, or t
  misc_feature (3990)..(3990): n is a, c, g, or t
gttcagacggtttcccgttgtatcgtgaacgaagatctgactcctcaaatccatctgaaatgtgggcaatatcgcccaagctcaaaattccctggtcggttgttagcagcggaatttccgcatattccgcggccgtgtaacgacgctctttggtgcgaatgagcagatcacccccgacggtttggatttttcctccgggcatatcaagagttgcctggcggatgattccagaaatttgattcagcgtgagagcatgttgctgcaaggcagattttgaaatttcgagtgtcatttcgaaaccccgcgactgttctacatcgacttgcgtgatgtccggatgcgtcaacaaagtgtcccgagccatttgagccaactcaatcaatgaccgtgctggtgcatctccataaagtgcgatattcaaaacttctctccgccttcgaggtaactgcacctgagcatcatcggcctcttctggaagagtcgtcaatcgagtaaccgccgattccacatcgtcaaacacactttgtttgtccgctcctttttgcagttcaatccggaaactgcccatgccttctttagcagttccagtaatttttttgattccagttattccggaaaccgcatcttcaatcggcaacaaaattgattcttcaatttcatcaggagttgcaccagaatacggaacagctacaataataaaatctagatcaaactcagggaacacttcctgtttgatattagaaacacccattactccggccactaaaataatgatcatcagcaaatttgccgcgactttatgttctgccatccaacgaatcatgactcctccttatttgattcagaaatttattttctttggttattctctcgtttttcccatttcccatactcttgttcaccttttccatctcctcgtttccttcgctctttcctttctcctgaaaactgcttcattcttccttccccattttttctgttttttctttcccggcaatgcggattttaagcccatttgcagcacctttgatgggagaaatgataatctgttctccttgctttacgccacctgaaagataaatattgtcttgatcaagatgtgcgattttcactcgcctaaccgccaactcgccctccaaggcaatccacactgtgtcctgatcccgcaatgcttgtgccggaatgttaaccacattttccagttgtcttcctggaatgctcacatcgacaaaagctcccacaaaaagaggcatattcgaggtttggggagtcggcggactttccgaattcgctgttccctcagtattaattagcgtgttttcagaagttagtttgtttttcggcttcacctgtgacttacgtttcagacgaaaggggtcatccgcttcagctatcaattgtaccatcatcccgcgtggagtcagttccagcaaatgccgtttcaccgtcgcattccaaacggacgcagaaatcattcctgctaaagaaacagttgcaggaaattgaaattgattttcgccgtcaagtgatgtggaggattgaggcagccaatccatgcgccccatcggcaaatcgatcacgacctcagcctcatcactaccaaacaaaaccgccaattgcgttccgggattaacatattgccccaaatccacattttttgactgcactactccgttgaaaggtgccttcaaacgcgattgtgactgccggataccaatgctcaaaagcggatctccttttttgaaaaaactaccttcgttcatttttgggccaatccaaattacttctccaccaatacgtgcgctcaagattactttttttgcagcacgaacacgtccatgagttcttacctcaatttgtggattactcaattttgccaccatcacctccaccaaagttccctgttgaaaatttggttttttgcgcgcttttggcttatttttcagcaaggctacagcaccacctacacctaatccaagtaccaaaacagggagccaaaattttagattaaatatttttttccacataattatttaagttaaatagttgaagaagaatttggcaaaagaagcaaaaatatagcaccttgccccatgctgctttttacagaaattgtaccaccgtgtgcttcgataatggttttacataaactcagaccaagtccgtaaccaccagtttttttattgcgtgacttatcaacccgatagaaaggttcaaaaatcaaatccatttcctcctcaggaattccctgtccataatcttgaatctcaagctgaattccggagtcatccctacttaagcgtaccttgatcggttcattttcaggcgcagaatatttaagtgcgttcgctagaatattttttaaaaccgtttggatttgctcaacatcaactagcccaacacattttcctgcagaattttcaaagctgattccaggagcctttccttcaaacatcaaacatgcttgctcaattaacagtactaaatctgtgggctgcaggtcaattttaccgtattcacttttcaggcgagctgtttctaaaatctccgtcaccatctgctccatttcctgtacatcgctctgtaaactctcttggtaagagtttgccagaatgaattcaagcgctactttcatcctagtcaaaggtgaacgtagttcgtgactaacatcaagtaagagctgttcgcgagcatttagcatctccttgagactttctgacatacggttgaangcccgngcnanatttccaagttcgtcaccncgtttttcaggtaagcgnnnttctaaatttccttcacccaatgcagaaactccatccgaaagccaattgaccggtttcataatccancgtaatgccagccaggtncctgttaaaaccanacccaccaaggccaanacggcaaatncccagggaagaacnanacgaaccccgtgccagtcatcgagaatttgggcaaagatgaaacgaccatttttagtgtccaccgtcaccacnccttgacgctgataacgtccaaagcgcacatttgctangctgtcctgatttgatttattaataagaccgaaaggntcagcngntttantngtccattnncgnaagtgtactttttccagaggnggaattccggatgcagtttgccangannnattttcaccttcaaagcggataatcaaaaacaagcgttgtgataattcacgtgcntgttccagattgagattttcctctaaatccctgaccagatacannccgtattgngcnaggttattncngaaaaaatttcctcgattttccntgaaaccatgccaacngattncggntattccaagnaccannaaacttccngaaatcaggataactgcaannanttttgtaaaaacggantgaaanggtcgtntcagccaattccanntgtttnntngntcaancnccattttcanctccgatgaanaaatancctgtaccccagatngttttnatgaaacgcggntttttcggatcntcncctaatttttgtcgtaaacggctcatggtaatgtcnaccgaacggttgaangcatcccattcaataccncgcagctgntcaatgatttgatcncggttcaanacttttccngaatttttcaccagtaaggcaagacattcaaattcagangaagtcaaacctgcngntttntngtcaacagtcacttcnagtttgtgaaagtcaatactgagnctgccnatntttttcacnccnganttantttttgcctgnacacgncgtaanacngactgnattcttgccaccagttcacgnggttcaaaaggcttnggcagataatcatcngcncctanttcaagnccaaccacncgatccatcacttcaccgcgggcagtcagcataatcacnggaattgtnctngattgcctnattgtacggcaaacttcaaaaccgtccatctccggnagcatcacgtccannatnaccagntcnggtgnntcncgctcnagcttttcca

SEQ ID NO: 805 - DNA, 4000 bp, Escherichia coli
  misc_feature (1969)..(1969): n is a, c, g, or t
  misc_feature (1971)..(1988): n is a, c, g, or t
  misc_feature (1990)..(1995): n is a, c, g, or t
  misc_feature (1997)..(1998): n is a, c, g, or t
  misc_feature (2046)..(2047): n is a, c, g, or t
  misc_feature (2049)..(2051): n is a, c, g, or t
  misc_feature (2053)..(2053): n is a, c, g, or t
  misc_feature (2055)..(2063): n is a, c, g, or t
  misc_feature (2066)..(2066): n is a, c, g, or t
  misc_feature (2068)..(2073): n is a, c, g, or t
  misc_feature (2122)..(2127): n is a, c, g, or t
  misc_feature (2129)..(2131): n is a, c, g, or t
  misc_feature (2133)..(2135): n is a, c, g, or t
  misc_feature (2137)..(2139): n is a, c, g, or t
  misc_feature (2141)..(2141): n is a, c, g, or t
  misc_feature (2143)..(2143): n is a, c, g, or t
  misc_feature (2145)..(2149): n is a, c, g, or t
  misc_feature (2198)..(2199): n is a, c, g, or t
  misc_feature (2201)..(2207): n is a, c, g, or t
  misc_feature (2209)..(2213): n is a, c, g, or t
  misc_feature (2215)..(2215): n is a, c, g, or t
  misc_feature (2217)..(2227): n is a, c, g, or t
  misc_feature (2275)..(2277): n is a, c, g, or t
  misc_feature (2280)..(2280): n is a, c, g, or t
  misc_feature (2283)..(2283): n is a, c, g, or t
  misc_feature (2285)..(2288): n is a, c, g, or t
  misc_feature (2290)..(2296): n is a, c, g, or t
  misc_feature (2299)..(2299): n is a, c, g, or t
  misc_feature (2301)..(2305): n is a, c, g, or t
  misc_feature (2309)..(2309): n is a, c, g, or t
  misc_feature (2312)..(2313): n is a, c, g, or t
  misc_feature (2316)..(2316): n is a, c, g, or t
  misc_feature (2318)..(2321): n is a, c, g, or t
  misc_feature (2324)..(2330): n is a, c, g, or t
  misc_feature (2332)..(2332): n is a, c, g, or t
  misc_feature (2336)..(2336): n is a, c, g, or t
  misc_feature (2339)..(2341): n is a, c, g, or t
  misc_feature (2344)..(2344): n is a, c, g, or t
  misc_feature (2347)..(2348): n is a, c, g, or t
  misc_feature (2350)..(2365): n is a, c, g, or t
  misc_feature (2367)..(2369): n is a, c, g, or t
  misc_feature (2371)..(2377): n is a, c, g, or t
  misc_feature (2379)..(2383): n is a, c, g, or t
  misc_feature (2385)..(2385): n is a, c, g, or t
  misc_feature (2387)..(2387): n is a, c, g, or t
  misc_feature (2389)..(2389): n is a, c, g, or t
  misc_feature (2392)..(2393): n is a, c, g, or t
  misc_feature (2395)..(2395): n is a, c, g, or t
  misc_feature (2397)..(2398): n is a, c, g, or t
  misc_feature (2402)..(2402): n is a, c, g, or t
  misc_feature (2404)..(2404): n is a, c, g, or t
  misc_feature (2407)..(2407): n is a, c, g, or t
  misc_feature (2412)..(2413): n is a, c, g, or t
  misc_feature (2416)..(2418): n is a, c, g, or t
  misc_feature (2421)..(2422): n is a, c, g, or t
  misc_feature (2425)..(2425): n is a, c, g, or t
  misc_feature (2429)..(2430): n is a, c, g, or t
  misc_feature (2432)..(2435): n is a, c, g, or t
  misc_feature (2437)..(2448): n is a, c, g, or t
  misc_feature (2450)..(2452): n is a, c, g, or t
  misc_feature (2455)..(2455): n is a, c, g, or t
  misc_feature (2457)..(2460): n is a, c, g, or t
  misc_feature (2462)..(2463): n is a, c, g, or t
  misc_feature (2466)..(2467): n is a, c, g, or t
  misc_feature (2469)..(2469): n is a, c, g, or t
  misc_feature (2472)..(2475): n is a, c, g, or t
  misc_feature (2478)..(2483): n is a, c, g, or t
  misc_feature (2486)..(2486): n is a, c, g, or t
  misc_feature (2489)..(2490): n is a, c, g, or t
  misc_feature (2493)..(2495): n is a, c, g, or t
  misc_feature (2498)..(2500): n is a, c, g, or t
  misc_feature (2504)..(2507): n is a, c, g, or t
  misc_feature (2509)..(2515): n is a, c, g, or t
  misc_feature (2517)..(2519): n is a, c, g, or t
  misc_feature (2521)..(2526): n is a, c, g, or t
  misc_feature (2528)..(2531): n is a, c, g, or t
  misc_feature (2533)..(2539): n is a, c, g, or t
  misc_feature (2541)..(2544): n is a, c, g, or t
  misc_feature (2546)..(2549): n is a, c, g, or t
  misc_feature (2551)..(2552): n is a, c, g, or t
  misc_feature (2555)..(2557): n is a, c, g, or t
  misc_feature (2560)..(2561): n is a, c, g, or t
  misc_feature (2563)..(2563): n is a, c, g, or t
  misc_feature (2565)..(2567): n is a, c, g, or t
  misc_feature (2569)..(2572): n is a, c, g, or t
  misc_feature (2574)..(2577): n is a, c, g, or t
  misc_feature (2580)..(2583): n is a, c, g, or t
  misc_feature (2585)..(2585): n is a, c, g, or t
  misc_feature (2587)..(2588): n is a, c, g, or t
  misc_feature (2590)..(2592): n is a, c, g, or t
  misc_feature (2594)..(2594): n is a, c, g, or t
  misc_feature (2596)..(2600): n is a, c, g, or t
  misc_feature (2602)..(2607): n is a, c, g, or t
  misc_feature (2610)..(2611): n is a, c, g, or t
  misc_feature (2613)..(2613): n is a, c, g, or t
  misc_feature (2615)..(2615): n is a, c, g, or t
  misc_feature (2618)..(2625): n is a, c, g, or t
  misc_feature (2627)..(2628): n is a, c, g, or t
  misc_feature (2632)..(2632): n is a, c, g, or t
  misc_feature (2639)..(2639): n is a, c, g, or t
  misc_feature (2641)..(2643): n is a, c, g, or t
  misc_feature (2645)..(2645): n is a, c, g, or t
  misc_feature (2647)..(2648): n is a, c, g, or t
  misc_feature (2650)..(2650): n is a, c, g, or t
  misc_feature (2652)..(2652): n is a, c, g, or t
  misc_feature (2656)..(2656): n is a, c, g, or t
  misc_feature (2660)..(2660): n is a, c, g, or t
  misc_feature (2662)..(2692): n is a, c, g, or t
  misc_feature (2694)..(2697): n is a, c, g, or t
  misc_feature (2699)..(2705): n is a, c, g, or t
  misc_feature (2708)..(2710): n is a, c, g, or t
  misc_feature (2712)..(2715): n is a, c, g, or t
  misc_feature (2718)..(2719): n is a, c, g, or t
  misc_feature (2721)..(2725): n is a, c, g, or t
  misc_feature (2727)..(2741): n is a, c, g, or t
  misc_feature (2743)..(2743): n is a, c, g, or t
  misc_feature (2745)..(2755): n is a, c, g, or t
  misc_feature (2757)..(2757): n is a, c, g, or t
  misc_feature (2759)..(2759): n is a, c, g, or t
  misc_feature (2761)..(2769): n is a, c, g, or t
  misc_feature (2772)..(2774): n is a, c, g, or t
  misc_feature (2778)..(2781): n is a, c, g, or t
  misc_feature (2784)..(2788): n is a, c, g, or t
  misc_feature (2790)..(2791): n is a, c, g, or t
  misc_feature (2794)..(2794): n is a, c, g, or t
  misc_feature (2799)..(2802): n is a, c, g, or t
  misc_feature (2804)..(2804): n is a, c, g, or t
  misc_feature (2807)..(2807): n is a, c, g, or t
  misc_feature (2809)..(2811): n is a, c, g, or t
  misc_feature (2813)..(2821): n is a, c, g, or t
  misc_feature (2823)..(2824): n is a, c, g, or t
  misc_feature (2826)..(2829): n is a, c, g, or t
  misc_feature (2831)..(2836): n is a, c, g, or t
  misc_feature (2838)..(2842): n is a, c, g, or t
  misc_feature (2844)..(2844): n is a, c, g, or t
  misc_feature (2846)..(2846): n is a, c, g, or t
  misc_feature (2849)..(2849): n is a, c, g, or t
  misc_feature (2853)..(2858): n is a, c, g, or t
  misc_feature (2862)..(2862): n is a, c, g, or t
  misc_feature (2864)..(2882): n is a, c, g, or t
  misc_feature (2884)..(2890): n is a, c, g, or t
  misc_feature (2892)..(2892): n is a, c, g, or t
  misc_feature (2895)..(2901): n is a, c, g, or t
  misc_feature (2903)..(2907): n is a, c, g, or t
  misc_feature (2910)..(2922): n is a, c, g, or t
  misc_feature (2924)..(2925): n is a, c, g, or t
  misc_feature (2927)..(2928): n is a, c, g, or t
  misc_feature (2930)..(2931): n is a, c, g, or t
  misc_feature (2933)..(2935): n is a, c, g, or t
  misc_feature (2938)..(2944): n is a, c, g, or t
  misc_feature (2948)..(2963): n is a, c, g, or t
  misc_feature (2965)..(2971): n is a, c, g, or t
  misc_feature (2973)..(2981): n is a, c, g, or t
  misc_feature (2983)..(2993): n is a, c, g, or t
  misc_feature (2995)..(3002): n is a, c, g, or t
  misc_feature (3004)..(3006): n is a, c, g, or t
  misc_feature (3008)..(3021): n is a, c, g, or t
  misc_feature (3023)..(3032): n is a, c, g, or t
  misc_feature (3034)..(3040): n is a, c, g, or t
  misc_feature (3042)..(3042): n is a, c, g, or t
  misc_feature (3044)..(3047): n is a, c, g, or t
  misc_feature (3049)..(3052): n is a, c, g, or t
  misc_feature (3056)..(3079): n is a, c, g, or t
  misc_feature (3081)..(3094): n is a, c, g, or t
  misc_feature (3096)..(3096): n is a, c, g, or t
  misc_feature (3098)..(3098): n is a, c, g, or t
  misc_feature (3101)..(3108): n is a, c, g, or t
  misc_feature (3111)..(3115): n is a, c, g, or t
  misc_feature (3117)..(3120): n is a, c, g, or t
  misc_feature (3123)..(3124): n is a, c, g, or t
  misc_feature (3126)..(3129): n is a, c, g, or t
  misc_feature (3131)..(3133): n is a, c, g, or t
  misc_feature (3136)..(3136): n is a, c, g, or t
  misc_feature (3138)..(3143): n is a, c, g, or t
  misc_feature (3145)..(3155): n is a, c, g, or t
  misc_feature (3157)..(3165): n is a, c, g, or t
  misc_feature (3167)..(3171): n is a, c, g, or t
  misc_feature (3175)..(3176): n is a, c, g, or t
  misc_feature (3178)..(3189): n is a, c, g, or t
  misc_feature (3191)..(3192): n is a, c, g, or t
  misc_feature (3194)..(3195): n is a, c, g, or t
  misc_feature (3197)..(3201): n is a, c, g, or t
  misc_feature (3203)..(3206): n is a, c, g, or t
  misc_feature (3208)..(3213): n is a, c, g, or t
  misc_feature (3215)..(3230): n is a, c, g, or t
  misc_feature (3233)..(3241): n is a, c, g, or t
  misc_feature (3243)..(3243): n is a, c, g, or t
  misc_feature (3245)..(3247): n is a, c, g, or t
  misc_feature (3249)..(3250): n is a, c, g, or t
  misc_feature (3252)..(3253): n is a, c, g, or t
  misc_feature (3255)..(3258): n is a, c, g, or t
  misc_feature (3260)..(3269): n is a, c, g, or t
  misc_feature (3271)..(3274): n is a, c, g, or t
  misc_feature (3276)..(3288): n is a, c, g, or t
  misc_feature (3290)..(3290): n is a, c, g, or t
  misc_feature (3292)..(3292): n is a, c, g, or t
  misc_feature (3294)..(3295): n is a, c, g, or t
  misc_feature (3297)..(3301): n is a, c, g, or t
  misc_feature (3303)..(3304): n is a, c, g, or t
  misc_feature (3306)..(3308): n is a, c, g, or t
  misc_feature (3310)..(3322): n is a, c, g, or t
  misc_feature (3324)..(3328): n is a, c, g, or t
  misc_feature (3330)..(3334): n is a, c, g, or t
  misc_feature (3337)..(3340): n is a, c, g, or t
  misc_feature (3343)..(3345): n is a, c, g, or t
  misc_feature (3348)..(3352): n is a, c, g, or t
  misc_feature (3354)..(3372): n is a, c, g, or t
  misc_feature (3374)..(3379): n is a, c, g, or t
  misc_feature (3381)..(3386): n is a, c, g, or t
  misc_feature (3389)..(3389): n is a, c, g, or t
  misc_feature (3391)..(3395): n is a, c, g, or t
  misc_feature (3397)..(3397): n is a, c, g, or t
  misc_feature (3401)..(3410): n is a, c, g, or t
  misc_feature (3413)..(3415): n is a, c, g, or t
  misc_feature (3418)..(3420): n is a, c, g, or t
  misc_feature (3422)..(3425): n is a, c, g, or t
  misc_feature (3428)..(3430): n is a, c, g, or t
  misc_feature (3432)..(3432): n is a, c, g, or t
  misc_feature (3434)..(3445): n is a, c, g, or t
  misc_feature (3447)..(3452): n is a, c, g, or t
  misc_feature (3454)..(3456): n is a, c, g, or t
  misc_feature (3458)..(3459): n is a, c, g, or t
  misc_feature (3461)..(3461): n is a, c, g, or t
  misc_feature (3463)..(3472): n is a, c, g, or t
  misc_feature (3476)..(3485): n is a, c, g, or t
  misc_feature (3489)..(3497): n is a, c, g, or t
  misc_feature (3499)..(3504): n is a, c, g, or t
  misc_feature (3506)..(3506): n is a, c, g, or t
  misc_feature (3508)..(3511): n is a, c, g, or t
  misc_feature (3514)..(3514): n is a, c, g, or t
  misc_feature (3517)..(3519): n is a, c, g, or t
  misc_feature (3521)..(3522): n is a, c, g, or t
  misc_feature (3524)..(3526): n is a, c, g, or t
  misc_feature (3528)..(3529): n is a, c, g, or t
  misc_feature (3532)..(3532): n is a, c, g, or t
  misc_feature (3535)..(3540): n is a, c, g, or t
  misc_feature (3542)..(3545): n is a, c, g, or t
  misc_feature (3547)..(3555): n is a, c, g, or t
  misc_feature (3557)..(3558): n is a, c, g, or t
  misc_feature (3560)..(3560): n is a, c, g, or t
  misc_feature (3562)..(3567): n is a, c, g, or t
  misc_feature (3569)..(3576): n is a, c, g, or t
  misc_feature (3578)..(3578): n is a, c, g, or t
  misc_feature (3581)..(3583): n is a, c, g, or t
  misc_feature (3585)..(3593): n is a, c, g, or t
  misc_feature (3595)..(3595): n is a, c, g, or t
  misc_feature (3597)..(3601): n is a, c, g, or t
  misc_feature (3603)..(3608): n is a, c, g, or t
  misc_feature (3610)..(3616): n is a, c, g, or t
  misc_feature (3618)..(3628): n is a, c, g, or t
  misc_feature (3630)..(3636): n is a, c, g, or t
  misc_feature (3638)..(3642): n is a, c, g, or t
  misc_feature (3645)..(3647): n is a, c, g, or t
  misc_feature (3649)..(3652): n is a, c, g, or t
  misc_feature (3654)..(3659): n is a, c, g, or t
  misc_feature (3662)..(3664): n is a, c, g, or t
  misc_feature (3666)..(3674): n is a, c, g, or t
  misc_feature (3676)..(3680): n is a, c, g, or t
  misc_feature (3682)..(3696): n is a, c, g, or t
  misc_feature (3698)..(3700): n is a, c, g, or t
  misc_feature (3702)..(3702): n is a, c, g, or t
  misc_feature (3704)..(3705): n is a, c, g, or t
  misc_feature (3707)..(3712): n is a, c, g, or t
  misc_feature (3715)..(3720): n is a, c, g, or t
  misc_feature (3722)..(3727): n is a, c, g, or t
  misc_feature (3729)..(3741): n is a, c, g, or t
  misc_feature (3744)..(3761): n is a, c, g, or t
  misc_feature (3763)..(3763): n is a, c, g, or t
  misc_feature (3765)..(3765): n is a, c, g, or t
  misc_feature (3768)..(3769): n is a, c, g, or t
  misc_feature (3771)..(3777): n is a, c, g, or t
  misc_feature (3779)..(3785): n is a, c, g, or t
  misc_feature (3787)..(3788): n is a, c, g, or t
  misc_feature (3790)..(3797): n is a, c, g, or t
  misc_feature (3799)..(3799): n is a, c, g, or t
  misc_feature (3801)..(3801): n is a, c, g, or t
  misc_feature (3803)..(3806): n is a, c, g, or t
  misc_feature (3808)..(3817): n is a, c, g, or t
  misc_feature (3819)..(3819): n is a, c, g, or t
  misc_feature (3821)..(3822): n is a, c, g, or t
  misc_feature (3824)..(3828): n is a, c, g, or t
  misc_feature (3830)..(3834): n is a, c, g, or t
  misc_feature (3836)..(3843): n is a, c, g, or t
  misc_feature (3845)..(3849): n is a, c, g, or t
  misc_feature (3851)..(3854): n is a, c, g, or t
  misc_feature (3856)..(3858): n is a, c, g, or t
  misc_feature (3860)..(3869): n is a, c, g, or t
  misc_feature (3871)..(3884): n is a, c, g, or t
  misc_feature (3886)..(3889): n is a, c, g, or t
  misc_feature (3892)..(3900): n is a, c, g, or t
  misc_feature (3902)..(3906): n is a, c, g, or t
  misc_feature (3908)..(3918): n is a, c, g, or t
  misc_feature (3920)..(3922): n is a, c, g, or t
  misc_feature (3924)..(3924): n is a, c, g, or t
  misc_feature (3926)..(3926): n is a, c, g, or t
  misc_feature (3928)..(3938): n is a, c, g, or t
  misc_feature (3940)..(3949): n is a, c, g, or t
  misc_feature (3951)..(3962): n is a, c, g, or t
  misc_feature (3965)..(3973): n is a, c, g, or t
  misc_feature (3975)..(3990): n is a, c, g, or t
  misc_feature (3993)..(4000): n is a, c, g, or t
tagctaatataattgttgataaatacgaattttcacctcttaataaaatggaaagggcaatctccaatgagatgattaaggagatttgtattcctgttaaagttgataggttgggaaatattgtcaaattaggtaaatctgaatagtgttagttcttaattttgaaatgatctaaatagtaagcttatattcaatggaagaaaacaagaaaggtgagatacttttatatcaaacaatagatggagtttctaaaatagaagtgactgtatataatgatatagtatggttgctagatcaggtggcagagctatttcaacgtaataagtcaacaatatcgcttcatattaaaaatatatttgattgtggtgaactacagatagattcaactgttgcaaaatttgcaacagttcaaaaagaaggtttgtataaagtagcatttgttttaggtagaaattcattttattgaaaattaaaaaaagagcgaaaaaaaatgaagatataggatacgttataattattatactatttaacaccttaaaactaatacaatgataaaaaaaactctttattttggaaatccggtttatctgtcattgaggaatgcgcagttagtaataaaattaccggaaatagagaaaaatgatatattgccagagaattttaagcaacaatctgaaataacaaaacctgttgaagatataggaatagtggttttagataataaacagattactattacatcaggagtacttgaagcattgcttgagaacaatagtgctgttataacctgtgatagcaaaagcatgcccgtgggattgatgcttcctttatatggaaatacaactcaaaatgaacgctttcgtcaacagttggatgcttcagtaccattgaaaaaacagctttggcagcaaactattaagtcgaaaatagataatcaagcctctgttttggagaagtgtactgcggaagaagtgaagtgtatgcgtatttgggcgaatgatgtgaaaagtggtgatcctgataatttagaagcacgtgctgctgcctattattggaagggactatttgctaatgttaaggggttcactcgtgaacgcgaaggcatttctcccaataatctactaaattatggatatgctatacttcgtgcaattgtagcccgtggattagtgacaagcggattacttccaactttgggtattcatcatcataatcgttacaatgcctattgtttggctgacgatataatggaaccttatcgtccttatgtggatgagttggtttttgggttggttcagttgcatgggagtaatttggaattaactaaagaaataaaagcttgtttattgactatccctacattggaagtgaaaataggtggaaagcgtagtcctttgatggttgctgttggacaaacaactgcatcattgtataagtgttttgatggagaattacgtcgtataagttatcccgaacgttaatggatcgttttagtgaatatcgtattatgtgggtacttgttctttttgatttaccaacggagacgaagaaagataaaagagcctatgctgattttagaaagaatttacagaaagacggctttactatgtttcaattttctatttatgtacgacattgtgctagtagtgaaaatgcagcagtacatataaaaagggttaaatcctttcttcctgaatatgggcagattggaattatgtgcataactgataaacaatttggggatattgaacttttttatgggaaaaagatacagatggtgaatacgccaggacaacagttagaactattttaaaataaaaaatcccgtagaaaaaacgggattttttgttaaatacagcttcttttttatttcctatattaggctttagtatgttgtgctacagttagatatgtagattctgctgtattcaatggctcaaagatactaatttgaaagcaaatcacaacntnnnnnnnnnnnnnnnnnnannnnnntnngctgtattcaatggctcaaagatactaatttgaaagcaaatcacaacnntnnntntnnnnnnnnngtntnnnnnntgctgtattcaatggctcaaagatactaatttgaaagcaaatcacaacnnnnnnannntnnntnnntntntnnnnntgctgtattcaatggctcaaagatactaatttgaaagcaaatcacaacnnannnnnnnannnnntntnnnnnnnnnnngctgtattcaatggctcaaagatactaatttgaaagcaaatcacaacnnnatnttntnnnncnnnnnnnttngnnnnnctgnatnnaangnnnnaannnnnnnantttnaannnaantcnnannnnnnnnnnnnnnnntnnntnnnnnnntnnnnntntntncanngncnnaaananacnaattnnaannnaanncanaacnntnnnnannnnnnnnnnnnannnttnannnntnnttnnanggnnnnaannnnnnaanttnnaannnaannnaaannnnannnnnnntnnntnnnnnnannnntnnnnnnntnnnnannnncnnaannntannantnnnannnnannnnacnnnnantnngnnntntnnnnntnnnnnntgnngntntannnnnnnncnnaaanatactantnnnanannanancacnactnannnnnnnnnnnnnnnnnnnnnnnnnnnnnnntnnnnannnnnnnaannntnnnnttnnannnnnannnnnnnnnnnnnnngntnnnnnnnnnnnangntnnnnnnnnnttnnntggnnnnaannnnntnnttngaaannnnanaanannnannnnnnnnnanntnnnngnnnnnnannnnntntnttnaatnnnnnnaatntnnnnnnnnnnnnnnnnnnnannnnnnntnttnnnnnnnannnnnaannnnnnnnnnnnntnnanngnntnnnaannnnnnntttnnnnnnnnnnnnnnnnannnnnnncnnnnnnnnntnnnnnnnnnnntnnnnnnnnannngnnnnnnnnnnnnnntnnnnnnnnnnannnnnnntntnnnncnnnntatnnnnnnnnnnnnnnnnnnnnnnnnannnnnnnnnnnnnnantnttnnnnnnnnaannnnnannnntanntnnnntnnnttnannnnnnannnnnnnnnnntnnnnnnnnnannnnnattnntnnnnnnnnnnnnannannannnnntnnnntnnnnnnannnnnnnnnnnnnnnnatnnnnnnnnnanannnanntnntnnnnannnnnnnnnnannnnannnnnnnnnnnnntntntnntnnnnnanntnnntnnnnnnnnnnnnnannnnnannnnnaannnnaannnaannnnntnnnnnnnnnnnnnnnnnnngnnnnnncnnnnnncanannnnnanagannnnnnnnnnaannnaannnannnnaannnanannnnnnnnnnnntnnnnnngnnntnnangnnnnnnnnnnaaannnnnnnnnnaaannnnnnnnntnnnnnngntnnnnagnaannntnnannncnnccntannnnnntnnnngnnnnnnnnntnnangnnnnnnannnnnnnnanagnnntnnnnnnnnnangnnnnnannnnnntnnnnnnnannnnnnnnnnnannnnnnntnnnnntcnnnannnntnnnnnnttnnntnnnnnnnnnannnnnannnnnnnnnnnnnnnannnanannannnnnnaannnnnncnnnnnnannnnnnnnnnnnnagnnnnnnnnnnnnnnnnnnantnaanngnnnnnnngnnnnnnnanntnnnnnnnnanangnnnntnnnnnnnnnnantnnannnnnannnnntnnnnnnnngnnnnntnnnntnnngnnnnnnnnnntnnnnnnnnnnnnnntnnnnacnnnnnnnnntnnnnntnnnnnnnnnnnannntnanannnnnnnnnnntnnnnnnnnnnannnnnnnnnnnntannnnnnnnntnnnnnnnnnnnnnnnnccnnnnnnnn

SEQ ID NO: 806 - DNA, 4000 bp, Escherichia coli
  misc_feature (1979)..(1979): n is a, c, g, or t
  misc_feature (1989)..(1990): n is a, c, g, or t
cgcagaaatatgctgcaccaagttcacgacgcggttggagtaaccccattcattgtcgtaccacgaaacaaccttgatgaaattgtcaccgagttgaatgccagccgtcgcgtcaaaaattgaagatcggctgtctccgataaaatctgacgagacgaccgcatcttcggtgtacccgagcacaccagcgtattcggcagactcgctcgcacgcttaatcgtcgcacagacttcttcgtacgtggttttcttttccactcgtacggttaaatcgacgacgctcacgtcttgcgtcggcacacggaatgccataccagttaacttgccgttcaatttcggcaaaactttaccaacagccttggcagcgccagtgctcgacgggatgatattgacaccactaccacggcctccacgccagtctttcatggacgggccgtcaaccgtcttttgcgtcgccgtcgtggcgtgcaccgtcgtcatcaagccttcgatgattccaaagttgtcgtcgatcaccttggccaaaggcgccaagcagtttgtcgtacacgacgcgttcgacacaatcaattccgaggcattgtagtcattcgcgttcacacccatgacatacatcggcgcgtccgcactgggtgcggtgatcaccacgcgctttgcgcctgcgtcgatgtgcttttgcgcgcccgcgagagacgtaaacaccccggtggattcaatgacaacatccacgccgaggtcaccccaaggaatgttcgacggatcacgctcagcgtacgtttccacgacggaaccattcaccatgaacgccaacgcgcattcatcacccttgcattcaatatctgcccgttccgcttcagacgtcccggcgaaaatcccgtgcaccgtgtcgtacttgaacatgtacgccatgtacttggcatccacgaaaggatcattcaccgcgacgacgcgcaggtttggatgcttcagcgccgcgcgcatgaccaatcgaccgatgcgaccgaagccgttgataccgatcgtgattgtaggcgaagcgccgtcatcgtccgaaaaggcactcgagccgccgcgtttttgtcccgccggcgtttgcgcgcccgacgccgacgcgcgaacgatcgcgcgatgcgatcgcgcgcgagacgatgaagatattttaacgtgcgtcgacggcgtcatcgaagacggcgtcgtgagtctgtgcgcggcgaaagacgcgtcgattgcaaaagttagttgctgacagcgcggcggcgtgtgcgatctgcccatcttgcgcgcgcatcgctcgcgcgactcgtacgacggcgagcgcacggtggggatcgacgagaataatttgcgtacgcgtacctgtggtgtgagatggcgtgcatggcggcgatgtggcgcgcgtgcgtgcggtgatgtgtggcgttcgattcactttttgcagcgcttttttacaaaatatctcaccaccacagaatattcgatagatcccgcgcgttcgcacccgtcggcggtgcgcgatgcgaacaagcgcgtgcaaaagaatgcgatctatgcgatgcgctggcgagatggcgcgttggccgtcgatgcgcgcgcaatacgcaaaatgtgcgcaagggctcgaaatgctgtttcgagtgctagctacgcgagcgtcacacgccgacgcggcgccgcatcgatgacgccgacgccgacggtgattttagatctcgatgggacgttgattaacaccgagcagctcgtcgacgaggtggtcggcgcggtcgtgcgcgacctcaccaagggtgcgctggcgacgagtaccattcacgatgcgctcgagcgcgtgcgcggcatgcggccgatggatgccacgcgcgagctcatctcgcgcctgtcgctagatattgcccccgaggcgctactcgctgcgacgtcgccgctgttaaacgcgcgctggggcgaggtgcagctcatgcccggcgcgatgcggttgcttnagcacttgcnngcaaaaggcgtgcggttcggtttggcgacgtcgacaccgcgagagtactttgcgctgaagatggcgagtcacacgcgtgttgtagagatgatgtcgtgcgagatcaccggagatttagtcgtgcgtgggaagcctgatccggaaattttcgagctcgccgcgaagacgttgggcgcggacgcgacggcgtgcgtcgtcatagaggacacacccgtcgggtgcgaagccgggcagagcgcgggaatgcgcacgattgcggttccgagtattcgtgatcgcgccgcgttcgaaagctgcgcggatgcggtgatacattctttgtacgatttggatttggccaaatttggcttgcccgcgtttgaggattggctcccactggatgacggatcggcggacgccgtactgcccattgcacccgtcgtcatgcgagggccggtggtgaagggttttgggcgcggtgctaaagagctcggcattcccacggcgaatttagatgtggcggcgttgaaatttcaagttgattcgcttgcacctggcatttacctcggatttgcgaaactgcgaggcgaaatttatcagcaagtcatgagcatcggatggaatccgttcttcgacaatgcgaagaagacgatcgaaccgtggctcttacatgattttggcgatgatggggatttttatggggaggaattagaattagtagtgagtgcttatttgcgtccagaagcggactttacgacactcgaagcgttgattacgcgcatccatcgcgacgccgaagtcgcaaagacgatgcttcagcgcgaagaacttaaacacacagtgaaactattgcactagataatatttatacactaagaatactactacttggacgaaatgcgcgctcgagcgatgcgcgctcgaacaaaatgcaccgccgacgccgcggcgtctttgatgcgctcaactttatacatgccgccaccttggtctaaagttttcggcgccgtctctacacgtcgttttacgacttcacgagagagtgtctcggcttcgagcgcatcggcatccgctttcagtcgcttcatttcttcagagatggaggcacgcaacggctcgcgtaacgacgccaacaccccgctcgcttcgtactctttcgcaccaccatcaagaaacacgcggtatgtctcaccatctaagctctcgacttcgagcgcgagaagtggaatgctatacgcgccgccccatttcttagtggccatgctcacgatgcccgtcttacgcgtgccgcgaagcgcaaacgcgacgtgcgcccactttgaatcaacgctcacgggaagcgtcatcgccccaaacgtgctcgatctaacgcgcttaaacattgctaatcccccgcccgaggtaacgaccacgcgagattcacccacagtcacgggtgcgcctaataattcccgaacgcctggatgttcagctaaccgacgcgtcgctatcgcctgcgcgtaatccacatccaatcgatacctctgtcgcatcgcgaaagcgcccgcggctgcgagcgtgattgaccctccaaccatcgccgggtcgccgaacgccacgtcaaacaccgaagaatcgggcgagatacccatggcggatgttttaaataggcgtgccgaacgccatgtcgccaccgcggctgcgctcgtcgcacccaactccatagtcctccaatgcttcgcatacgccgccaccacgcgctgttcgatcgcgcgcttaatcaccaatggattaaactcgctcatcgtccataaaaactccgacgcttgcggaccgagcgccgtatctgtcgcgcgtctcgctcgcagctttgcctcctccactttgttcaacacatcctcccgtacgcgccgcggcacatcgagcacgtcatccttcacgcgcgtaacgacatcaaattgacggcgaattctatcgtacgcgctcccgggcgtcgcaccagcgcccgaatgcgcaccgcggcgaagaaaaagatgacgttggagcccgata

SEQ ID NO: 807 - DNA, 4000 bp, Escherichia coli
  misc_feature (104)..(104): n is a, c, g, or t
  misc_feature (257)..(257): n is a, c, g, or t
  misc_feature (374)..(374): n is a, c, g, or t
  misc_feature (506)..(506): n is a, c, g, or t
  misc_feature (1454)..(1454): n is a, c, g, or t
  misc_feature (1988)..(1988): n is a, c, g, or t
  misc_feature (2536)..(2536): n is a, c, g, or t
  misc_feature (2541)..(2541): n is a, c, g, or t
  misc_feature (2582)..(2582): n is a, c, g, or t
  misc_feature (3488)..(3488): n is a, c, g, or t
  misc_feature (3500)..(3500): n is a, c, g, or t
  misc_feature (3505)..(3505): n is a, c, g, or t
  misc_feature (3657)..(3657): n is a, c, g, or t
  misc_feature (3662)..(3664): n is a, c, g, or t
  misc_feature (3666)..(3670): n is a, c, g, or t
  misc_feature (3674)..(3674): n is a, c, g, or t
  misc_feature (3677)..(3677): n is a, c, g, or t
  misc_feature (3680)..(3682): n is a, c, g, or t
  misc_feature (3684)..(3684): n is a, c, g, or t
  misc_feature (3686)..(3688): n is a, c, g, or t
  misc_feature (3699)..(3699): n is a, c, g, or t
  misc_feature (3701)..(3701): n is a, c, g, or t
  misc_feature (3705)..(3705): n is a, c, g, or t
  misc_feature (3708)..(3708): n is a, c, g, or t
  misc_feature (3710)..(3712): n is a, c, g, or t
  misc_feature (3714)..(3716): n is a, c, g, or t
  misc_feature (3718)..(3720): n is a, c, g, or t
  misc_feature (3725)..(3725): n is a, c, g, or t
  misc_feature (3727)..(3727): n is a, c, g, or t
  misc_feature (3729)..(3729): n is a, c, g, or t
  misc_feature (3732)..(3732): n is a, c, g, or t
  misc_feature (3734)..(3735): n is a, c, g, or t
  misc_feature (3746)..(3746): n is a, c, g, or t
  misc_feature (3750)..(3750): n is a, c, g, or t
  misc_feature (3755)..(3755): n is a, c, g, or t
  misc_feature (3761)..(3762): n is a, c, g, or t
  misc_feature (3764)..(3765): n is a, c, g, or t
  misc_feature (3767)..(3772): n is a, c, g, or t
  misc_feature (3775)..(3776): n is a, c, g, or t
  misc_feature (3778)..(3779): n is a, c, g, or t
  misc_feature (3781)..(3781): n is a, c, g, or t
  misc_feature (3783)..(3788): n is a, c, g, or t
  misc_feature (3790)..(3791): n is a, c, g, or t
  misc_feature (3795)..(3795): n is a, c, g, or t
  misc_feature (3797)..(3798): n is a, c, g, or t
  misc_feature (3809)..(3811): n is a, c, g, or t
  misc_feature (3813)..(3813): n is a, c, g, or t
  misc_feature (3815)..(3818): n is a, c, g, or t
  misc_feature (3821)..(3827): n is a, c, g, or t
  misc_feature (3831)..(3833): n is a, c, g, or t
  misc_feature (3836)..(3836): n is a, c, g, or t
  misc_feature (3841)..(3843): n is a, c, g, or t
  misc_feature (3846)..(3850): n is a, c, g, or t
  misc_feature (3853)..(3854): n is a, c, g, or t
  misc_feature (3856)..(3857): n is a, c, g, or t
  misc_feature (3863)..(3877): n is a, c, g, or t
  misc_feature (3880)..(3880): n is a, c, g, or t
  misc_feature (3882)..(3884): n is a, c, g, or t
  misc_feature (3888)..(3888): n is a, c, g, or t
  misc_feature (3890)..(3890): n is a, c, g, or t
  misc_feature (3893)..(3893): n is a, c, g, or t
  misc_feature (3895)..(3895): n is a, c, g, or t
  misc_feature (3898)..(3898): n is a, c, g, or t
  misc_feature (3901)..(3901): n is a, c, g, or t
  misc_feature (3903)..(3903): n is a, c, g, or t
  misc_feature (3911)..(3912): n is a, c, g, or t
  misc_feature (3917)..(3917): n is a, c, g, or t
  misc_feature (3919)..(3919): n is a, c, g, or t
  misc_feature (3924)..(3926): n is a, c, g, or t
  misc_feature (3928)..(3930): n is a, c, g, or t
  misc_feature (3932)..(3934): n is a, c, g, or t
  misc_feature (3937)..(3937): n is a, c, g, or t
  misc_feature (3939)..(3941): n is a, c, g, or t
  misc_feature (3950)..(3950): n is a, c, g, or t
  misc_feature (3952)..(3952): n is a, c, g, or t
  misc_feature (3961)..(3961): n is a, c, g, or t
  misc_feature (3966)..(3966): n is a, c, g, or t
  misc_feature (3969)..(3969): n is a, c, g, or t
  misc_feature (3973)..(3973): n is a, c, g, or t
  misc_feature (3975)..(3977): n is a, c, g, or t
  misc_feature (3980)..(3980): n is a, c, g, or t
  misc_feature (3983)..(3983): n is a, c, g, or t
  misc_feature (3986)..(3986): n is a, c, g, or t
  misc_feature (3991)..(3992): n is a, c, g, or t
  misc_feature (3998)..(3999): n is a, c, g, or t
ccgaagccgccatgctcgccggcctgttcaaggcgccgtcgaaattctcgcccaacgtcaacctgccggccgcgcgcgcgcgcgccaacgtggtgctcgacaanctggtcgaagccggcttcatgaccgaaggccaggtgttcggcgcccgccgcaatccggcgacgccggtcgaccgccgcgacgaccgcgcgcccaattattatctcgattgggccttcgacgagatgaagaagctggtcgacaccttcccgaantcgatgaccgagcgtgtgttcgtggtgcgcatcgcactcgacgtcaatctgcagcgggcggcggaaaatgccgtggagaattcgctgcgccaatacggccaggaatatcacgccggncaggccgcggccgtgctcatggatgttgacggctcggtgcgcgccatggtgggcggacgcgactacggcgccagccagttcaaccgcgccaccgacgcgatgcgccagccgggctcctcgttcaagccttangtctacgccaccgcgctcgaacacggattgaagccaacttcgatcgtggtcgacgggccggtctgcatcggcaactggtgcccgcacaattacggccatggctatgccggctcgatgacgctgatcaacgcgatcacccattcgatcaataccatcgccgtgaagctctcgatcaccatcggcaacggcaatgccaagctcggccgcgcgcgcatcatcaagaccgcgcacgacatgggcattcgcacgccgttgccggacacgccgtcgctgccgatcggcgccgacgcggtgaccctgcttgatcacaccggcgcctacgccaccttccccaatctcggcatgaagatgaccccgcacgccgtcctcgaggtgcgcaccggcgacggcaagctgatctggcgcttcgatcgcgacggtccgaaaccgaaccgggcgctgccggatcgcgtggccgccgacatgatcaagatgatgaacagtgtggtcgagaacggcaccggccggcgcgcgcgcctcgacggcattaccgccgccggcaagaccggcacgaccaacgcttatcgcgacgcctggttcatgggctacaccggcaatttcgtctgcggcgtctggttcggcaatgacgactaccagtcgaccaatcgcatgaccggcggcgcgttgccggcgatgacgtggcacaatatcatggactatgcgcatcagggcatcgagatcaaacagcttcctggaattccagtgccggcggcgcgccagggaccggccgttgccgaagtcaaatcgaagtccggcgcgccgccgccgcgcccgaccgtgctcaccaagcggggagccgacatactcgtgcgcgtcgagcggatgatggatgacgccaaccgcgccatggggccgctgcgcccaaccgtctccagcaacaagaagaaacaggccgaagccccgcaaaanggcgacgccctcgcctccacattggagggacatgcgttcggcagccggaactaattagccgctcaccagcgcccggcgtagtctccctttcgcgaatcaacttacccctcaccgccagcggatcgaaacgtgcggctgcttctcggatcgctgtttgccctcgttgtcgccgccgtcgtcggcctcggcgcgacttatctcgcgctcacccgcggcgccgccttcggccctttgacgatcggcagttggacggcctggccgaaaaccggcaccgccgacgccgatccctatgtgcgggcgtcgatcgcgcgcatcggccgcttgccgaccgcgctcggcgacggcgtcgcgtttaccgcttcggccgacgataatggccgcccgctcgacgggcgatgcgatgtggtactcgcgggcgtcacgccggcggcccgcttctggacgctgacgctctataacgccgacggcgagctggtggccaattcgatcaaacgctccggattcaccagccaggaaattgtccgccacgccganggcagtttcgagatcgtcgtagcgccgcgcgcaaatccgagcaactggctgccgaccggtggcgtcgagcgttacgtcctgttgctgcgcctctacgacacggccgtcggcgtctcgaccaaagccggccgcgaagtcccgatgccgagcgtgaacgtcaggagttgcccatgatccgatggctgctcttggctttaggcggcgccttgctgggcggaatcgtgcacttggcgacgatcattatcctgccgcacaccgccacgcaggacgcctatgcgcggctggcgcgcagcgttccggtcaataccgtggctcctttgccggagccgaccgcagaatccgcaccgatgccgttcatggatccggccttcgccagcgccgtctgccgctacgatctttcgcaagggccgctgaaactcagcgtcccggtgagcctcgcctacacttcggtctcattctatacgcgctacgacgtggcctattacgccatcaatgaccgcgcggctggccggcgcgtgatcgagctcgacctgatgacggtcgaacancacanccagatgccggaagacgaagagatcaccgccgccgaccggntgatcgtggaatcgccgacgctcaccggtctgatcgcgatccgggcgctggcgccggagcccggattgatgccgatggcgaaaagcgcgatcgccaacgccagatgcgtgcgcgcggacgaaccgaaaccgtcgcgttaatcagcgaaccgtggccaggttttgctcgcgcatccaggtcggcgcggggccgcggtaacgcgcgatcagggcttgcaggtgattgaccgcgcgctcgatgtcgaccgcctgtggcgatggcgtcgcgatcaccagacgctccagagcgtagtgataagacgccgcgcgctgcgtcagtttttcgcgtgtcaaagcggcaatggccgcgttttcgcgcatgcgtcgctcggcgtttttgcgttccgtcggcgacaacgcggacaccaaggccatacttttttgccgtttctggtcgatatcgagcacgcggccggccgtttcgaagaattgcggcagctgcgtcatgtcgttgcgcacatcgtccatcaggcgcgcatagcgcaccgacggcgagcgttcgtgcggcgacaagaaagtcgtaacgtcgtggcgcacaccttccaacttcgccgagtaacgcgccagtggcgaagggccgtcgcccgagagcagccacttcgcataagcagtgcggtcgaacgccggcccgcgcgccggccagtagaggccatattcgcccgcaacggaataccattgttgccgatcatagggaggatcgaccagcgggtaagcgagatcgcgcagggcgcgctcatcgtcggtcagttcgaatttcgagggcaccgatccggtggcataagggccgacccaatcgtgcatgccgtcgctcaccagcgtgggacggacttcgccgaaatcgccgttgggggtgccgcatccggcgagnagcaagagggcngcagntacaaaaaaatgccggcgccagataagcgcctgcgtgagcggcggcggcaggtttcgcatagatggctcgcggccggttaagttcagcgcgcgatgcggcggcggcggcggcgccctggtgtattgccggtatccggttcgaggccgttggngccgnnngnnnnncgcncgncgnnnancnnnggaagaatgangncggncgngnnntnnntnnnggcgncnanatntnngccgccgcgcncacngcccncttcgnngnnannnnnnatnncnncncnnnnnncnncccncnngccgccgcggnnnanannnntgnnnnnnnccgnnnggncggcnnnttnnnnnaannanncgggcnnnnnnnnnnnnnnnctncnnncgcncnctnantantgngngccgtcgnngcccngnaaagnnnannntnnnggngnnntcctccgcntncccccctcncgacngtntggncnnnctngcntgncgggnnggcgtnna

SEQ ID NO: 808 - DNA, 4000 bp, Escherichia coli
  misc_feature (2)..(2): n is a, c, g, or t
  misc_feature (324)..(324): n is a, c, g, or t
  misc_feature (750)..(750): n is a, c, g, or t
  misc_feature (938)..(938): n is a, c, g, or t
  misc_feature (1072)..(1072): n is a, c, g, or t
  misc_feature (1306)..(1306): n is a, c, g, or t
  misc_feature (1700)..(1700): n is a, c, g, or t
  misc_feature (1713)..(1713): n is a, c, g, or t
  misc_feature (1780)..(1780): n is a, c, g, or t
  misc_feature (1794)..(1794): n is a, c, g, or t
  misc_feature (1796)..(1796): n is a, c, g, or t
  misc_feature (1800)..(1801): n is a, c, g, or t
  misc_feature (1989)..(1991): n is a, c, g, or t
  misc_feature (1996)..(1996): n is a, c, g, or t
  misc_feature (3784)..(3784): n is a, c, g, or t
gnctctctgatctggatggatcactctacgagacggcggatttgctcattggcaatattgatgaatccggcttcctgaaagcgtccattaacgagctgatcttctcaaccaatgctgctaaagagacgattgaggaggtcattgagttgattcaaagttttgatccgccgggtgttgctgccagggatttgagggagtgcctgatgcttcaactggaaaggatcggtaaacaacattccctcgaataccgcatactcgatcgatgtttcgagcttttgggcaagagaaagtttcctgatattgcccgcgaattgggatgcaatntggagcaggtcgtgcaggccaccaaacggatcagtcacttgaacccccgaccaggcggtgcttaccgcgcggaaggtgagcactatgtgacgcccgaagttttcattacccgaaccgatgaaggggagtatgtggtcaacatcaataacgaccatatcccgcgtatccgtatcagcaacacgtataaagaccttttgtcagtggcatccagtggagctgatctgaaggaatacattcgagagaaaattcgttctggcaagtttctcatcaaaagtatcgatcagaggcagcagaccattaccaagattgctcatgaaatattgaggaggcaaaaagactttttcgaccatggcatcacccacctcaaacccatgacgatgatgcaagtggctgaagtcgtgggtgtgcatgaaacaacggtgagtngggccgtttcgggaaaatatctcgaatgtcctcaagggctcttcgagctgaagttttttttcacatcgggtatccaaaccgcaaccggtgaggatatctccaatgcttcagtcaaggatttgattcttgaaatggtaagggaagagaatccactcaagccattgtctgacgatcaaattgtgaagcanctcatgtccaaggacatcaagatcgcccgacgaaccgttgccaaataccgaggggaactcaatatcttaccctcgcacttgagaaaacaatacgactaaacatctctcaggatgaggtactttcatccttctgnagcgcttgctgggtttccgcccgcatgctctccaatttgggccgccagtgttccttttctttggcaggcatgcggtcgatgaaaagaatcccattgaggtgatcgacctcatgctgaatggccttggcaagcaggccgtcacactcaaacttcatggaatggccttccggatcctgcgccgttacttccacacgctcgggacgttcgatgtccgcatagatttcagggaagctnaagcatccttccggcccactgatgggtgcggttaacttttcaaccgatggattcacgagcaccagcggcatgtgttcttccaaaaccacttcctttcctccgatagtcatggatgatggacgatcctctgattgagacacatccaccaccgtcaactggagggccttgcctatttgctgtgcagctaatcccacgccatcggcttgatacatggtttcaagcatttcatcgaccaagcgatgaagggatgcatcaaaggcgtcaatggtctttccccgttgtctgagaacagggtgtccatatttgacaatgggcatggtcatgggcggatcttgtgaaatcgtcatgggtggttcaaggtcaaaagaccctttcctgaggaggcctacggtcnattggcttcactnggtcggatgcctcatcacgtcgatggatggtgcatgggatggcatccatggtggtctgtgagagtcngcgctcaacgggananggcnntggaaaacaaaaccgggccctatcaccagaggatggctaagggcccggggaatttccagaaccagtattcaatagtaggattatgtaggattccgacgtcaggacttcattctaagatgatttcccttcgccaaaaagccgaagagctggcaagataactcttaccggctcggaaattagtaaatccnnntaaantaaatcacttccgaaccagtctgtcaaagtgaaaaacaataaataagggttgctcgggcgaaaaagtcgaaagccggttcttctcagccaggccaacaataaatgcctgggctctgatgaaacatttaattttccgaacccataccgcaaaagccatttgaaacttctcatgaagtcctctatccaacaaaatttgtggtgggtcacccttccagcgctcatacttcctctatgcggcgccctcgtctactttaatctgggcgggcaggctggaatcgttcaagccatctacacctccatcaaggttttcacccttctgtggcccgtgattgccatgcaatggatcgtgaaagtgcctttttcggaatggcgttccatgctggtatggaatcggcgcatgatgatcgaggggctggtctgcggcttggggatggcatgcatccttctcctgacccttatcacaccgtggggtgagacagttaagcagcaggcaggcatggtaaggcaaaaggccctcgacatggggattttgcaattctttccgctgtttgctgttttcatttcaatttttcacagtttgctggaggaatattattggaggtggtttgccttcgggaacctccatcgttgcatgtcttcggcaagggctgcgcatctcttgggggcttgtggctttgctgcgcatcatgtggtcatcacaacgaccttttttcccggcttcttgggatggttctcgggattcagtgtgggtattgcaggcgccgtatggtcctggatgatgacccgacatcgatccattgtgggtgcctggatcgctcacatgatcgtcgatctttgtctcatggccgttggatattggctgatttttgaggtcgctccctcactttgatggagacatcagttagcaaggcattccactttggatgggctctccaaaacgggctctttacccttaggttccaacacgccatgggtggggagacctttttgttgcaaaacccctgaccatcagggataaggggtgcgatgcaatcccacatttcagctaccttacgttggttggtcatggtcggtttgacccatttctcgctgctcggccatggggccgaagattccttcaaaggggtcttgattcaacccaaagacggcaaattacgcgtcgaaatcaatggccaattttttagcgagtatcattatcaggaagtgtctcgcccctttttctacccggtgatggggccggatggattgcccatgacccgcaactggcccatggcgcaaggggaaggcgaggagcatgaccaccctcatcacaagtccttctggtatgctcacggtgaaatcaatggtcatgacttctggtcagaaagcagtcaggcaggcaccacaaggcatgtggccttcttgcgcatcagctcgggagcaaaaagaggcgtcatcaagactctcaaccacctcgtggcaaaggacggtaccatcgtcggaagcgatattcgcaccatgaccattcacaatcggccggatgccgagcgagtcattgactttgatatcgaggttcaagcttctcatggtgagctggtcatgggcgacaccaaggaagggagcatggccttgcgcctcgctccaaccatgcgtctcaagggaaaagtggccaagggacacatcgtaaacagtgaaggagttgaggatggtcaaacctggggcaagcgcgctaagtgggttgattattggggccccgttcagggcaagcaagtgggagttgccatttttgatcatccgtccaatccacgncatcccacctggtggcacgtgcgggattatggcctctttgctgccaaccccttcggagtccaccactttgagcgtaaggaaaaagggaccggcaacctcaccatcaagtcaggggattccctcacctggcaataccgattttattttcatcgcggcaataccgaagagggccaggtcagccatcggtatgacctgtattcaagtgagtcctgagca

SEQ ID NO: 809 - DNA, 4000 bp, Escherichia coli
  misc_feature (66)..(66): n is a, c, g, or t
  misc_feature (216)..(216): n is a, c, g, or t
  misc_feature (240)..(240): n is a, c, g, or t
  misc_feature (243)..(243): n is a, c, g, or t
  misc_feature (1978)..(1978): n is a, c, g, or t
  misc_feature (3200)..(3200): n is a, c, g, or t
  misc_feature (3209)..(3209): n is a, c, g, or t
  misc_feature (3322)..(3322): n is a, c, g, or t
  misc_feature (3332)..(3332): n is a, c, g, or t
  misc_feature (3335)..(3335): n is a, c, g, or t
  misc_feature (3337)..(3338): n is a, c, g, or t
  misc_feature (3340)..(3342): n is a, c, g, or t
  misc_feature (3344)..(3344): n is a, c, g, or t
  misc_feature (3347)..(3348): n is a, c, g, or t
  misc_feature (3350)..(3352): n is a, c, g, or t
  misc_feature (3354)..(3359): n is a, c, g, or t
  misc_feature (3361)..(3361): n is a, c, g, or t
  misc_feature (3363)..(3363): n is a, c, g, or t
  misc_feature (3365)..(3365): n is a, c, g, or t
  misc_feature (3367)..(3367): n is a, c, g, or t
  misc_feature (3369)..(3369): n is a, c, g, or t
  misc_feature (3377)..(3377): n is a, c, g, or t
  misc_feature (3379)..(3380): n is a, c, g, or t
  misc_feature (3382)..(3384): n is a, c, g, or t
  misc_feature (3388)..(3388): n is a, c, g, or t
  misc_feature (3390)..(3390): n is a, c, g, or t
  misc_feature (3392)..(3392): n is a, c, g, or t
  misc_feature (3394)..(3398): n is a, c, g, or t
  misc_feature (3400)..(3405): n is a, c, g, or t
  misc_feature (3407)..(3408): n is a, c, g, or t
  misc_feature (3410)..(3412): n is a, c, g, or t
  misc_feature (3415)..(3417): n is a, c, g, or t
  misc_feature (3419)..(3420): n is a, c, g, or t
  misc_feature (3424)..(3424): n is a, c, g, or t
  misc_feature (3426)..(3427): n is a, c, g, or t
  misc_feature (3431)..(3437): n is a, c, g, or t
  misc_feature (3439)..(3439): n is a, c, g, or t
  misc_feature (3442)..(3443): n is a, c, g, or t
  misc_feature (3446)..(3450): n is a, c, g, or t
  misc_feature (3452)..(3452): n is a, c, g, or t
  misc_feature (3457)..(3457): n is a, c, g, or t
  misc_feature (3459)..(3459): n is a, c, g, or t
  misc_feature (3461)..(3461): n is a, c, g, or t
  misc_feature (3463)..(3465): n is a, c, g, or t
  misc_feature (3467)..(3470): n is a, c, g, or t
  misc_feature (3472)..(3477): n is a, c, g, or t
  misc_feature (3479)..(3480): n is a, c, g, or t
  misc_feature (3485)..(3489): n is a, c, g, or t
  misc_feature (3492)..(3494): n is a, c, g, or t
  misc_feature (3498)..(3498): n is a, c, g, or t
  misc_feature (3500)..(3502): n is a, c, g, or t
  misc_feature (3507)..(3508): n is a, c, g, or t
  misc_feature (3511)..(3511): n is a, c, g, or t
  misc_feature (3513)..(3513): n is a, c, g, or t
  misc_feature (3517)..(3518): n is a, c, g, or t
  misc_feature (3520)..(3520): n is a, c, g, or t
  misc_feature (3523)..(3523): n is a, c, g, or t
  misc_feature (3525)..(3528): n is a, c, g, or t
  misc_feature (3531)..(3531): n is a, c, g, or t
  misc_feature (3533)..(3533): n is a, c, g, or t
  misc_feature (3536)..(3539): n is a, c, g, or t
  misc_feature (3541)..(3543): n is a, c, g, or t
  misc_feature (3545)..(3545): n is a, c, g, or t
  misc_feature (3549)..(3552): n is a, c, g, or t
  misc_feature (3555)..(3557): n is a, c, g, or t
  misc_feature (3561)..(3561): n is a, c, g, or t
  misc_feature (3564)..(3570): n is a, c, g, or t
  misc_feature (3572)..(3576): n is a, c, g, or t
  misc_feature (3579)..(3585): n is a, c, g, or t
  misc_feature (3587)..(3590): n is a, c, g, or t
  misc_feature (3595)..(3598): n is a, c, g, or t
  misc_feature (3601)..(3605): n is a, c, g, or t
  misc_feature (3607)..(3607): n is a, c, g, or t
  misc_feature (3610)..(3610): n is a, c, g, or t
  misc_feature (3612)..(3617): n is a, c, g, or t
  misc_feature (3620)..(3620): n is a, c, g, or t
  misc_feature (3622)..(3624): n is a, c, g, or t
  misc_feature (3627)..(3630): n is a, c, g, or t
  misc_feature (3632)..(3645): n is a, c, g, or t
  misc_feature (3647)..(3651): n is a, c, g, or t
  misc_feature (3654)..(3654): n is a, c, g, or t
  misc_feature (3657)..(3659): n is a, c, g, or t
  misc_feature (3661)..(3663): n is a, c, g, or t
  misc_feature (3665)..(3665): n is a, c, g, or t
  misc_feature (3668)..(3668): n is a, c, g, or t
  misc_feature (3673)..(3676): n is a, c, g, or t
  misc_feature (3678)..(3678): n is a, c, g, or t
  misc_feature (3683)..(3683): n is a, c, g, or t
  misc_feature (3685)..(3685): n is a, c, g, or t
  misc_feature (3687)..(3688): n is a, c, g, or t
  misc_feature (3690)..(3695): n is a, c, g, or t
  misc_feature (3698)..(3699): n is a, c, g, or t
  misc_feature (3702)..(3702): n is a, c, g, or t
  misc_feature (3705)..(3707): n is a, c, g, or t
  misc_feature (3709)..(3709): n is a, c, g, or t
  misc_feature (3713)..(3716): n is a, c, g, or t
  misc_feature (3720)..(3724): n is a, c, g, or t
  misc_feature (3727)..(3730): n is a, c, g, or t
  misc_feature (3732)..(3739): n is a, c, g, or t
  misc_feature (3741)..(3747): n is a, c, g, or t
  misc_feature (3749)..(3751): n is a, c, g, or t
  misc_feature (3753)..(3757): n is a, c, g, or t
  misc_feature (3759)..(3760): n is a, c, g, or t
  misc_feature (3762)..(3766): n is a, c, g, or t
  misc_feature (3770)..(3770): n is a, c, g, or t
  misc_feature (3772)..(3773): n is a, c, g, or t
  misc_feature (3778)..(3782): n is a, c, g, or t
  misc_feature (3786)..(3786): n is a, c, g, or t
  misc_feature (3793)..(3798): n is a, c, g, or t
  misc_feature (3800)..(3801): n is a, c, g, or t
  misc_feature (3805)..(3806): n is a, c, g, or t
  misc_feature (3808)..(3808): n is a, c, g, or t
  misc_feature (3811)..(3813): n is a, c, g, or t
  misc_feature (3815)..(3815): n is a, c, g, or t
  misc_feature (3818)..(3818): n is a, c, g, or t
  misc_feature (3820)..(3820): n is a, c, g, or t
  misc_feature (3822)..(3822): n is a, c, g, or t
  misc_feature (3826)..(3826): n is a, c, g, or t
  misc_feature (3829)..(3831): n is a, c, g, or t
  misc_feature (3833)..(3841): n is a, c, g, or t
  misc_feature (3843)..(3844): n is a, c, g, or t
  misc_feature (3846)..(3846): n is a, c, g, or t
  misc_feature (3848)..(3849): n is a, c, g, or t
  misc_feature (3851)..(3853): n is a, c, g, or t
  misc_feature (3856)..(3858): n is a, c, g, or t
  misc_feature (3860)..(3861): n is a, c, g, or t
  misc_feature (3863)..(3865): n is a, c, g, or t
  misc_feature (3867)..(3868): n is a, c, g, or t
  misc_feature (3871)..(3878): n is a, c, g, or t
  misc_feature (3880)..(3887): n is a, c, g, or t
  misc_feature (3889)..(3889): n is a, c, g, or t
  misc_feature (3891)..(3898): n is a, c, g, or t
  misc_feature (3900)..(3900): n is a, c, g, or t
  misc_feature (3904)..(3905): n is a, c, g, or t
  misc_feature (3908)..(3911): n is a, c, g, or t
  misc_feature (3913)..(3914): n is a, c, g, or t
  misc_feature (3919)..(3919): n is a, c, g, or t
  misc_feature (3921)..(3923): n is a, c, g, or t
  misc_feature (3926)..(3929): n is a, c, g, or t
  misc_feature (3934)..(3935): n is a, c, g, or t
  misc_feature (3938)..(3939): n is a, c, g, or t
  misc_feature (3941)..(3941): n is a, c, g, or t
  misc_feature (3944)..(3946): n is a, c, g, or t
  misc_feature (3949)..(3950): n is a, c, g, or t
  misc_feature (3953)..(3955): n is a, c, g, or t
  misc_feature (3959)..(3966): n is a, c, g, or t
  misc_feature (3968)..(3970): n is a, c, g, or t
  misc_feature (3972)..(3974): n is a, c, g, or t
  misc_feature (3976)..(3976): n is a, c, g, or t
  misc_feature (3982)..(3991): n is a, c, g, or t
  misc_feature (3994)..(3996): n is a, c, g, or t
  misc_feature (3998)..(3998): n is a, c, g, or t
atgccaagcgcaagcacatcgacttttaacaagccaagcgcatcaagatcatccttatcccattcnatcacagtacggccagccatcgccgcagggctgatcgggcatagatgatcaagccgcccacgggtgatcacaaacccgccaacatgttgtgacaaatgccgtggaaaccggctgatatcggccactaattgtaaaaccaaccgcagtcgncggtcattggcatccagtcccgcngcngccagcgccgcagcatcaaggccggttttttcacgcccccatacctcgccagccaaggccgcctgaacatcacggctaagaccaaacacctttgccacttcgcgaaatgcgctgcggcgacgataggtaatcacactggcggtaaggccagcacgattccggccatattttgcatagatatgctggatcacttcttcgcggcgttcatgttcgaaatcgacatcaatatctggcggctcaccacgcgcctcgctgacaaaacgttcaaataagggttgcgatcgttcaggatcaaccgcggtaatgcccaaacaatagcaaaccgccgaattcgccgccgaaccgcgcccctgacataaaataccgcgcccccgcgcaaagcgaacaatatcaaagacggtcagaaaataaggcgcaatattcaaacgctcgatcaagatcaattcatgtttcagataggcacttaccttatcagggatcgcatcaggatagcgtttttcagcgccgcgccatgtctggaaggccagttcctgcatggcggttcgtccactcggctttagctcgtcaggatattcataagataaatcatccattgaaaaatggcataaatctgcaagcgcttttgccccatcaagcgcatctggcacatgccgccaacgccgttcagcctcggcacaatcaatcaaatggcgttcggcattgcgcgaaataagatagccagcatcatcaagctgttgcttttcacggatgcacgccagaacatcggcaagcgggcggcgatcaggaatgtgataaagcgcatctgccgctgccgccacccgcagccccagcgccgctgccgctgccgctaacatctggcatcgtgcctcatcagccccatcacgatataggcaaatccctgcaaataattgccctttggcaatttggcgaatggtctgcaaatgcgtttgataatgcgcatctggatgacgcggcggcatgaccagcaatgcggtgcttgctggcaggcgggcaagatcggcaagatagagaattggcgcggctttgctgcctcgcatattggcctcgcttagcagcattgataaagcttcataaccaacgcggtcacacggatgaacaataatatcaggaccatcggcagggcgtaatctggcaccaacaacaagcctgatctggtgatcacgcgccgccacatgcgcccgcacaataccggccagcgaattcacatcggcaatgccaaccgccgcccacccaagcgcggccgcctgtgccaccatttcatcaggatgcgatgcgccttttaaaaaggtgaaattactataacagccaagcaacgcatgtgatgcggcttggccttgtttacgcaatatggccatcaggcaaaaaacccatgcaaaaaccaagatggggtttcgtgacgttctggcaaaccttcacgatatagccagaaccctgccccctgatcatcgcgtaaccgaaaataatcgcgggtgcgactgccagcgggtgcctgccaccatgcaggggcaatccgttctggccctgtggcatgaatgattttatgaattcgccgccgccagataaattgcgctggcgggtgatcgggaagaagcgcgacaacatcaacagggtgcggataggccaaaaggcgaatggggcgtggtggcgcagtgcctgatgccggatcaccaagccaacctgatttttcgtccgttttggtgaaaatctggcttgnatcaggcagttcaaacgattgcgccgcttcaggctgccagcaggcttgcggtgccaatctgaccacggcaccatagccaagacgtgccaccaaccggtcaacaaggctggcataggattcgcctgcaaccccatcatggcgctgcaacatcatatgcggcaaagccgtatcaagtggcgcaagggggctgcaatcaagcgattccatccagcccatttcaagaccaaattcagggttgatcttgtcgctggcattggccagcaagcggtgaaataaagtcacatcacggcttggccgcgaaagatgcacatcatgtgcaaaaaccagcccatcaaccaattgccagccaagccgcaaacggcgtgttgccaatccggcctgttgaagcaaagtggctgtttcacttgccaattgctgaatcatcgccttgatatcatcagctgcgccaatgggttcggcaaattgacggcatatataaagcggttttggcgggctaacagctgtaaagctttcatcctgatcgccaagcgcctgatcaagccgaagaagcacatcctgaccaaaacgcgcggccaatggcgcacgcgccaatccaataatatccccaatcacccgcaagcctgcgcgccgcatatgatcggcgattgccgtatcgattcgcaatgcagcaagcggcaatgctgccagatggcgtcgcaagcgggcgcggctgaaaatatatcttaccgtgtccggctgtccatctgccggtttcggtgcggtcattaaccgctctgacggctttccataatgcgccaaggcccacgccgcgccgcaatttggtgccgccgccagcaccgcccgaaagtgacttcgatgaaggcgtttggcgcaatcggctaatagcgaacgcaccccgccaaacagatgttcggcaccagcaatatcaatccagattccgcaatgctgatcatcaaccgcggtaagcgggctataacgacgcgcccataaagccagatgatgaagatcggcatggtcggctagcgggtcatatgcttcggttctgagttgtgggcataaggcgcgggcatcggcaagccgcataccagcggcaagaccatgcgctgccgctttggtacaacccgccagaataatatcagcgccgttgactttccggattataacaagcggcagatcagctccagattccctttgcccagattccctttgcccagatgctctntggatccgngatgcggccagatagggaaaatggatatagataatatgacgataggaaacgggcatgatcacatgcctatcgggcaagagcttgcgctggccagtgattggctgacaagtgantggctgacangtnanngnnngncanntnnncnnnnnncngntngncnttagccangnngnnntgancncngnnnnncnnnnnncnnannnccnnntnncagncnncccnnnnnnnangcnnccnnnnncnacgcncncncnnnannnncnnnnnncnnacacnnnnntgnnncaangnnnaatgnnacnanctgnnangancnnnngcngnttnnnncnnncnagcnnnntcnnntccngcnnnnnnnannnnngcnnnnnnnannnnagctnnnntgnnnnnanctncnnnnnnaancnnngcnnnncnnnnnnnnnnnnnncnnnnntcngcnnntnnntncancccannnnantccancncnncnnnnnncannccntcnnntngcannnnatcnnnnngcnnnncnnnnnnnngnnnnnnntnnngnnnnncnncnnnnngcantnncgccnnnnncagnccagccnnnnnnannccanncncannnanccnancngcancannncnnnnnnnnncnngncnncnnncannnanncnnncnncannnnnnnncnnnnnnnncngnnnnnnnncntgcnnggnnnntnnctgcngnnngtnnnnttgcnncanntnaannngcnncannncaannnnnnnnannncnnnangcgccnnnnnnnnnnccnnnanaa

SEQ ID NO: 810 - DNA, 4000 bp, Escherichia coli
  misc_feature (1)..(4): n is a, c, g, or t
  misc_feature (6)..(7): n is a, c, g, or t
  misc_feature (9)..(16): n is a, c, g, or t
  misc_feature (18)..(21): n is a, c, g, or t
  misc_feature (23)..(27): n is a, c, g, or t
  misc_feature (29)..(29): n is a, c, g, or t
  misc_feature (31)..(35): n is a, c, g, or t
  misc_feature (39)..(47): n is a, c, g, or t
  misc_feature (50)..(51): n is a, c, g, or t
  misc_feature (53)..(56): n is a, c, g, or t
  misc_feature (58)..(58): n is a, c, g, or t
  misc_feature (61)..(61): n is a, c, g, or t
  misc_feature (63)..(65): n is a, c, g, or t
  misc_feature (67)..(72): n is a, c, g, or t
  misc_feature (74)..(83): n is a, c, g, or t
  misc_feature (85)..(85): n is a, c, g, or t
  misc_feature (88)..(89): n is a, c, g, or t
  misc_feature (92)..(92): n is a, c, g, or t
  misc_feature (94)..(96): n is a, c, g, or t
  misc_feature (99)..(101): n is a, c, g, or t
  misc_feature (104)..(108): n is a, c, g, or t
  misc_feature (110)..(110): n is a, c, g, or t
  misc_feature (116)..(120): n is a, c, g, or t
  misc_feature (123)..(123): n is a, c, g, or t
  misc_feature (125)..(126): n is a, c, g, or t
  misc_feature (128)..(129): n is a, c, g, or t
  misc_feature (131)..(136): n is a, c, g, or t
  misc_feature (138)..(142): n is a, c, g, or t
  misc_feature (144)..(146): n is a, c, g, or t
  misc_feature (148)..(154): n is a, c, g, or t
  misc_feature (156)..(156): n is a, c, g, or t
  misc_feature (160)..(160): n is a, c, g, or t
  misc_feature (162)..(170): n is a, c, g, or t
  misc_feature (172)..(174): n is a, c, g, or t
  misc_feature (177)..(183): n is a, c, g, or t
  misc_feature (187)..(188): n is a, c, g, or t
  misc_feature (190)..(196): n is a, c, g, or t
  misc_feature (198)..(205): n is a, c, g, or t
  misc_feature (207)..(208): n is a, c, g, or t
  misc_feature (210)..(210): n is a, c, g, or t
  misc_feature (214)..(214): n is a, c, g, or t
  misc_feature (216)..(217): n is a, c, g, or t
  misc_feature (221)..(223): n is a, c, g, or t
  misc_feature (226)..(227): n is a, c, g, or t
  misc_feature (229)..(230): n is a, c, g, or t
  misc_feature (232)..(235): n is a, c, g, or t
  misc_feature (237)..(238): n is a, c, g, or t
  misc_feature (240)..(241): n is a, c, g, or t
  misc_feature (244)..(254): n is a, c, g, or t
  misc_feature (256)..(256): n is a, c, g, or t
  misc_feature (258)..(263): n is a, c, g, or t
  misc_feature (265)..(266): n is a, c, g, or t
  misc_feature (268)..(268): n is a, c, g, or t
  misc_feature (270)..(272): n is a, c, g, or t
  misc_feature (274)..(284): n is a, c, g, or t
  misc_feature (287)..(288): n is a, c, g, or t
  misc_feature (290)..(291): n is a, c, g, or t
  misc_feature (293)..(297): n is a, c, g, or t
  misc_feature (299)..(299): n is a, c, g, or t
  misc_feature (303)..(303): n is a, c, g, or t
  misc_feature (305)..(306): n is a, c, g, or t
  misc_feature (310)..(311): n is a, c, g, or t
  misc_feature (313)..(316): n is a, c, g, or t
  misc_feature (319)..(319): n is a, c, g, or t
  misc_feature (321)..(322): n is a, c, g, or t
  misc_feature (324)..(326): n is a, c, g, or t
  misc_feature (328)..(328): n is a, c, g, or t
  misc_feature (330)..(330): n is a, c, g, or t
  misc_feature (332)..(333): n is a, c, g, or t
  misc_feature (336)..(337): n is a, c, g, or t
  misc_feature (340)..(341): n is a, c, g, or t
  misc_feature (343)..(344): n is a, c, g, or t
  misc_feature (346)..(348): n is a, c, g, or t
  misc_feature (350)..(352): n is a, c, g, or t
  misc_feature (354)..(355): n is a, c, g, or t
  misc_feature (359)..(365): n is a, c, g, or t
  misc_feature (367)..(367): n is a, c, g, or t
  misc_feature (369)..(372): n is a, c, g, or t
  misc_feature (374)..(374): n is a, c, g, or t
  misc_feature (377)..(377): n is a, c, g, or t
  misc_feature (379)..(382): n is a, c, g, or t
  misc_feature (384)..(388): n is a, c, g, or t
  misc_feature (390)..(394): n is a, c, g, or t
  misc_feature (396)..(399): n is a, c, g, or t
  misc_feature (401)..(401): n is a, c, g, or t
  misc_feature (403)..(403): n is a, c, g, or t
  misc_feature (405)..(406): n is a, c, g, or t
  misc_feature (408)..(411): n is a, c, g, or t
  misc_feature (413)..(413): n is a, c, g, or t
  misc_feature (415)..(416): n is a, c, g, or t
  misc_feature (419)..(419): n is a, c, g, or t
  misc_feature (421)..(421): n is a, c, g, or t
  misc_feature (423)..(424): n is a, c, g, or t
  misc_feature (426)..(430): n is a, c, g, or t
  misc_feature (432)..(435): n is a, c, g, or t
  misc_feature (437)..(440): n is a, c, g, or t
  misc_feature (443)..(446): n is a, c, g, or t
  misc_feature (451)..(452): n is a, c, g, or t
  misc_feature (455)..(460): n is a, c, g, or t
  misc_feature (464)..(474): n is a, c, g, or t
  misc_feature (476)..(481): n is a, c, g, or t
  misc_feature (485)..(494): n is a, c, g, or t
  misc_feature (496)..(499): n is a, c, g, or t
  misc_feature (501)..(504): n is a, c, g, or t
  misc_feature (507)..(512): n is a, c, g, or t
  misc_feature (514)..(530): n is a, c, g, or t
  misc_feature (532)..(536): n is a, c, g, or t
  misc_feature (538)..(538): n is a, c, g, or t
  misc_feature (541)..(542): n is a, c, g, or t
  misc_feature (545)..(545): n is a, c, g, or t
  misc_feature (547)..(548): n is a, c, g, or t
  misc_feature (550)..(550): n is a, c, g, or t
  misc_feature (554)..(555): n is a, c, g, or t
  misc_feature (557)..(564): n is a, c, g, or t
  misc_feature (567)..(567): n is a, c, g, or t
  misc_feature (570)..(575): n is a, c, g, or t
  misc_feature (577)..(577): n is a, c, g, or t
  misc_feature (579)..(579): n is a, c, g, or t
  misc_feature (581)..(582): n is a, c, g, or t
  misc_feature (584)..(584): n is a, c, g, or t
  misc_feature (586)..(589): n is a, c, g, or t
  misc_feature (591)..(592): n is a, c, g, or t
  misc_feature (594)..(594): n is a, c, g, or t
  misc_feature (596)..(601): n is a, c, g, or t
  misc_feature (604)..(604): n is a, c, g, or t
  misc_feature (606)..(607): n is a, c, g, or t
  misc_feature (609)..(610): n is a, c, g, or t
  misc_feature (613)..(614): n is a, c, g, or t
  misc_feature (616)..(623): n is a, c, g, or t
  misc_feature (625)..(625): n is a, c, g, or t
  misc_feature (629)..(638): n is a, c, g, or t
  misc_feature (642)..(644): n is a, c, g, or t
  misc_feature (646)..(646): n is a, c, g, or t
  misc_feature (649)..(651): n is a, c, g, or t
  misc_feature (653)..(656): n is a, c, g, or t
  misc_feature (658)..(658): n is a, c, g, or t
  misc_feature (660)..(660): n is a, c, g, or t
  misc_feature (662)..(665): n is a, c, g, or t
  misc_feature (669)..(671): n is a, c, g, or t
  misc_feature (673)..(675): n is a, c, g, or t
  misc_feature (677)..(679): n is a, c, g, or t
  misc_feature (681)..(685): n is a, c, g, or t
  misc_feature (689)..(690): n is a, c, g, or t
  misc_feature (693)..(693): n is a, c, g, or t
  misc_feature (695)..(703): n is a, c, g, or t
  misc_feature (705)..(707): n is a, c, g, or t
  misc_feature (709)..(710): n is a, c, g, or t
  misc_feature (712)..(712): n is a, c, g, or t
  misc_feature (714)..(718): n is a, c, g, or t
  misc_feature (720)..(721): n is a, c, g, or t
  misc_feature (723)..(723): n is a, c, g, or t
  misc_feature (725)..(726): n is a, c, g, or t
  misc_feature (729)..(729): n is a, c, g, or t
  misc_feature (731)..(732): n is a, c, g, or t
  misc_feature (734)..(734): n is a, c, g, or t
  misc_feature (736)..(737): n is a, c, g, or t
  misc_feature (739)..(740): n is a, c, g, or t
  misc_feature (743)..(749): n is a, c, g, or t
  misc_feature (751)..(751): n is a, c, g, or t
  misc_feature (753)..(755): n is a, c, g, or t
  misc_feature (757)..(757): n is a, c, g, or t
  misc_feature (769)..(769): n is a, c, g, or t
  misc_feature (3506)..(3506): n is a, c, g, or t
nnnncnntnnnnnnnnannnncnnnnntntnnnnncggnnnnnnnnngcnntnnnntnttngnnntnnnnnnannnnnnnnnntnaanntcntnnngcnnnacnnnnntntcgtgnnnnncgncnntnntnnnnnntnnnnntnnntnnnnnnncngacngnnnnnnnnntnnnctnnnnnnncttnntnnnnnnngnnnnnnnnanncngacngnnatgnnnccnntnncnnnnanncnnacnnnnnnnnnnntnannnnnnanncngnnncnnnnnnnnnnnctnnanncnnnnnanaaantnncttnntnnnnctntnnannngnananngannttnntnngnnncnnnannatcnnnnnnntnannnnancantnnnnannnnnannnnntnnnntncntnnannnnangnngtnangnnannnnntnnnncnnnnaannnnaaaannaannnnnntttnnnnnnnnnnnannnnnnacannnnnnnnnntnnnngnnnngannnnnnannnnnnnnnnnnnnnnnannnnntnaannacngnntnattnnannnnnnnncanaannnnnnanangnntntnnnncnnanannnnnncantnnanntgnncnnnnnnnngntagnnnnnnnnnnctcnnncntcnnnannnnanantnnnnaaannncnnngnnntnnnnnaaannatntnnnnnnnnntnnnanngnannnnntnnantnntgnanncncnnannacnnnnnnntntnnntnctcctccttccngaaggaggagatttaagatactattgactttttagtcagccccattcaagatactattgactatcatttaattcaaaacagtgtggaaagaaagctaaaactggaaataaataaacggctgaatctccgaactcttcatctgaatgaccagataaatcagagccaccatcagcagagctttccctaagaacggcaagcgaataactccacggcaagcagcattttcccaactatccggagtgaaatgaagcagaaagccgagcagcatcaaagcaaacacgcgccagtagccttcgatcaactgcgggaaaagctgcggacggaaagtggtgaatatctgtctcaacatatccatcgagttctgaaaatcggcattacggaagaatatccagcagaaacagacaaagtggaaagtgataatgactccgaatacacgacgccagccatgactttgttctcctttcttacgacctatgatggacatccacatcttatgcaccgccaaagcgatgccgtgaaatgttccccaaagtacaaagttccaggaagctccgtgccacaatccacccagaaacatggtaataatcagattcagatactggcggaacttacctttccggtttcctcccaaggatatgtacaagtaatcgcgcaaccaactggacaatgagatatgccaacgccgccaaaattcagtaatggaggcggacttataaggagaattaaagttgagattaaaatgaaagcccaacagcagagcgataccgatagccatatcgctatatccggagaagtcacagtaaatctgcaaagcatacccgtatactcccatcagattctcgagaccggaataaagggtcggattatcaaagatacgctccacgaagttgacactgatataatcggaaatgattgctttcttgaacaaaccggagagaataaggaaaatcccccgcccgaacatctcctgagaaacgaaaagcggtttccggatttgcggaataaagtcacgggcacgcacaatcggtccggccaccagctgcggaaagaaggatacataaaacgcgtaatccagtatgttggtcaatggcttgatgtctttccggtaaacgtcaatggtatagcttaatgactggaaagtgaagaatgagatacctacgggcaggaatatatcaagcgccgtaaattctcctcccatcaacgaggcaatcactcctcccaaaaaattggtatatttgaagtaagcaagaagtcccagattgactcccaaactcagagtcaccaaccctttgcgtttccagcgtccttcggtacggtccatccattgcgccagcaggaagtcgcaaaccgtgaccagcgccagcaggaaaaagtaagtgccgctgctcttataataaaagtaataagagaaaagcgtcacaaacagaatacgggccgtatacttacgctgcaacaaggtgtatacgatcataaaggcggcaaacagccaaaggaagataccactgctgaatatcatcggtgcctgcggatcgtaggtaagcacctcttttaaccggctgaaatcaatatcaatgggaaacataatcgttataagcttgaataatggcttggtataataaatttccttgcaggatatatccctcaggtaaataatgcacatgatcgggacgcatcagtttcgcttccgtccagttggtacaggcacggcgcttgccccctactacatcgtacatatcccacacgagcagacgatgatctttggcataacggcgaattgtttctgccgctgtaaccgtccggggattgatggcgtacgtacgtttccgccgcctttgccggaaactttcgtaagaacccggaggcgtggtgagaagaatagggacatcgggaaggctgtcgcgcaacagtttgacaagttcgtccatctgattataatgcaggttgacgttataccgccggttatggctttcgttggttccgaaggacagaatcagcagttccggcttcatggctgcaatatcggcaatacgtcccggatgggtaaacgtcagacaggtagccccgttcacccccatatcggtataagagacagcaccaaaggtttctttcagcagcgttcccgtagtctgcggatagatgtgcccgcgtacgtgactgtctccgatatggagaatacgcaccgtatcttcggaaagtccggcacgtacctgacggagacgttcaaatacgggtgtcagcagggcaatgctgtcgattatctcattccttccggtttcgcggaaagcggaaggaaaagaagtctgcacggcgatggtatcattcgcccagttcatttcccgcaaaggttttatcattttcaaggtcttccccagtggaggacaggcagggatacggtcttgcgcctttcctgccgaaagaagaaagaatgttcccatcagtcccaagataaagcccagcaacaggttattcttgctcataagcacgcctcctgtcatattgttccttaccatatatcaatgtttcatagagcagtcctgccagatgtttgcctccccggaagttgatatgagtataatcgtagttcgccatcgaaggtttggcgtgtacgaggttcgccatactgccttcgcctcccatcgcttcaaacatattccagaaagcgataccgctttcggcagcaatgttctgctgatagcgaatcagattcttgactcccggcatggtacgaagttcaccntcttctgtcttataatcacggtcgccgacgcttaacagcaaaatactcgcctgtggaaaacaattcttcagatgttcgatagaagtgagcagtcccttctgataattatcataattgcgtccccgttcggtagccacattcaatccgtattcaagaataatcagatcataaggacgctgctcgttaaactgacgcagcatttgttgcggaatcccccgcaacgataagccggaactgcctcgcaaggagaaattatcaagaatgattcctttcttaccatccatcgccaagccatagaacaacgtagaatcggcacgatctaccgtccaccggacagagccgatgcgtccttcaacggaaatcttctgcaaatcgcccgaaggcgctaaggaataattcttactctccccccgattcacacgggcagtaagatgaacggaatctttattatagaagaaaatcgaagcctgctgacaggtatcaagcagcgaagc

SEQ ID NO: 811 - DNA, 4000 bp, Escherichia coli
  misc_feature (1989)..(1989): n is a, c, g, or t
  misc_feature (3173)..(3173): n is a, c, g, or t
  misc_feature (3175)..(3178): n is a, c, g, or t
  misc_feature (3185)..(3186): n is a, c, g, or t
  misc_feature (3188)..(3192): n is a, c, g, or t
  misc_feature (3194)..(3194): n is a, c, g, or t
  misc_feature (3197)..(3198): n is a, c, g, or t
  misc_feature (3200)..(3202): n is a, c, g, or t
  misc_feature (3204)..(3204): n is a, c, g, or t
  misc_feature (3206)..(3206): n is a, c, g, or t
  misc_feature (3208)..(3208): n is a, c, g, or t
  misc_feature (3212)..(3214): n is a, c, g, or t
  misc_feature (3216)..(3216): n is a, c, g, or t
  misc_feature (3218)..(3219): n is a, c, g, or t
  misc_feature (3224)..(3224): n is a, c, g, or t
  misc_feature (3227)..(3230): n is a, c, g, or t
  misc_feature (3232)..(3233): n is a, c, g, or t
  misc_feature (3235)..(3235): n is a, c, g, or t
  misc_feature (3241)..(3241): n is a, c, g, or t
  misc_feature (3243)..(3245): n is a, c, g, or t
  misc_feature (3247)..(3247): n is a, c, g, or t
  misc_feature (3254)..(3254): n is a, c, g, or t
  misc_feature (3257)..(3258): n is a, c, g, or t
  misc_feature (3261)..(3261): n is a, c, g, or t
  misc_feature (3263)..(3265): n is a, c, g, or t
  misc_feature (3713)..(3713): n is a, c, g, or t
  misc_feature (3779)..(3781): n is a, c, g, or t
  misc_feature (3783)..(3788): n is a, c, g, or t
  misc_feature (3791)..(3792): n is a, c, g, or t
  misc_feature (3794)..(3807): n is a, c, g, or t
  misc_feature (3809)..(3809): n is a, c, g, or t
  misc_feature (3811)..(3814): n is a, c, g, or t
  misc_feature (3816)..(3816): n is a, c, g, or t
  misc_feature (3818)..(3818): n is a, c, g, or t
  misc_feature (3820)..(3820): n is a, c, g, or t
  misc_feature (3822)..(3828): n is a, c, g, or t
  misc_feature (3830)..(3836): n is a, c, g, or t
  misc_feature (3839)..(3841): n is a, c, g, or t
  misc_feature (3843)..(3843): n is a, c, g, or t
  misc_feature (3845)..(3845): n is a, c, g, or t
  misc_feature (3847)..(3847): n is a, c, g, or t
  misc_feature (3849)..(3852): n is a, c, g, or t
  misc_feature (3854)..(3854): n is a, c, g, or t
  misc_feature (3857)..(3862): n is a, c, g, or t
  misc_feature (3865)..(3873): n is a, c, g, or t
  misc_feature (3875)..(3876): n is a, c, g, or t
  misc_feature (3878)..(3880): n is a, c, g, or t
  misc_feature (3882)..(3882): n is a, c, g, or t
  misc_feature (3885)..(3889): n is a, c, g, or t
  misc_feature (3893)..(3902): n is a, c, g, or t
  misc_feature (3904)..(3904): n is a, c, g, or t
  misc_feature (3906)..(3906): n is a, c, g, or t
  misc_feature (3908)..(3911): n is a, c, g, or t
  misc_feature (3914)..(3918): n is a, c, g, or t
  misc_feature (3920)..(3921): n is a, c, g, or t
  misc_feature (3923)..(3924): n is a, c, g, or t
  misc_feature (3926)..(3937): n is a, c, g, or t
ctggtagaggtccatggccttggttttgcgcagcaggtggcagtggatgttctgcgggatcgaacggcagtgagcacgggcggattcggcagcttgcttgagcacggcggcgaccgtgtcggcggacagttcggcagggcgcccgcggtgcagactgtagaacaccggcctggtcgcggggagtttggtgatgttcgggtggaactcgtcgaggtagacgtgcaggtgctcgacggttttcgcggtgagcggtacgacgcgggtcttgttgcccttgccggtgagcaggatgtgcccgggttcggtcaggcagagatcctgcagagtcaggccagtgatctcgcccacgcgagccgcggtgtcgtagagaagaatgagtagcatccggttcctgcgagatttcgctgtttgcccggtgaatgcggcaaggatcgcccgggtttgagtttcggtgaggtactcgatgggcctgcggggaccagtcggcgctttgagtgctttggctgattggctgagcgcgacgagcgtgaggtcttcgtaggccgcgtaggtcaggaacgctttgacggcgctcaggcgcaacgtgacggtcttgggcgtgtagcgccgctgatcggtcatccaggtcagccatcccttgaggtgctggcgttcgaagtgatcgaagctgacgtgctcacgtccgatgtcctcggcctcggtgaggtagtccaggaagcactccaggctgatccgatatgcctcaatggttttcggtgacagccctctggtcttgggcatgtaggcgtgcagataatcgcgggcgaacccgaagaagtccggtgcgccggtatgtgggtcgcgtctcatcagaatcccacctgcggtagcaggctctggcgttgccgggtgatgtcggcataggtggccatgaaatcgggcgaggtgtgcacgtagtagtacgtgctgtcaaaggttgcgtgacccatgtaacgagacaggtagggcagcatcgcggtgacgtcgtcgccggcggtcatccatcggtggatgttggcgtaggcgaagtgatgtcggaaatcgtagggtcgtggctgctggccggccacgggccgaggcagcccggcctggtcccagatgcggccgaatatcttcccgactgttgccgtgctgacctggttgccggtagcggagacgaagaacgtgcggcgcgaggcgaaatgcgctcgcgaggttcggtcgcacgtgtcgaggatctcgatgacctgatcagtcagcggcagcctgcggctgcgatgtcctttggaccagatgatgtcgatgtgcccggcatcgaggtcgacctgaccggtctgcagggcgcgggtttcaccggtccgcaacccgcatgagtgcatcagggtgaagaacgcgatcgcctgccagcgccacgggcatggcgtctgaatctgtgcggcggcggcgaagaacaactcgatctcatgccgggacaacagatagggatgggcggcaacgatcggggctttccaccgatcagagagcacataagcgtcggggatcccgttcattgtcatccagcggccgacgtcacggatgtaggacatccaggaccggtaacggccacaacgttgcagctgaacaccgacccagccttcaacggtgtccttgtcgaacaccgtgcggtcatgggcggcgcagtaggcgtcgaactgtttcaggtaccagatgcgggaggcaccagtgaatcccatgttcgccttgaacgccaggtaggcatccaactcggtggcgaaagcgctggtgaagccgtggccactcatgaccgcacggcttctgggaccggcaggacacagtcgagcagacgtagccggtcgacgctcatgtagaggttcgtcgattcttcgctggcgtggccgagcactgctgagatcgtcggcagcgggaccgccgcggccagcagccgggatgcggcgttgtggcgcagcagccgggttcccgccttcacctcgntgactcccgctttccggaatgtctcaacggtcacccggtgcaccgtcgcgtgatcgcccagccgggtgtgtggggctaccgaacgcaggaataggtgatcatcgccggagctgggacgctcgtcgagaacataggaggccagcttgcccagcagcaaggccggcaatggcagcgtcagcgggttgcccgtcttctgctgcacgatcccgatcgtgttcccacgccagtcgacatcacccatccgcagcgccacgatgtcacaggcccgcaatcccgtcgataatgcgagcaaggtgatcgcggcgtcccgcgcgctgaccacccccgacgcacaggcccgaacaacccgttcctcgtcgccatcgccaagaacggggactatcgcgtgaaagcgtttgatgccagccagattcaacgcattgaccaaatcagcgcggccggtgaacttgaggaacggacgaaagttcgacaccacccaaaacagcgacgacctggcccaccggtccagcagggattccaaaaacgccaggacactggcgccatccgcctcgtccagcactgcgataccgtgtccttccaggaacaccaggtagctacgcgccaccctcccataggcctcgcgggtggccggtgccagaccgcgccggcccatctcggcctcccacacggcgtccagcgcaacgaagtcgctgccctcggtccgtggacctccgccgccgcggccacgaaccgccaggtccacccgcccggtctgcacatacgagtcgaacaccgtaacaagacgccggtaatcgaaccgacgctgcgcgctgaaccggccggtgcgcacgctggtcgtcatcgaggcgaactccgcacccagactggtggaatacccacgccccgaggcgaactcagtcagcgccttgatcgacttcgcgtactgaccaaccgtcgattccatgtagccagccgcccgcaactccgccacgacaaccgcgccgatcccactgaccgtcgtatccatgaccgtctccttccacagacgtacagatacgacggacgctaaccaccacccgaaacgttaagccgagaaatccgccagcaacccccacgagcacaggccatctccgcaaatcctcggcttaacgaaaatctcggcataatcagcgttaagccggattcggcttaacgctgatcgcggntnnnnctacacnncnnnnnanttnncnnnantngnccgnnngncnnggggntgnnnngnngntgggcngnnncnggtctcnttnnganannnccgcctcggaggcgttcttctccaccctcgagaatgagatgctgtcccggcatcatttccgcacccgcgccgaggcccgcgctgtcgtcgtccgctggtgccaggacttctacaacgtcaaacgacgccacagctcggcggcgttactggctccggacgagtacgagagaatcgctgccatccagccggacgcagcttaaatgaagcctccacgatttcagggaaacacagaccctcatatgtggtctctttcgagtcaagcggggcacgcccgtaggcgtagcgccgtcacggcatcgcctcggcccacgctacgtggccctcgaagccaagtgatgcgttgatcgctgcgcaggattgcgcctgcatcaggggcggccgatcacttcgtcggcggccagtgcggacagctcgtcggcggacagcccgagttcggtgagcacctcgncggtgtgctgaccgagctcgggagcagggccccgtagggcgacgtcggcaccggcgatcgagagcnnngnnnnnntgnnannnnnnnnnnnnnncngnnnntngngngnnnnnnncnnnnnnntcnnntncncntnnnngncgnnnnnnaannnnnnnnntnncnnngncgnnnnncagnnnnnnnnnngngngnnnngcnnnnngnncnncnnnnnnnnnnnntgtgccggcataatcgattttacacacgagttgggaggtgcgttgtggcgcgaaagcggaagc

SEQ ID NO: 812 - DNA, 4000 bp, Escherichia coli
  misc_feature (12)..(12): n is a, c, g, or t
  misc_feature (72)..(72): n is a, c, g, or t
  misc_feature (138)..(138): n is a, c, g, or t
  misc_feature (150)..(150): n is a, c, g, or t
  misc_feature (195)..(195): n is a, c, g, or t
  misc_feature (199)..(199): n is a, c, g, or t
  misc_feature (823)..(823): n is a, c, g, or t
  misc_feature (988)..(988): n is a, c, g, or t
  misc_feature (1013)..(1013): n is a, c, g, or t
  misc_feature (1073)..(1073): n is a, c, g, or t
  misc_feature (1166)..(1166): n is a, c, g, or t
  misc_feature (1256)..(1256): n is a, c, g, or t
  misc_feature (1322)..(1322): n is a, c, g, or t
  misc_feature (1621)..(1621): n is a, c, g, or t
  misc_feature (1990)..(1990): n is a, c, g, or t
aggctgataacngcattataaaacttgcttactgcatcgctgtaagctggaaaatctattgcgtagcaatgntttttcaaagtgcttgtaccctttgtattttgctttgtaagccatttggagaggtcggaataatcngccaacaatatntgaagctgttgcaccaactcggcttctgtggtgggttctttgctncctnccttttttattttctcgttgatggcttttgtgcctttggcatcaaaagtccagggcataagttctttgaacaaaatgctattcaatatttttatttccattataagccgatatttattttgttagctgctactgttttcttttcatcaattacattagcataaatctgtgttgtttttaaatgcctgtgtccaagcaactttgatactgtgaaaatatcagtacctaaagtaagctgcaatgtggcgtatgtgtgccttgcacagtggaaagtgatgtgcttttcaatacctgcctttatcatccatctgtacaaatcagcattgcgactatcggagtaaatcaaatcaggaaataccgggtcggctggctttcctttttctcctaataaattataggcttcatcagatatgggcaatgtttcagatccttttgttttttgctgtacgaaacggatgtaatgccctaactcggtagactgttgcatttcactccatttcaatttctgaatatcgctaaaacgcaagcctgtaagacaagcaaaaataaaagcccttttcatcaactcgtttttacattcggttttggctaaggtctttaattcatcaagggttaaaaactctcntactggttcgccttgtggcaagccttccaccatttcggcagggttggtttttagtatgccatccctcacagcttgtttgagtgctgctctgaacttattgaagtaactgtatttggtattggttgaaattgcctttttggttttggtactggcttctttcaacangtaatccctgaagccatcaacaaangctttattgatttggttaaattgtatatctcttgggcaatactttttcaagtgctttatngtactatcccaattgccataatttcctttgctgtcttttctcttttcagccaatgcctccatatacataatgaagtacgtttttagcttctcnttatcgtggaaatcataagtgctgttttgtatctccaaatgccttttactgcggatggtttcggctaatgccaatatctttttattctcntcttttactgcattggtgagcttccctttttcggggtcgggtgttaggtacaaattcaaatactcntattggcgtttgccattggagtagtactctaaataaaggcttattttatcgcctttgagccgttgtcttaatgttactttcattttcttatcagttaaataaattatcaattgaagcccttttgatgatggtacgactgcccagctttgccaccggcaaacgattactttttatcatcctttgaatggtccatctgcttgcacccaaaagggtagcaacttccagtatgcttaaaaattctttctctcttaaattagtgtgattacctgctatcgggttggatagggtttcagtagcanctactggagaagcggaaacaattttgctttgttggttcttaaattctgcgtttactttttcttctcgtttggttttcttgtaggctgcactgttgcatttatggccacaatacttcgttgtggtcttttgggctatgaaagccttaccacaatgattacagaatttaggaagtttaattgtactactcatttgttgctacttgttgcagtatgttgctgggtggtgctacttggtgcattatttcgcctgacttccatcaaactgatatgtgggcaacaaaatagccaattgggcaacaactgggcaacaaatataagtaaaaaagtagagttgggcaacaaaaaagagaaagaaaagtgtactgaaantcaacaaaaacaggcacttaacaaacaaaagaaagtaaattactttccgatacaaaacttcccaaatatagtccccagtatatctctgtccacttccacctgtcctgttatttctcccaaataatgtagggcacgcctaatgtcaatggtcagcaaatcgccactcaggttttgtttcatcccggcttctactgcctgcaaactttcctgtattttcttcagcgcttcgtggtgtcgagcattggtaacaattgttgcttcggtttgtaccgattctccaatggctttttcataaagcatttgtttcagttcttgcatcccaaatccggttttggcatctatggccggtgataggggatcagcaagtatgccctgctcctccatttgtttttgccagggatgacacttattatacactgtcattgttttcttttcaaaatcgttcagccagttaaatttttcctccccttcctcattcatcatatccaccacgtgcaaaataatatcggctttgaccgcatttgctttgctgcgttctattcctttattctctatcacatcggcactatgttctctaattccggcggtatcaatcagcctaaacaacacgccattaatgtttagggtttcttcaatcgtgtcgcgtgtggtgcctgcaatgtcgctcacaatagcccgttcttcattcagcaaagcattgagcagcgtagatttcccggcattgggtttaccaataatggccacactcaccccgttttttatcacattacccagttgaaaggaatccaataaattttgaatcttaaatgttaaattcttaataaacgcactaaacttttccctatcggcaaactccacatcctcgtcgctaaaatccagttccagctctatcaaagccgcaaagtggatgagctcatcacgcagcacgttcaggtcgttcgaaaacccgccacgcaattggttcagggcggtttgctgagccgctttgctgttggcggctatcaaatcggccacggcttctgcctgtgtcaggtccagttttccgttcaaaaaagcacgcagtgtaaactcgccaggctgtgccagccttgccccacaagcaatacagacttcgatcattttttcaagaatatagggtgagccatgtccgcttatctccaccacatcctccccagtatagctttttggatttttaaaaagagtagccaccacttcatctatctgttctccattaaaaacaatatgcccaaaatgagcagtatggctggcctgactcgccagtttctttcccttaaaaaccatatcagcaatgcccattgcatcctttccgctaagtcggattacaccaatggcacccactcccggcggtgtagccaacgccacaatagtatcctgcaaatccgtaagtctgttcatgaggtaaaaatagacaaatgttttattgccccagccaataacaaatggcatcagccttgcatcgctctcttgtactgtagtacatagctcagctcattaaaacgctaccaacccattatcaaaaaaaacgaccatcaaacaaaactatatttgcagtatgactttctactactgttacgatgcccactgcggatggtgctatggattcagcaagtccgttacccaatttcaggaacaatatggttcgcgttttcattttgaagtgcttagtggcggtatgattccaaaggaatttgcccgccccatcaaagctactgctcgatttattttggaagaacatacgcgggtagaagaactaagcggtgccctctttggccccgattttttgtggcatattcaaaaccctgatgatagcgactggtttcccgaatcgcttactccggccattgccctttgtgtttttaaggactttgtaccacaacaacaggtgcaggtagccgccgatattcaaaaagcccagtttgccgaaggtcgcgatctgagcgatggagaagcctatcgtcatctgctggcaaaataccatattccggaaga

SEQ ID NO: 813 - DNA, 4000 bp, Escherichia coli
  misc_feature (1)..(5): n is a, c, g, or t
  misc_feature (7)..(7): n is a, c, g, or t
  misc_feature (9)..(11): n is a, c, g, or t
  misc_feature (13)..(18): n is a, c, g, or t
  misc_feature (21)..(25): n is a, c, g, or t
  misc_feature (30)..(30): n is a, c, g, or t
  misc_feature (32)..(33): n is a, c, g, or t
  misc_feature (35)..(40): n is a, c, g, or t
  misc_feature (43)..(44): n is a, c, g, or t
  misc_feature (49)..(52): n is a, c, g, or t
  misc_feature (54)..(59): n is a, c, g, or t
  misc_feature (63)..(72): n is a, c, g, or t
  misc_feature (74)..(79): n is a, c, g, or t
  misc_feature (82)..(82): n is a, c, g, or t
  misc_feature (85)..(98): n is a, c, g, or t
  misc_feature (100)..(101): n is a, c, g, or t
  misc_feature (104)..(104): n is a, c, g, or t
  misc_feature (108)..(109): n is a, c, g, or t
  misc_feature (112)..(112): n is a, c, g, or t
  misc_feature (114)..(120): n is a, c, g, or t
  misc_feature (123)..(124): n is a, c, g, or t
  misc_feature (126)..(126): n is a, c, g, or t
  misc_feature (128)..(132): n is a, c, g, or t
  misc_feature (134)..(134): n is a, c, g, or t
  misc_feature (136)..(138): n is a, c, g, or t
  misc_feature (140)..(146): n is a, c, g, or t
  misc_feature (149)..(150): n is a, c, g, or t
  misc_feature (153)..(153): n is a, c, g, or t
  misc_feature (155)..(155): n is a, c, g, or t
  misc_feature (157)..(160): n is a, c, g, or t
  misc_feature (163)..(163): n is a, c, g, or t
  misc_feature (166)..(166): n is a, c, g, or t
  misc_feature (168)..(169): n is a, c, g, or t
  misc_feature (171)..(173): n is a, c, g, or t
  misc_feature (176)..(178): n is a, c, g, or t
  misc_feature (180)..(181): n is a, c, g, or t
  misc_feature (183)..(183): n is a, c, g, or t
  misc_feature (185)..(185): n is a, c, g, or t
  misc_feature (187)..(187): n is a, c, g, or t
  misc_feature (190)..(191): n is a, c, g, or t
  misc_feature (193)..(195): n is a, c, g, or t
  misc_feature (197)..(198): n is a, c, g, or t
  misc_feature (201)..(203): n is a, c, g, or t
  misc_feature (206)..(211): n is a, c, g, or t
  misc_feature (213)..(217): n is a, c, g, or t
  misc_feature (221)..(221): n is a, c, g, or t
  misc_feature (224)..(227): n is a, c, g, or t
  misc_feature (229)..(231): n is a, c, g, or t
  misc_feature (233)..(233): n is a, c, g, or t
  misc_feature (235)..(237): n is a, c, g, or t
  misc_feature (239)..(243): n is a, c, g, or t
  misc_feature (245)..(245): n is a, c, g, or t
  misc_feature (247)..(251): n is a, c, g, or t
  misc_feature (254)..(261): n is a, c, g, or t
  misc_feature (264)..(265): n is a, c, g, or t
  misc_feature (268)..(269): n is a, c, g, or t
  misc_feature (271)..(277): n is a, c, g, or t
  misc_feature (279)..(281): n is a, c, g, or t
  misc_feature (284)..(286): n is a, c, g, or t
  misc_feature (288)..(289): n is a, c, g, or t
  misc_feature (291)..(292): n is a, c, g, or t
  misc_feature (294)..(295): n is a, c, g, or t
  misc_feature (299)..(301): n is a, c, g, or t
  misc_feature (305)..(308): n is a, c, g, or t
  misc_feature (310)..(310): n is a, c, g, or t
  misc_feature (312)..(315): n is a, c, g, or t
  misc_feature (318)..(323): n is a, c, g, or t
  misc_feature (325)..(327): n is a, c, g, or t
  misc_feature (330)..(331): n is a, c, g, or t
  misc_feature (333)..(334): n is a, c, g, or t
  misc_feature (336)..(339): n is a, c, g, or t
  misc_feature (341)..(341): n is a, c, g, or t
  misc_feature (343)..(343): n is a, c, g, or t
  misc_feature (345)..(346): n is a, c, g, or t
  misc_feature (348)..(353): n is a, c, g, or t
  misc_feature (355)..(355): n is a, c, g, or t
  misc_feature (358)..(361): n is a, c, g, or t
  misc_feature (363)..(364): n is a, c, g, or t
  misc_feature (366)..(366): n is a, c, g, or t
  misc_feature (369)..(370): n is a, c, g, or t
  misc_feature (372)..(374): n is a, c, g, or t
  misc_feature (379)..(380): n is a, c, g, or t
  misc_feature (383)..(396): n is a, c, g, or t
  misc_feature (400)..(402): n is a, c, g, or t
  misc_feature (404)..(406): n is a, c, g, or t
  misc_feature (411)..(421): n is a, c, g, or t
  misc_feature (423)..(423): n is a, c, g, or t
  misc_feature (425)..(427): n is a, c, g, or t
  misc_feature (429)..(429): n is a, c, g, or t
  misc_feature (431)..(436): n is a, c, g, or t
  misc_feature (439)..(442): n is a, c, g, or t
  misc_feature (444)..(445): n is a, c, g, or t
  misc_feature (448)..(449): n is a, c, g, or t
  misc_feature (452)..(452): n is a, c, g, or t
  misc_feature (456)..(456): n is a, c, g, or t
  misc_feature (458)..(461): n is a, c, g, or t
  misc_feature (464)..(466): n is a, c, g, or t
  misc_feature (468)..(468): n is a, c, g, or t
  misc_feature (471)..(472): n is a, c, g, or t
  misc_feature (474)..(475): n is a, c, g, or t
  misc_feature (477)..(481): n is a, c, g, or t
  misc_feature (483)..(486): n is a, c, g, or t
  misc_feature (488)..(490): n is a, c, g, or t
  misc_feature (492)..(493): n is a, c, g, or t
  misc_feature (495)..(497): n is a, c, g, or t
  misc_feature (501)..(502): n is a, c, g, or t
  misc_feature (505)..(507): n is a, c, g, or t
  misc_feature (511)..(511): n is a, c, g, or t
  misc_feature (513)..(513): n is a, c, g, or t
  misc_feature (520)..(520): n is a, c, g, or t
  misc_feature (523)..(524): n is a, c, g, or t
  misc_feature (527)..(527): n is a, c, g, or t
  misc_feature (529)..(529): n is a, c, g, or t
  misc_feature (531)..(531): n is a, c, g, or t
  misc_feature (534)..(534): n is a, c, g, or t
  misc_feature (536)..(537): n is a, c, g, or t
  misc_feature (539)..(541): n is a, c, g, or t
  misc_feature (545)..(546): n is a, c, g, or t
  misc_feature (548)..(550): n is a, c, g, or t
  misc_feature (552)..(552): n is a, c, g, or t
  misc_feature (554)..(555): n is a, c, g, or t
  misc_feature (557)..(557): n is a, c, g, or t
  misc_feature (559)..(561): n is a, c, g, or t
  misc_feature (565)..(568): n is a, c, g, or t
  misc_feature (570)..(574): n is a, c, g, or t
  misc_feature (576)..(579): n is a, c, g, or t
  misc_feature (582)..(582): n is a, c, g, or t
  misc_feature (586)..(592): n is a, c, g, or t
  misc_feature (594)..(598): n is a, c, g, or t
  misc_feature (605)..(605): n is a, c, g, or t
  misc_feature (607)..(607): n is a, c, g, or t
  misc_feature (610)..(611): n is a, c, g, or t
  misc_feature (613)..(614): n is a, c, g, or t
  misc_feature (619)..(619): n is a, c, g, or t
  misc_feature (621)..(621): n is a, c, g, or t
  misc_feature (624)..(624): n is a, c, g, or t
  misc_feature (626)..(626): n is a, c, g, or t
  misc_feature (630)..(630): n is a, c, g, or t
  misc_feature (635)..(641): n is a, c, g, or t
  misc_feature (643)..(644): n is a, c, g, or t
  misc_feature (646)..(647): n is a, c, g, or t
  misc_feature (650)..(650): n is a, c, g, or t
  misc_feature (652)..(652): n is a, c, g, or t
  misc_feature (654)..(654): n is a, c, g, or t
  misc_feature (658)..(663): n is a, c, g, or t
  misc_feature (665)..(665): n is a, c, g, or t
  misc_feature (667)..(668): n is a, c, g, or t
  misc_feature (670)..(674): n is a, c, g, or t
  misc_feature (683)..(683): n is a, c, g, or t
  misc_feature (2186)..(2187): n is a, c, g, or t
  misc_feature (2190)..(2190): n is a, c, g, or t
  misc_feature (2193)..(2194): n is a, c, g, or t
  misc_feature (2196)..(2199): n is a, c, g, or t
  misc_feature (2201)..(2202): n is a, c, g, or t
  misc_feature (2206)..(2206): n is a, c, g, or t
  misc_feature (2209)..(2209): n is a, c, g, or t
  misc_feature (2211)..(2211): n is a, c, g, or t
  misc_feature (2215)..(2217): n is a, c, g, or t
  misc_feature (2219)..(2220): n is a, c, g, or t
  misc_feature (2222)..(2225): n is a, c, g, or t
  misc_feature (2227)..(2233): n is a, c, g, or t
  misc_feature (2236)..(2236): n is a, c, g, or t
  misc_feature (2239)..(2241): n is a, c, g, or t
  misc_feature (2243)..(2245): n is a, c, g, or t
  misc_feature (2249)..(2249): n is a, c, g, or t
  misc_feature (2252)..(2254): n is a, c, g, or t
  misc_feature (2256)..(2257): n is a, c, g, or t
  misc_feature (2259)..(2259): n is a, c, g, or t
  misc_feature (2265)..(2265): n is a, c, g, or t
  misc_feature (2267)..(2271): n is a, c, g, or t
  misc_feature (2274)..(2276): n is a, c, g, or t
  misc_feature (2282)..(2282): n is a, c, g, or t
  misc_feature (2285)..(2287): n is a, c, g, or t
  misc_feature (2289)..(2289): n is a, c, g, or t
  misc_feature (2291)..(2293): n is a, c, g, or t
  misc_feature (2296)..(2300): n is a, c, g, or t
  misc_feature (2302)..(2305): n is a, c, g, or t
  misc_feature (2307)..(2309): n is a, c, g, or t
  misc_feature (2311)..(2311): n is a, c, g, or t
  misc_feature (2314)..(2315): n is a, c, g, or t
  misc_feature (2317)..(2317): n is a, c, g, or t
  misc_feature (2321)..(2323): n is a, c, g, or t
  misc_feature (2325)..(2329): n is a, c, g, or t
  misc_feature (2331)..(2336): n is a, c, g, or t
  misc_feature (2338)..(2338): n is a, c, g, or t
  misc_feature (2341)..(2343): n is a, c, g, or t
  misc_feature (2345)..(2350): n is a, c, g, or t
  misc_feature (2352)..(2355): n is a, c, g, or t
  misc_feature (2358)..(2360): n is a, c, g, or t
  misc_feature (2362)..(2362): n is a, c, g, or t
  misc_feature (2366)..(2366): n is a, c, g, or t
  misc_feature (2368)..(2369): n is a, c, g, or t
  misc_feature (2374)..(2374): n is a, c, g, or t
  misc_feature (2376)..(2377): n is a, c, g, or t
  misc_feature (2380)..(2382): n is a, c, g, or t
  misc_feature (2384)..(2386): n is a, c, g, or t
  misc_feature (2389)..(2389): n is a, c, g, or t
  misc_feature (2391)..(2396): n is a, c, g, or t
  misc_feature (2398)..(2399): n is a, c, g, or t
  misc_feature (2401)..(2402): n is a, c, g, or t
  misc_feature (2404)..(2411): n is a, c, g, or t
  misc_feature (2413)..(2414): n is a, c, g, or t
  misc_feature (2417)..(2421): n is a, c, g, or t
  misc_feature (2424)..(2427): n is a, c, g, or t
  misc_feature (2431)..(2432): n is a, c, g, or t
  misc_feature (2436)..(2437): n is a, c, g, or t
  misc_feature (2439)..(2441): n is a, c, g, or t
  misc_feature (2443)..(2443): n is a, c, g, or t
  misc_feature (2445)..(2445): n is a, c, g, or t
  misc_feature (2447)..(2455): n is a, c, g, or t
  misc_feature (2459)..(2459): n is a, c, g, or t
  misc_feature (2463)..(2466): n is a, c, g, or t
  misc_feature (2469)..(2470): n is a, c, g, or t
  misc_feature (2472)..(2472): n is a, c, g, or t
  misc_feature (2475)..(2475): n is a, c, g, or t
  misc_feature (2477)..(2477): n is a, c, g, or t
  misc_feature (2479)..(2479): n is a, c, g, or t
  misc_feature (2481)..(2481): n is a, c, g, or t
  misc_feature (2483)..(2488): n is a, c, g, or t
  misc_feature (2492)..(2497): n is a, c, g, or t
  misc_feature (2499)..(2499): n is a, c, g, or t
  misc_feature (2503)..(2503): n is a, c, g, or t
  misc_feature (2507)..(2510): n is a, c, g, or t
  misc_feature (2512)..(2520): n is a, c, g, or t
  misc_feature (2522)..(2522): n is a, c, g, or t
  misc_feature (2524)..(2528): n is a, c, g, or t
  misc_feature (2530)..(2530): n is a, c, g, or t
  misc_feature (2532)..(2532): n is a, c, g, or t
  misc_feature (2534)..(2535): n is a, c, g, or t
  misc_feature (2538)..(2538): n is a, c, g, or t
  misc_feature (2542)..(2545): n is a, c, g, or t
  misc_feature (2547)..(2553): n is a, c, g, or t
  misc_feature (2556)..(2561): n is a, c, g, or t
  misc_feature (2563)..(2563): n is a, c, g, or t
  misc_feature (2565)..(2566): n is a, c, g, or t
  misc_feature (2570)..(2573): n is a, c, g, or t
  misc_feature (2575)..(2581): n is a, c, g, or t
  misc_feature (2583)..(2584): n is a, c, g, or t
  misc_feature (2586)..(2605): n is a, c, g, or t
  misc_feature (2607)..(2617): n is a, c, g, or t
  misc_feature (2619)..(2619): n is a, c, g, or t
  misc_feature (2623)..(2633): n is a, c, g, or t
  misc_feature (2635)..(2635): n is a, c, g, or t
  misc_feature (2638)..(2641): n is a, c, g, or t
  misc_feature (2648)..(2652): n is a, c, g, or t
  misc_feature (2655)..(2655): n is a, c, g, or t
  misc_feature (2657)..(2657): n is a, c, g, or t
  misc_feature (2659)..(2660): n is a, c, g, or t
  misc_feature (2667)..(2668): n is a, c, g, or t
  misc_feature (2670)..(2670): n is a, c, g, or t
  misc_feature (2672)..(2672): n is a, c, g, or t
  misc_feature (2676)..(2679): n is a, c, g, or t
  misc_feature (2683)..(2686): n is a, c, g, or t
  misc_feature (2688)..(2688): n is a, c, g, or t
  misc_feature (2691)..(2693): n is a, c, g, or t
  misc_feature (2695)..(2703): n is a, c, g, or t
  misc_feature (2705)..(2708): n is a, c, g, or t
  misc_feature (2710)..(2710): n is a, c, g, or t
  misc_feature (2712)..(2720): n is a, c, g, or t
  misc_feature (2723)..(2723): n is a, c, g, or t
  misc_feature (2725)..(2726): n is a, c, g, or t
  misc_feature (2730)..(2731): n is a, c, g, or t
  misc_feature (2736)..(2736): n is a, c, g, or t
  misc_feature (2738)..(2742): n is a, c, g, or t
  misc_feature (2745)..(2750): n is a, c, g, or t
  misc_feature (2752)..(2753): n is a, c, g, or t
  misc_feature (2755)..(2759): n is a, c, g, or t
  misc_feature (2762)..(2763): n is a, c, g, or t
  misc_feature (2768)..(2768): n is a, c, g, or t
  misc_feature (2771)..(2775): n is a, c, g, or t
  misc_feature (2778)..(2778): n is a, c, g, or t
  misc_feature (2780)..(2788): n is a, c, g, or t
  misc_feature (2790)..(2791): n is a, c, g, or t
  misc_feature (2793)..(2797): n is a, c, g, or t
  misc_feature (2799)..(2800): n is a, c, g, or t
  misc_feature (2802)..(2803): n is a, c, g, or t
  misc_feature (2805)..(2811): n is a, c, g, or t
  misc_feature (2814)..(2816): n is a, c, g, or t
  misc_feature (2818)..(2820): n is a, c, g, or t
  misc_feature (2822)..(2822): n is a, c, g, or t
  misc_feature (2825)..(2826): n is a, c, g, or t
  misc_feature (2829)..(2834): n is a, c, g, or t
  misc_feature (2837)..(2838): n is a, c, g, or t
  misc_feature (2840)..(2847): n is a, c, g, or t
  misc_feature (2849)..(2851): n is a, c, g, or t
  misc_feature (2853)..(2853): n is a, c, g, or t
  misc_feature (2855)..(2855): n is a, c, g, or t
  misc_feature (2857)..(2862): n is a, c, g, or t
  misc_feature (2865)..(2872): n is a, c, g, or t
  misc_feature (2874)..(2874): n is a, c, g, or t
  misc_feature (2876)..(2877): n is a, c, g, or t
  misc_feature (2879)..(2885): n is a, c, g, or t
  misc_feature (2887)..(2887): n is a, c, g, or t
  misc_feature (2890)..(2893): n is a, c, g, or t
  misc_feature (2895)..(2896): n is a, c, g, or t
  misc_feature (2900)..(2901): n is a, c, g, or t
  misc_feature (2905)..(2905): n is a, c, g, or t
  misc_feature (2907)..(2909): n is a, c, g, or t
  misc_feature (2911)..(2919): n is a, c, g, or t
  misc_feature (2923)..(2924): n is a, c, g, or t
  misc_feature (2926)..(2927): n is a, c, g, or t
  misc_feature (2929)..(2933): n is a, c, g, or t
  misc_feature (2935)..(2938): n is a, c, g, or t
  misc_feature (2940)..(2944): n is a, c, g, or t
  misc_feature (2946)..(2946): n is a, c, g, or t
  misc_feature (2948)..(2949): n is a, c, g, or t
  misc_feature (2953)..(2959): n is a, c, g, or t
  misc_feature (2961)..(2962): n is a, c, g, or t
  misc_feature (2964)..(2965): n is a, c, g, or t
  misc_feature (2967)..(2968): n is a, c, g, or t
  misc_feature (2970)..(2971): n is a, c, g, or t
  misc_feature (2973)..(2975): n is a, c, g, or t
  misc_feature (2977)..(2977): n is a, c, g, or t
  misc_feature (2979)..(2979): n is a, c, g, or t
  misc_feature (2981)..(2984): n is a, c, g, or t
  misc_feature (2989)..(2990): n is a, c, g, or t
  misc_feature (2992)..(2992): n is a, c, g, or t
  misc_feature (2996)..(2997): n is a, c, g, or t
  misc_feature (2999)..(3000): n is a, c, g, or t
  misc_feature (3002)..(3003): n is a, c, g, or t
  misc_feature (3005)..(3007): n is a, c, g, or t
  misc_feature (3011)..(3011): n is a, c, g, or t
  misc_feature (3013)..(3014): n is a, c, g, or t
  misc_feature (3016)..(3017): n is a, c, g, or t
  misc_feature (3019)..(3019): n is a, c, g, or t
  misc_feature (3021)..(3023): n is a, c, g, or t
  misc_feature (3025)..(3026): n is a, c, g, or t
  misc_feature (3029)..(3035): n is a, c, g, or t
  misc_feature (3037)..(3041): n is a, c, g, or t
  misc_feature (3045)..(3047): n is a, c, g, or t
  misc_feature (3051)..(3054): n is a, c, g, or t
  misc_feature (3057)..(3057): n is a, c, g, or t
  misc_feature (3059)..(3066): n is a, c, g, or t
  misc_feature (3071)..(3074): n is a, c, g, or t
  misc_feature (3076)..(3076): n is a, c, g, or t
  misc_feature (3078)..(3078): n is a, c, g, or t
  misc_feature (3080)..(3080): n is a, c, g, or t
  misc_feature (3082)..(3083): n is a, c, g, or t
  misc_feature (3085)..(3085): n is a, c, g, or t
  misc_feature (3090)..(3092): n is a, c, g, or t
  misc_feature (3095)..(3104): n is a, c, g, or t
  misc_feature (3106)..(3108): n is a, c, g, or t
  misc_feature (3110)..(3111): n is a, c, g, or t
  misc_feature (3116)..(3117): n is a, c, g, or t
  misc_feature (3119)..(3119): n is a, c, g, or t
  misc_feature (3121)..(3121): n is a, c, g, or t
  misc_feature (3125)..(3126): n is a, c, g, or t
  misc_feature (3128)..(3128): n is a, c, g, or t
  misc_feature (3130)..(3131): n is a, c, g, or t
  misc_feature (3134)..(3135): n is a, c, g, or t
  misc_feature (3137)..(3137): n is a, c, g, or t
  misc_feature (3139)..(3142): n is a, c, g, or t
  misc_feature (3145)..(3148): n is a, c, g, or t
  misc_feature (3151)..(3153): n is a, c, g, or t
  misc_feature (3155)..(3155): n is a, c, g, or t
  misc_feature (3157)..(3157): n is a, c, g, or t
  misc_feature (3159)..(3161): n is a, c, g, or t
  misc_feature (3165)..(3170): n is a, c, g, or t
  misc_feature (3172)..(3183): n is a, c, g, or t
  misc_feature (3186)..(3186): n is a, c, g, or t
  misc_feature (3188)..(3191): n is a, c, g, or t
  misc_feature (3193)..(3198): n is a, c, g, or t
  misc_feature (3200)..(3206): n is a, c, g, or t
  misc_feature (3208)..(3208): n is a, c, g, or t
  misc_feature (3210)..(3210): n is a, c, g, or t
  misc_feature (3212)..(3215): n is a, c, g, or t
  misc_feature (3218)..(3218): n is a, c, g, or t
  misc_feature (3220)..(3221): n is a, c, g, or t
  misc_feature (3223)..(3227): n is a, c, g, or t
  misc_feature (3229)..(3235): n is a, c, g, or t
  misc_feature (3237)..(3237): n is a, c, g, or t
  misc_feature (3240)..(3240): n is a, c, g, or t
  misc_feature (3242)..(3242): n is a, c, g, or t
  misc_feature (3249)..(3251): n is a, c, g, or t
  misc_feature (3253)..(3253): n is a, c, g, or t
  misc_feature (3255)..(3258): n is a, c, g, or t
  misc_feature (3260)..(3261): n is a, c, g, or t
  misc_feature (3264)..(3267): n is a, c, g, or t
  misc_feature (3269)..(3269): n is a, c, g, or t
  misc_feature (3271)..(3273): n is a, c, g, or t
  misc_feature (3276)..(3277): n is a, c, g, or t
  misc_feature (3279)..(3283): n is a, c, g, or t
  misc_feature (3285)..(3286): n is a, c, g, or t
  misc_feature (3288)..(3293): n is a, c, g, or t
  misc_feature (3295)..(3297): n is a, c, g, or t
  misc_feature (3299)..(3303): n is a, c, g, or t
  misc_feature (3306)..(3310): n is a, c, g, or t
  misc_feature (3312)..(3315): n is a, c, g, or t
  misc_feature (3318)..(3326): n is a, c, g, or t
  misc_feature (3329)..(3332): n is a, c, g, or t
  misc_feature (3334)..(3338): n is a, c, g, or t
  misc_feature (3340)..(3341): n is a, c, g, or t
  misc_feature (3343)..(3343): n is a, c, g, or t
  misc_feature (3345)..(3348): n is a, c, g, or t
  misc_feature (3350)..(3350): n is a, c, g, or t
  misc_feature (3353)..(3353): n is a, c, g, or t
  misc_feature (3355)..(3355): n is a, c, g, or t
  misc_feature (3357)..(3357): n is a, c, g, or t
  misc_feature (3359)..(3364): n is a, c, g, or t
  misc_feature (3366)..(3366): n is a, c, g, or t
  misc_feature (3371)..(3378): n is a, c, g, or t
  misc_feature (3380)..(3380): n is a, c, g, or t
  misc_feature (3383)..(3389): n is a, c, g, or t
  misc_feature (3391)..(3391): n is a, c, g, or t
  misc_feature (3395)..(3400): n is a, c, g, or t
  misc_feature (3402)..(3403): n is a, c, g, or t
  misc_feature (3405)..(3408): n is a, c, g, or t
  misc_feature (3410)..(3413): n is a, c, g, or t
  misc_feature (3415)..(3420): n is a, c, g, or t
  misc_feature (3422)..(3424): n is a, c, g, or t
  misc_feature (3426)..(3426): n is a, c, g, or t
  misc_feature (3430)..(3430): n is a, c, g, or t
  misc_feature (3432)..(3433): n is a, c, g, or t
  misc_feature (3435)..(3435): n is a, c, g, or t
  misc_feature (3437)..(3443): n is a, c, g, or t
  misc_feature (3446)..(3450): n is a, c, g, or t
  misc_feature (3452)..(3453): n is a, c, g, or t
  misc_feature (3456)..(3458): n is a, c, g, or t
  misc_feature (3460)..(3461): n is a, c, g, or t
  misc_feature (3465)..(3467): n is a, c, g, or t
  misc_feature (3469)..(3475): n is a, c, g, or t
  misc_feature (3478)..(3479): n is a, c, g, or t
  misc_feature (3482)..(3483): n is a, c, g, or t
  misc_feature (3485)..(3486): n is a, c, g, or t
  misc_feature (3489)..(3490): n is a, c, g, or t
  misc_feature (3493)..(3494): n is a, c, g, or t
  misc_feature (3496)..(3498): n is a, c, g, or t
  misc_feature (3500)..(3500): n is a, c, g, or t
  misc_feature (3502)..(3502): n is a, c, g, or t
  misc_feature (3504)..(3504): n is a, c, g, or t
  misc_feature (3508)..(3508): n is a, c, g, or t
  misc_feature (3510)..(3511): n is a, c, g, or t
  misc_feature (3513)..(3516): n is a, c, g, or t
  misc_feature (3519)..(3520): n is a, c, g, or t
  misc_feature (3523)..(3523): n is a, c, g, or t
  misc_feature (3527)..(3529): n is a, c, g, or t
  misc_feature (3532)..(3534): n is a, c, g, or t
  misc_feature (3536)..(3536): n is a, c, g, or t
  misc_feature (3538)..(3540): n is a, c, g, or t
  misc_feature (3545)..(3545): n is a, c, g, or t
  misc_feature (3548)..(3553): n is a, c, g, or t
  misc_feature (3555)..(3557): n is a, c, g, or t
  misc_feature (3559)..(3565): n is a, c, g, or t
  misc_feature (3568)..(3568): n is a, c, g, or t
  misc_feature (3572)..(3573): n is a, c, g, or t
  misc_feature (3577)..(3577): n is a, c, g, or t
  misc_feature (3579)..(3579): n is a, c, g, or t
  misc_feature (3581)..(3588): n is a, c, g, or t
  misc_feature (3590)..(3590): n is a, c, g, or t
  misc_feature (3592)..(3603): n is a, c, g, or t
  misc_feature (3605)..(3611): n is a, c, g, or t
  misc_feature (3613)..(3614): n is a, c, g, or t
  misc_feature (3617)..(3619): n is a, c, g, or t
  misc_feature (3621)..(3624): n is a, c, g, or t
  misc_feature (3626)..(3628): n is a, c, g, or t
  misc_feature (3630)..(3630): n is a, c, g, or t
  misc_feature (3632)..(3637): n is a, c, g, or t
  misc_feature (3639)..(3639): n is a, c, g, or t
  misc_feature (3641)..(3641): n is a, c, g, or t
  misc_feature (3644)..(3644): n is a, c, g, or t
  misc_feature (3647)..(3647): n is a, c, g, or t
  misc_feature (3650)..(3655): n is a, c, g, or t
  misc_feature (3657)..(3663): n is a, c, g, or t
  misc_feature (3667)..(3679): n is a, c, g, or t
  misc_feature (3682)..(3683): n is a, c, g, or t
  misc_feature (3685)..(3687): n is a, c, g, or t
  misc_feature (3689)..(3690): n is a, c, g, or t
  misc_feature (3692)..(3705): n is a, c, g, or t
  misc_feature (3707)..(3711): n is a, c, g, or t
  misc_feature (3714)..(3714): n is a, c, g, or t
  misc_feature (3716)..(3716): n is a, c, g, or t
  misc_feature (3718)..(3724): n is a, c, g, or t
  misc_feature (3726)..(3726): n is a, c, g, or t
  misc_feature (3728)..(3728): n is a, c, g, or t
  misc_feature (3734)..(3739): n is a, c, g, or t
  misc_feature (3741)..(3742): n is a, c, g, or t
  misc_feature (3744)..(3750): n is a, c, g, or t
  misc_feature (3754)..(3754): n is a, c, g, or t
  misc_feature (3756)..(3761): n is a, c, g, or t
  misc_feature (3763)..(3763): n is a, c, g, or t
  misc_feature (3765)..(3765): n is a, c, g, or t
  misc_feature (3771)..(3771): n is a, c, g, or t
  misc_feature (3773)..(3781): n is a, c, g, or t
  misc_feature (3783)..(3784): n is a, c, g, or t
  misc_feature (3786)..(3790): n is a, c, g, or t
  misc_feature (3792)..(3794): n is a, c, g, or t
  misc_feature (3797)..(3802): n is a, c, g, or t
  misc_feature (3804)..(3804): n is a, c, g, or t
  misc_feature (3808)..(3809): n is a, c, g, or t
  misc_feature (3811)..(3811): n is a, c, g, or t
  misc_feature (3814)..(3817): n is a, c, g, or t
  misc_feature (3819)..(3819): n is a, c, g, or t
  misc_feature (3821)..(3824): n is a, c, g, or t
  misc_feature (3826)..(3827): n is a, c, g, or t
  misc_feature (3830)..(3831): n is a, c, g, or t
  misc_feature (3835)..(3837): n is a, c, g, or t
  misc_feature (3841)..(3841): n is a, c, g, or t
  misc_feature (3843)..(3844): n is a, c, g, or t
  misc_feature (3846)..(3847): n is a, c, g, or t
  misc_feature (3850)..(3850): n is a, c, g, or t
  misc_feature (3853)..(3855): n is a, c, g, or t
  misc_feature (3857)..(3858): n is a, c, g, or t
  misc_feature (3861)..(3862): n is a, c, g, or t
  misc_feature (3867)..(3867): n is a, c, g, or t
  misc_feature (3869)..(3869): n is a, c, g, or t
  misc_feature (3873)..(3880): n is a, c, g, or t
  misc_feature (3882)..(3882): n is a, c, g, or t
  misc_feature (3887)..(3888): n is a, c, g, or t
  misc_feature (3890)..(3894): n is a, c, g, or t
  misc_feature (3897)..(3909): n is a, c, g, or t
  misc_feature (3912)..(3912): n is a, c, g, or t
  misc_feature (3914)..(3915): n is a, c, g, or t
  misc_feature (3917)..(3919): n is a, c, g, or t
  misc_feature (3921)..(3921): n is a, c, g, or t
  misc_feature (3923)..(3923): n is a, c, g, or t
  misc_feature (3926)..(3928): n is a, c, g, or t
  misc_feature (3930)..(3936): n is a, c, g, or t
  misc_feature (3939)..(3942): n is a, c, g, or t
  misc_feature (3944)..(3944): n is a, c, g, or t
  misc_feature (3948)..(3948): n is a, c, g, or t
  misc_feature (3950)..(3950): n is a, c, g, or t
  misc_feature (3953)..(3954): n is a, c, g, or t
  misc_feature (3957)..(3962): n is a, c, g, or t
  misc_feature (3964)..(3964): n is a, c, g, or t
  misc_feature (3966)..(3970): n is a, c, g, or t
  misc_feature (3972)..(3973): n is a, c, g, or t
  misc_feature (3975)..(3979): n is a, c, g, or t
  misc_feature (3982)..(3984): n is a, c, g, or t
  misc_feature (3986)..(3988): n is a, c, g, or t
  misc_feature (3991)..(3996): n is a, c, g, or t
  misc_feature (3998)..(3998): n is a, c, g, or t
  misc_feature (4000)..(4000): n is a, c, g, or t
nnnnntntnnnannnnnnttnnnnnttttnannannnnnnttnncaaannnnannnnnntagnnnnnnnnnnannnnnntcntannnnnnnnnnnnnncnncanttannttnannnnnnnttnnancnnnnntntnnncnnnnnnnttnnttncntnnnntgnacnanntnnnaannntnntntngnaannannntnnttnnnaannnnnnannnnnaaancannnncnnngncnnncnnnnntncnnnnnacnnnnnnnnttnntcnnannnnnnntnnnccnnnanntnntnnaatnnnttannnnanannnnttnnnnnncnnnttnnanntnnnnantnanncnnnnnntnttnnnntnntnttnnannntgatnnttnnnnnnnnnnnnnnattnnntnnnaattnnnnnnnnnnngnannntntnnnnnntannnntnntannttnaaantnnnngcnnnanttnnanntnnnnnannnntnnnanntnnnttgnnatnnnttgnanttatttntgnnaantnanaananntnnntaanntnnnantnnanannncgannnntnnnnncnnnncangtannnnnnnannnnngtcagtntntgnnanntgtantnctntncttngtctnnnnnnnanntnntantntnttcnnnnnngntnntnnnnnattggctanaacgtgtttgtgtatgatttgttgcgtgttttaagcacctaatttagcaaataaaaacctaatagaaaatccgtgaggattttcgtaagtagagtagaacttagcaattaattatacacggtgttgtaggtagtttttatactctaactagttttaataatggctcgaatgcataaagagctggtcttctacctgaagattcttctattgttcttagtaattccttatctaataacattcttgtaaatctagcagcagttggtcctggaattccgctttttgatgtgaatctattatttctaaatatagggtttgtaaaaatatagtctaatgcatttacactccattttgatgataaagtatctgaaaatacatgtttcatttcttcgtataaattctttatactttcggctatttctaaatttcgaactgcttgtttttcgattgcatttaaaaagaaaatacaccacgcttcccaatcgttattttctgagacatttctcatagtgtcaatatattcatctttatgttcttctaaatatccacttacataaaagtgaggttctgagattgtcccagatgaccaaagaagaagtgtgattaacatacgtccaattcttccatttccatcttgaaaggggtgaagtgcctcgaattcaagatgcattaaagccgtttttatcaaaatagggtctgaactatcctttatatatgtgaataactgttctaatccgtcattcaatttttctggacttattggtgtgaataaaactttctgttttattttatcggctaaatagttttgttcaattttatattgtccaggagatttttgagcccctcttccaaatgataataattgttgatgtagggttttaattagatgttgggataatggataaccatctatcattgctctttgtgcattcaaaagcgctcgttgatataaaattgtttcaaatacttcagaacgtacattttttgcttcttcggaatcattttcactatcagcttcgaactttagaatttcgtccattgtgctaatagttccttccattcttgaagatattactgcctcttggtttcgcaaaggagctagtaaaatctcactattatgcatgtttttaagcatttggtcatatcgtgctaaagaatcggttgccttcaataaggaattgactattttaccataatttaaatctttaggcgggaatttttcataatgatattgtactgagtttgtaaagtccatatatttaattttgatgtaaatatattacaaattatctacataaaataaggttgtgattaaaattcattgatatatgatagacaaagttgtttgatgtacatagattaatatcaaaattgtttgacgttcatattattgataatgtgataatcaaatgtttttgatgaatatgaatttacatcaaagtagtttgaggtgaatattttttaaaaaatgataatcaatgagttttgttgaattacctacaacgnnctngtnnannnntnngttncgncnttannncnntnnnntnnnnnnnaancannnannnttgnaannntnngnggattntnnnnnagnnnaatccnccnnnantnnnttnnnnncnnnntnnncnacnntntttnnntnnnnnannnnnnantcnnntnnnnnntnnnngtnnntntttntnnatttncnnaannntnnnttntnnnnnntnntnnannnnnnnntnnatnnnnnttnnnnaaanntccnncnnntntnannnnnnnnncttngtannnntcnnanttntngntnannnnnnatannnnnntntttntccnnnnannnnnnnnntntnnnnntnantnnatntttnnnntnnnnnnntannnnnnantnnattnnnntnnnnnnncnntnnnnnnnnnnnnnnnnnnnnannnnnnnnnnntntatnnnnnnnnnnntnttnnnnttttttnnnnntcnantnntattttnntnanagannnnattnnnngnttnnncnnnnnnnnnannnntntnnnnnnnnntantnnattnngaatntnnnnnttnnnnnntnntnnnnnttnntattnttnnnnnganannnnnnnnntnntnnnnntnntnnannnnnnnatnnntnnnanaannccnnnnnnttnntnnnnnnnnannntnantnnnnnnttnnnnnnnntnanntnnnnnnntngtnnnntnnttanntaantnnntnnnnnnnnnaatnntnncnnnnnannnntnnnnngnanntttnnnnnnnannanntnncnnannnantnannnnatacnntnttgnntnnanntnnnattncnnannanannntnnttnnnnnnntnnnnntttnnnattnnnnttntnnnnnnnnatttnnnntngntncnntnttttnnnttnnnnnnnnnntnnntnnataanntntntttnntntnnttnngntnnnnatnnnnacnnntntnannngacnnnnnnannnnnnnnnnnntanannnngnnnnnnannnnnnnantntnnnntantnngnnnnnannnnnnntncangnttttgtnnngncnnnntnngannnntnannntannannnnnannannnnnntnnntnnnnnagnnnnntnnnnaannnnnnnnnacnnnnannnnntnntncnnnntnttntncncnnnnnntntattnnnnnnnntnttnnnnnnntntttnnnnnntnntnnnnannnntnnnnnnannntntatncnntntnnnnnnnaannnnntnntcnnngnnttcnnnannnnnnnttnnttnnanntgnnaannannnanantnattncnngnnnnaannttntctnnnaannntncnnnttttnttnnnnnntnnnannnnnnntcngttnnttcntntnnnnnnnnantnnnnnnnnnnnntnnnnnnnannttnnntnnnntnnntntnnnnnntntnaantanatnnnnnntnnnnnnnaaannnnnnnnnnnnntanntnnntnngnnnnnnnnnnnnnntnnnnnttntncnnnnnnntnanattttnnnnnntnnannnnnnnaaantnnnnnncntntttaantnnnnnnnnntnnannnnntnnnttnnnnnntntatnntnatnnnntntnnnntnnttnntttnnnattngnnanntcnttnnncnnaannttaantntttnnnnnnnntnttctnnannnnntcnnnnnnnnnnnnnatnannannntntngannngnnnnnnnttnnnntntttntnttnnaannnnnntntnnnnngnnannnnngtnnntnnnctnnnnnntncn

SEQ ID NO: 814 - DNA, 4000 bp, Escherichia coli
  misc_feature (2)..(5): n is a, c, g, or t
  misc_feature (8)..(9): n is a, c, g, or t
  misc_feature (11)..(11): n is a, c, g, or t
  misc_feature (17)..(17): n is a, c, g, or t
  misc_feature (20)..(20): n is a, c, g, or t
  misc_feature (22)..(22): n is a, c, g, or t
  misc_feature (24)..(24): n is a, c, g, or t
  misc_feature (28)..(28): n is a, c, g, or t
  misc_feature (31)..(31): n is a, c, g, or t
  misc_feature (35)..(35): n is a, c, g, or t
  misc_feature (42)..(43): n is a, c, g, or t
  misc_feature (47)..(47): n is a, c, g, or t
  misc_feature (57)..(57): n is a, c, g, or t
  misc_feature (59)..(61): n is a, c, g, or t
  misc_feature (63)..(63): n is a, c, g, or t
  misc_feature (65)..(65): n is a, c, g, or t
  misc_feature (70)..(70): n is a, c, g, or t
  misc_feature (78)..(79): n is a, c, g, or t
  misc_feature (90)..(90): n is a, c, g, or t
  misc_feature (93)..(93): n is a, c, g, or t
  misc_feature (96)..(96): n is a, c, g, or t
  misc_feature (100)..(100): n is a, c, g, or t
  misc_feature (105)..(107): n is a, c, g, or t
  misc_feature (111)..(111): n is a, c, g, or t
  misc_feature (113)..(113): n is a, c, g, or t
  misc_feature (115)..(116): n is a, c, g, or t
  misc_feature (120)..(120): n is a, c, g, or t
  misc_feature (128)..(128): n is a, c, g, or t
  misc_feature (134)..(134): n is a, c, g, or t
  misc_feature (149)..(149): n is a, c, g, or t
  misc_feature (155)..(155): n is a, c, g, or t
  misc_feature (159)..(159): n is a, c, g, or t
  misc_feature (167)..(167): n is a, c, g, or t
  misc_feature (170)..(170): n is a, c, g, or t
  misc_feature (182)..(183): n is a, c, g, or t
  misc_feature (186)..(187): n is a, c, g, or t
  misc_feature (189)..(190): n is a, c, g, or t
  misc_feature (192)..(192): n is a, c, g, or t
  misc_feature (197)..(197): n is a, c, g, or t
  misc_feature (201)..(201): n is a, c, g, or t
  misc_feature (204)..(205): n is a, c, g, or t
  misc_feature (207)..(207): n is a, c, g, or t
  misc_feature (210)..(210): n is a, c, g, or t
  misc_feature (212)..(214): n is a, c, g, or t
  misc_feature (216)..(216): n is a, c, g, or t
  misc_feature (218)..(218): n is a, c, g, or t
  misc_feature (220)..(221): n is a, c, g, or t
  misc_feature (224)..(225): n is a, c, g, or t
  misc_feature (227)..(227): n is a, c, g, or t
  misc_feature (229)..(233): n is a, c, g, or t
  misc_feature (235)..(240): n is a, c, g, or t
  misc_feature (243)..(243): n is a, c, g, or t
  misc_feature (245)..(246): n is a, c, g, or t
  misc_feature (248)..(249): n is a, c, g, or t
  misc_feature (252)..(253): n is a, c, g, or t
  misc_feature (257)..(258): n is a, c, g, or t
  misc_feature (260)..(260): n is a, c, g, or t
  misc_feature (262)..(264): n is a, c, g, or t
  misc_feature (267)..(267): n is a, c, g, or t
  misc_feature (269)..(269): n is a, c, g, or t
  misc_feature (271)..(271): n is a, c, g, or t
  misc_feature (275)..(276): n is a, c, g, or t
  misc_feature (278)..(278): n is a, c, g, or t
  misc_feature (280)..(280): n is a, c, g, or t
  misc_feature (282)..(283): n is a, c, g, or t
  misc_feature (288)..(288): n is a, c, g, or t
  misc_feature (290)..(291): n is a, c, g, or t
  misc_feature (293)..(294): n is a, c, g, or t
  misc_feature (296)..(299): n is a, c, g, or t
  misc_feature (303)..(304): n is a, c, g, or t
  misc_feature (308)..(309): n is a, c, g, or t
  misc_feature (311)..(311): n is a, c, g, or t
  misc_feature (317)..(317): n is a, c, g, or t
  misc_feature (321)..(322): n is a, c, g, or t
  misc_feature (332)..(332): n is a, c, g, or t
  misc_feature (334)..(334): n is a, c, g, or t
  misc_feature (336)..(336): n is a, c, g, or t
  misc_feature (340)..(341): n is a, c, g, or t
  misc_feature (344)..(344): n is a, c, g, or t
  misc_feature (346)..(347): n is a, c, g, or t
  misc_feature (349)..(353): n is a, c, g, or t
  misc_feature (355)..(355): n is a, c, g, or t
  misc_feature (357)..(362): n is a, c, g, or t
  misc_feature (364)..(364): n is a, c, g, or t
  misc_feature (369)..(370): n is a, c, g, or t
  misc_feature (389)..(389): n is a, c, g, or t
  misc_feature (391)..(392): n is a, c, g, or t
  misc_feature (394)..(395): n is a, c, g, or t
  misc_feature (400)..(402): n is a, c, g, or t
  misc_feature (405)..(407): n is a, c, g, or t
  misc_feature (409)..(409): n is a, c, g, or t
  misc_feature (411)..(411): n is a, c, g, or t
  misc_feature (413)..(415): n is a, c, g, or t
  misc_feature (417)..(417): n is a, c, g, or t
  misc_feature (419)..(419): n is a, c, g, or t
  misc_feature (421)..(422): n is a, c, g, or t
  misc_feature (426)..(426): n is a, c, g, or t
  misc_feature (428)..(429): n is a, c, g, or t
  misc_feature (432)..(432): n is a, c, g, or t
  misc_feature (434)..(436): n is a, c, g, or t
  misc_feature (439)..(441): n is a, c, g, or t
  misc_feature (447)..(447): n is a, c, g, or t
  misc_feature (454)..(454): n is a, c, g, or t
  misc_feature (465)..(465): n is a, c, g, or t
  misc_feature (468)..(468): n is a, c, g, or t
  misc_feature (471)..(471): n is a, c, g, or t
  misc_feature (474)..(474): n is a, c, g, or t
  misc_feature (477)..(477): n is a, c, g, or t
  misc_feature (480)..(480): n is a, c, g, or t
  misc_feature (483)..(483): n is a, c, g, or t
  misc_feature (485)..(486): n is a, c, g, or t
  misc_feature (489)..(490): n is a, c, g, or t
  misc_feature (492)..(493): n is a, c, g, or t
  misc_feature (497)..(500): n is a, c, g, or t
  misc_feature (503)..(503): n is a, c, g, or t
  misc_feature (506)..(510): n is a, c, g, or t
  misc_feature (512)..(514): n is a, c, g, or t
  misc_feature (516)..(516): n is a, c, g, or t
  misc_feature (519)..(519): n is a, c, g, or t
  misc_feature (521)..(528): n is a, c, g, or t
  misc_feature (530)..(531): n is a, c, g, or t
  misc_feature (533)..(537): n is a, c, g, or t
  misc_feature (539)..(540): n is a, c, g, or t
  misc_feature (543)..(543): n is a, c, g, or t
  misc_feature (546)..(550): n is a, c, g, or t
  misc_feature (553)..(553): n is a, c, g, or t
  misc_feature (555)..(556): n is a, c, g, or t
  misc_feature (558)..(559): n is a, c, g, or t
  misc_feature (561)..(561): n is a, c, g, or t
  misc_feature (563)..(567): n is a, c, g, or t
  misc_feature (570)..(570): n is a, c, g, or t
  misc_feature (572)..(573): n is a, c, g, or t
  misc_feature (575)..(576): n is a, c, g, or t
  misc_feature (578)..(578): n is a, c, g, or t
  misc_feature (581)..(581): n is a, c, g, or t
  misc_feature (584)..(584): n is a, c, g, or t
  misc_feature (587)..(587): n is a, c, g, or t
  misc_feature (589)..(590): n is a, c, g, or t
  misc_feature (592)..(594): n is a, c, g, or t
  misc_feature (596)..(597): n is a, c, g, or t
  misc_feature (599)..(600): n is a, c, g, or t
  misc_feature (602)..(603): n is a, c, g, or t
  misc_feature (605)..(605): n is a, c, g, or t
  misc_feature (607)..(610): n is a, c, g, or t
  misc_feature (613)..(613): n is a, c, g, or t
  misc_feature (616)..(616): n is a, c, g, or t
  misc_feature (618)..(619): n is a, c, g, or t
  misc_feature (622)..(622): n is a, c, g, or t
  misc_feature (624)..(624): n is a, c, g, or t
  misc_feature (626)..(626): n is a, c, g, or t
  misc_feature (628)..(628): n is a, c, g, or t
  misc_feature (630)..(630): n is a, c, g, or t
  misc_feature (632)..(634): n is a, c, g, or t
  misc_feature (636)..(636): n is a, c, g, or t
  misc_feature (638)..(638): n is a, c, g, or t
  misc_feature (680)..(680): n is a, c, g, or t
  misc_feature (682)..(686): n is a, c, g, or t
  misc_feature (691)..(691): n is a, c, g, or t
  misc_feature (697)..(699): n is a, c, g, or t
  misc_feature (702)..(702): n is a, c, g, or t
  misc_feature (706)..(707): n is a, c, g, or t
  misc_feature (709)..(709): n is a, c, g, or t
  misc_feature (716)..(716): n is a, c, g, or t
  misc_feature (718)..(719): n is a, c, g, or t
  misc_feature (722)..(722): n is a, c, g, or t
  misc_feature (725)..(726): n is a, c, g, or t
  misc_feature (728)..(729): n is a, c, g, or t
  misc_feature (731)..(732): n is a, c, g, or t
  misc_feature (735)..(736): n is a, c, g, or t
  misc_feature (739)..(739): n is a, c, g, or t
  misc_feature (743)..(743): n is a, c, g, or t
  misc_feature (745)..(745): n is a, c, g, or t
  misc_feature (752)..(752): n is a, c, g, or t
  misc_feature (754)..(754): n is a, c, g, or t
  misc_feature (758)..(758): n is a, c, g, or t
  misc_feature (760)..(760): n is a, c, g, or t
  misc_feature (766)..(766): n is a, c, g, or t
  misc_feature (768)..(768): n is a, c, g, or t
  misc_feature (780)..(780): n is a, c, g, or t
  misc_feature (792)..(793): n is a, c, g, or t
  misc_feature (798)..(798): n is a, c, g, or t
  misc_feature (807)..(807): n is a, c, g, or t
  misc_feature (813)..(817): n is a, c, g, or t
  misc_feature (820)..(821): n is a, c, g, or t
  misc_feature (823)..(824): n is a, c, g, or t
  misc_feature (826)..(826): n is a, c, g, or t
  misc_feature (829)..(829): n is a, c, g, or t
  misc_feature (840)..(841): n is a, c, g, or t
  misc_feature (848)..(848): n is a, c, g, or t
  misc_feature (851)..(851): n is a, c, g, or t
  misc_feature (857)..(858): n is a, c, g, or t
  misc_feature (861)..(864): n is a, c, g, or t
  misc_feature (868)..(868): n is a, c, g, or t
  misc_feature (874)..(874): n is a, c, g, or t
  misc_feature (877)..(877): n is a, c, g, or t
  misc_feature (879)..(879): n is a, c, g, or t
  misc_feature (881)..(883): n is a, c, g, or t
  misc_feature (886)..(886): n is a, c, g, or t
  misc_feature (889)..(891): n is a, c, g, or t
  misc_feature (895)..(897): n is a, c, g, or t
  misc_feature (899)..(901): n is a, c, g, or t
  misc_feature (909)..(911): n is a, c, g, or t
  misc_feature (915)..(917): n is a, c, g, or t
  misc_feature (919)..(919): n is a, c, g, or t
  misc_feature (923)..(923): n is a, c, g, or t
  misc_feature (929)..(934): n is a, c, g, or t
  misc_feature (939)..(939): n is a, c, g, or t
  misc_feature (941)..(942): n is a, c, g, or t
  misc_feature (945)..(947): n is a, c, g, or t
  misc_feature (949)..(952): n is a, c, g, or t
  misc_feature (954)..(956): n is a, c, g, or t
  misc_feature (958)..(958): n is a, c, g, or t
  misc_feature (960)..(960): n is a, c, g, or t
  misc_feature (962)..(963): n is a, c, g, or t
  misc_feature (965)..(965): n is a, c, g, or t
  misc_feature (967)..(969): n is a, c, g, or t
  misc_feature (972)..(972): n is a, c, g, or t
  misc_feature (974)..(976): n is a, c, g, or t
  misc_feature (979)..(979): n is a, c, g, or t
  misc_feature (983)..(984): n is a, c, g, or t
  misc_feature (998)..(998): n is a, c, g, or t
  misc_feature (1001)..(1002): n is a, c, g, or t
  misc_feature (1004)..(1004): n is a, c, g, or t
  misc_feature (1008)..(1009): n is a, c, g, or t
  misc_feature (1011)..(1012): n is a, c, g, or t
  misc_feature (1014)..(1015): n is a, c, g, or t
  misc_feature (1020)..(1021): n is a, c, g, or t
  misc_feature (1023)..(1025): n is a, c, g, or t
  misc_feature (1028)..(1030): n is a, c, g, or t
  misc_feature (1032)..(1032): n is a, c, g, or t
  misc_feature (1034)..(1039): n is a, c, g, or t
  misc_feature (1041)..(1041): n is a, c, g, or t
  misc_feature (1043)..(1043): n is a, c, g, or t
  misc_feature (1048)..(1048): n is a, c, g, or t
  misc_feature (1051)..(1052): n is a, c, g, or t
  misc_feature (1057)..(1059): n is a, c, g, or t
  misc_feature (1064)..(1064): n is a, c, g, or t
  misc_feature (1069)..(1069): n is a, c, g, or t
  misc_feature (1073)..(1073): n is a, c, g, or t
  misc_feature (1076)..(1076): n is a, c, g, or t
  misc_feature (1079)..(1079): n is a, c, g, or t
  misc_feature (1082)..(1082): n is a, c, g, or t
  misc_feature (1085)..(1085): n is a, c, g, or t
  misc_feature (1088)..(1088): n is a, c, g, or t
  misc_feature (1094)..(1098): n is a, c, g, or t
  misc_feature (1992)..(1992): n is a, c, g, or t
annnnatnnanaaatanatnanantaanaanaaanaaaaaannaatnaaaatataanannnananaatanaaataaannaaaaataaaanaanaanatantatannnaaananannaaantaaaatanaaaaanaaaaaaaaaaaaaanaaaatnaaanaataaaanaanaaaaaaaaaaannaannannanaatantatnatnntnatntnnntntnannttnntntnnnnntnnnnnnatntnnannttnntttnntntnnnttntntntttnntntntnnatatnannannannnntatnntaannanatatanaatnnaaatatatananantttnnatntnnannnnnantnnnnnntnatttnnttttttatttttttttttntnntnntattnnnatnnntntnannnanananntaanannaanannnatnnnattatnattttanttttattattnttnttnttnttnttnttntnnttnntnntatnnnnatnttnnnnntnnntntantnnnnnnnnanntnnnnntnnaanatnnnnntantnntnntntnnnnntantnntnntnttnttnttntnntnnntnntnntnntntnnnnaanatnannatnananananannnananaaaaaaaaaaaaaaaaaaaaaaaaaaaaaaaaaaaaaaaaanannnnntttantttttnnnatntttnnanaaataanannaantanntnnannaannaantaanantaataantnaatnanaataantnataataataaanaattataataannatatntaataatantaatannnnnttnntnnantanaataattaaannaattaanaanaataannaannnnaaanaaaatnaananannnaanaannntatnnnannnatttaaannntttnnntntttnattatnnnnnnaaatnannaannnannnnannnanantnnanannnaanannnaanaatnnaaaaaaaaatatanaanntnaatnnannannttatnnannnaannnanannnnnntnantaatntanntaatnnnttaanttatntttnttnttnttnatnttntttttnnnnntttttttttttttttttttttttttttttttttttttttttgatattagtaatagttaaagtttattatttttatagattatcattatcttcataataaattaactattataaaatcaacgtattatacattttagagtaaaaataagtaaaagtaagtcgtttttaaattaatatatatataagtatataattaaaagatattataatgatatttaattgattttatttatttttctcaattctatttttgtttaatgtttttcagaattaactataataaaagattaaaacaaataaaaaataaaataataaaataaaataaataaaataaaataaaataaataaataaataaataaataaaaactaattatatatatatatatattcaaaaaatatatgtaaatattttcatttattcaaactaaattgaatttatagataattaaaactataaataatacaaatatatcaaaatagtaaataataatagaaataaaaataaaactgagtaaaggaataaaaaaaaggtaataataaataattatactagaaagataatcaacattgataaataaatatttacataataactaaagctatttaattattagacgtaaaaagtatatttatagtatatctattaagaaatcataaaaatatatttttattagataaataattggttagatttaaatattattgaaaaattagtttttataccgttttaatatatcttatcttaaatttaaatattactataaaatttttatttttaattaatatgtatataaattatataaattatttatgtatttttataactcgattttattatttttttaattatattttaatttttatttacatagcatttaaattatttgttatatnaaaaaaaaaaaaaaaaatatatatatatatatatataaaagttatgaaatggatgatgatttattaaattatacattatatggcttcaataatgaagataatttcttaatagaaaaaactaaaaaaagcttttggtcatcagatgaagacaaaaatcaagctttatttaaaaaagaaaaagaatttcttcaaggttatactgatataccaaaacaattgataaataatgttgccaatcgcttggttaatactgtggatggtctagttatatctatgtccatgccacctcctgttacaaaagcattatctcaagttaagaacatatgcccatggcacatcgcaatttcatatgataaaaattatttagctatattacaagatgattcagttgtcatcgtttctaaagaattggattatgattttagaagtcaaaaagttataaaaattgatactgatccatttccaagttggagaacaatagcttggtcattagattcttcgcttattgcaatatcatacagtcatggacaaattaaaatttacagactatcaaatgccgaattaatatatgttattcaaccaaaaaatcaaataaatgaatcaaaaaaaaagtctaacccaaacaatgaatctgaaggaaaacatattttattaaataagaatactttcaatcaaaataataattcgaaaataggtattattgatccagcagtatcattacaatttattgatccaaaaagaggtaaatcaacttcaacaccatataacggaaagttatatagttatgaacttttagttataaatcatgcgggaaccttaagaagttatttatttaatgttgattcagtctcaaatgatgagagtcagcaaaatgataaagaaatcagaaagataccttcaaaagcaattgtaattgcaagagaaggtcaaagtccagataaaaaaattacattttatcataaattctcctttaaaccatggttaaatattgttgttacatctgtagtcgatttagaaaataatttactttatttaggtggtattaataaagattcttcaatgacaggatcaaataataacttagatgaaattcaaaaagaaaagccagtatctaataattccgatgatacttctttcattgtatggaaattaacatcatcattaccattttatgtaaaatataatagtgatgaaaaatccgaatattatgattctactaaaaagttaagaagtgctcgtcaatctaagtggggtgttgttaaagattatctttttaattggagacatcccacctttgttgataatattattcattctttatctctatcacctaataaagaatttcttcttacattagattttgctggaactattaatttatggagaattaaaaacgaaaaattaataaaatcaattactgttgatgatcttaaacctttattacaaaattatgcaaaaaatagtaatagagataattctagcaacagtactaataataataataataataatgttctcgatgaaaatatttctaaagtcattccaagtgagatttcatggtggtctgactctagtattgttatatcttttaataatggttgggtcggcgtaataaatttagcaacaatgaacaatattatgggtgatcaaatggaattatttaatgttaatcctattgttgccaatattccaggtgaaaaaattattattttatcttattcagttaaatctaaaaaagttagaattggagtaggatcttatattgaagaagaatctgaagaagaatcagaaaaggaagattcaatcctcattaaagttatggagaatatggtaattaatcctcttagtcgtattactgatacatttttgtggcattttgataataagaattcattaattccaaaaaaggaatatgttacattaattgaaagacaatattctcttttcatccttgcaaatactttaccaattgatgttttttatcattgtattaataatttagacttca

SEQ ID NO: 815 - DNA, 4000 bp, Escherichia coli
  misc_feature (312)..(312): n is a, c, g, or t
  misc_feature (319)..(319): n is a, c, g, or t
  misc_feature (517)..(517): n is a, c, g, or t
  misc_feature (559)..(559): n is a, c, g, or t
  misc_feature (1488)..(1488): n is a, c, g, or t
  misc_feature (1507)..(1507): n is a, c, g, or t
  misc_feature (1831)..(1831): n is a, c, g, or t
  misc_feature (1986)..(1986): n is a, c, g, or t
cagcaacgaaggcgactccagcctgagcatcaccaaccgccgactcaccgccaatgagatcaacacccaaacagtaaccctcacctacggcgaactatcgagcggctttgtttccattaaagccgggcgcatcggcgatacacagacttttgaattcaaggtgcgcgatgatggcggcaccgccaacaacggcattgacacctccatctccgccaacacgctaacgatctacgcgaatcctcctgtaagcgatgacgcggaggttctcaaactgattcgcgtcacagaagccatcaaggagctcgaggccanactgaanccagctgatcgcaaaacggcagacctcattgctgcagccggaaccatctctagcgaggccaaatcggagtttatcgaccgcttcgagcaaggcctgtttgatgctgaccctgagcgcgcacgtcgcttcatctacagcaatgtgcaatcaaaagatacactcaatctagaaaaagacgccttaaccacaaaaatttcngaactacaacaactcatcaaccaaggcaacattggcgaagcngaggcagccaagaacagagccgcacttgaggcgatgcaggcgaaattcgatgctctctccgccaccctcacgaagtatgaaaccctcatcccagatatcagcctgatcgacgacccccaaaacctgaaccttgccgagttagccaaccagcttgccgccagcacatcaggacagctgattgcagtcaatcaagttggaaccgagaccaaagcccaggtgaacctgggcggctccaccaccgttgagatctcggctgacgaattaaaagaactgctggcgttgaagcaacaggcctatgaagactccctcaagaagggattcactgatgcagccaagggcacagccgcgcaaatcaaaaccatcgcagcagcaagcgagttaggtatcgacctcaactcagcaactcaggatgaccaggccaaggcgcaagcctttgacgcaatcgccaagaagttccttgaaaccggtgtatccattggcgatatcttcaatcagggggatccagcgctggtggccatggccaaggatgtcatccaggatggcgatgccaacaagatcagcaaggctgttaccgacctagaaaagatcatctcgccgtttggcagaaccctaacaattacagccgccgatattgtttacgaagcgactcgcctgaagcgcaccttcggatcgtctgacaccgaattgcgcgaggttgatgtgctcggcacaacacagctgtcgtacaccaatagcgagtacatcggtgctctggacggcaacatcaaaggcatggcaggcatgacctttgcggccgatagcaaagccatggtgtttgagtttgcattggagcctggtcaaaccaaaacaacccaagtgctcagctacctggccggcggagtggatgttttcgataacaatagacaactcagtgccgccgctcaatccgnaacggctggctatgccgcnggtacctacagcaactacctcaaatacgtgtcctacgccgatttgctggcttacggggcaaccccaacgggcaacaaagacggcgacgacaacatgattttcgaatggaagcctggatccagcaaaaccgccgacggcaagcccttaaccctgctcgatggcaccaccgtggtggatcgggccggctggtacgacttcacccaaaagaccaatcccgacggtaccagcaccaacggtgccaaatacatcaccaacgccgctggacggattgttggtgttgagctgtccttcaccaaggacatgtttggagacaagaccccaggngactcggtgatcactgacccgggggccacggtggccgtgaaacccgtgggcaatggcgaactcggtgctggccaggtggccttgaatcaggccgagttggatctgctcagaagccagcgtgcaaaccagcccttcggtagcgaactcgagaaaangaccttctacaaaggcatgggggtcgatggccctggcctgggtagcggaatcggttccggctacagcagcgaaatcgccagcgatgacgtcgctgcgatgagcctgggcggtggccttccgcagcctgcccaggtggtgaatgtggatcgttccggcagcggctcggatggtctcagcctctcgcaggccatcaactcctttgtccaggagggccagggcgaaggggatggcagcggaggtgctgtcaagaagggccagggggccgaggggcagggagcgggaacgggcggtgatgccgccctaggcgaagaccagtcacccgcaagccaacgcaaacgtggcttgatgctgcagccggtgatcgatcaattggcctcggccgccaacgaagccaagagcagttccaacctgctgaagaacctgagcgagggttccgtgatgggcaacaacctgctcgatgcgctggctcttggtgccggggtgctctatgtcctttacgcaccgaaagcggtggaaaccggcaagaaaggcttccggggactggtcaaccgggtgcgcaagcgcagcgggatcgccgatgtgctgccggaggccaacctgctctccgtgtttgtcatgaagctccccaatggcactgaacgcctgatggccactcgcgtgggcatgggaggcatggaagtgatcggtcaacaggatctacccgccgacgtgcgggtggacacgccgggcagccagacccagatcgacttcgccatgaagcaactgatcagcaagttgggcacccccaacgccgacctgctgctcctgggtcccaagctcaaaggtcaggctgccctggtgcagaacctggccaaacaaacccagctcctcaacacccaggagctcagcagcagcctctccaactgcagcgccacagaattggaagccctgcagaactggctcaacaaaccctcaagcaccccgccggagaccagccccgtctacggccaaatgatgcagcgcattgccaactacgccaacggcctgcccgtcgaacaggccaacatggcggggctgattgagctcagtgtggccctgggctggagccaacgaaacagggctgcctaaggcaaggagatcagcggcagcgttgcttaagcgctgccgtgatcaactcgaatgccttgggatggctctgcatcatgaacgcctcccgctccacatcgtgcttggcatgggggtaattgcgatacaaaacacccgccatctcgcgctccacaatccgaggaagcgcatagctccagccgatcggccggagtttgccattcggacacccctgcgccgcatgtaccgcctcatggatcagggcttgccgtgcaattccaagatccaccgtgatcggcgccacccacaccatcttcttgcgggcgttcgtggcgccgtaggcaccctgtatggggggcctggcgaacagcacggtgtagcccgcctggcgcagactgcgcaccaaaggcatcaactccaccgggaaagtggctgccgtgggctgtggggaaaccgcggttgggagcgattggggttgagcccaagcaggctcgtcagtcacagcgctcaagggcagcccaatccaagctaaagcgacgggaatagccctcagcatcagcgatgctgcgccgccgcgtgatgatctttgggtgcgcattcgcatcatggccggatcattgaacggtcagatttcggccggcattaccccagaaatacacagggtcccccttgtaccagggctcccagccaatgggcaccttgtgctccagggctttgctcttgatggcccggtacacctcaaagccatcattttcgagaaccacaaaaaccgcctgacgatccttagcgagctggcgcatggtttgatccagccaaccatccggttttttgagatctccggccaacactgttggagggccattgcgctggatcagaccattggcatggctcacccgcatctgaatcggccccacctgctgctggcgcgac

SEQ ID NO: 816 - DNA, 4000 bp, Escherichia coli
ttcggccctgttcgtacggaattcgcggtattgcatcttccaactccccagccagaacaacgcaaatatagaaaactcttggtaattgtgcaatatttcaggcggaatttcagtactttcccgcccgaaaatatcacattagcagtcgttttactcttctttgcgttcaggacgtccgtggcgttcgtggcgttcgccgcgctcgggacgctcgccacgcggacgacgctcccgctccacataaccctcgggcttgggcagcagcaccttgcgcgacaatttgagcttgttggtcttcggatccataccgatcagcttcacgtcgatctcatcgccctctttcaggccggtctcctccatggtctcgaagcgcttgtagtcgatttccgagatgtggagcagggcgtccttgccgggcatgatctcgacgaacgcaccgaaggtgacgatcgaacggatcttgccgtggtacgtctcgccgatctccgggatcgcaacgatggccttgatgcggttcagcgcgccgtcgagtgcggtcttgtcctggccgaagatgtccacgatacccttattgtcgacctcggtgatcgtgatggtcgtacccgtggtcttctggatgtcctggatgaccttgccgccggggccgatcacggcaccaatcatatcctgcgggatagtgatctgtacgatgcgcggtacgaaaggcttgtagtcctcgcgcggttcggcgatgcactcggtgatcttgtcgaggatgtgcaggcgtcccttgcgggcctgctccagcgctgcggccagcacctcgtacgagaggccgtcgaccttgatatccatctgcgtggcggtgataccgtccttggtacccgtcaccttgaagtccatgtcgcccaggtggtcttcgtcgcccaggatgtccgacagcacggcccacttgccgctctgcgaatcggaaatcagccccatggcgatacccgagacgggctttttgagtttcacaccggcgtccatcagggccagcgtgccggcgcagacggtagccatcgacgacgaaccgttcgactcgaggatgtccgatacgatacgcacggcgtaggggttctcctcacccagcggaaccatcggtttcagggcacgccatgccaggtggccgtggccgatctcgcggcggctcaggccgcgtgcggccttggcctcgcccgtcgagaagggcgggaagttatagtgcagcacgaactgctcggtaccctgtaccagcacttcgtccttgactttttcgtcgagtttcgtaccgagcgtaacgctggtcagcgactgcgtttcaccgcgcgtgaagatcgccgagccgtgggctgcgggcaggtagcccacctcgcaccagatcggacggatctcatcggtcttgcggccgtcgaggcgcttgccctcgtcgaggatcatgttgcgcatggcctttttctgcacgtcgtcgtggaaatatttgtggatcagcggggctttctccgccagttcctcctcgctgtaacgcgctgcgaactcggcctcgagggcgttgaacttttcctcgcgctcgtgcttcatcgtgccgctcgtggcgatggcgtaagccttgtcgtaaagctcgctgataatcgtctggcgcagctgttcgtcgttgacctcatggcagtaggtgcgtttcacgtccttgcccagttctttcgcgagttcgatctgtacggcgcagtgcttcttgatctcctcgtgtgcgaacttgatggccccaagcatcacctcctcggaaacctccttcatctcgccttcgaccatcaggatgttgtcgatcgtaccgccgaccatgatgtcgaggtcgaccttgcccatctccgaatagttggggttgatgacgtagttgccgtcgatgcgagccacgcgaacctccgaaatggggccgccgaaggggatgtccgaaacggcgagggcggccgaagccgccaggcccgccagggcgtcgggctggatatccttatccgccgagatgaggttcaccgttacgtaaacctcggcgtggtaatctgcggggaacagggggcggagggctcggtcgatcaggcgcgcgacgagcacttcgctgtcgttggccttgccttcgcgcttcatgaagcctccggggtagcgtccgcaggcggcgtacttctctttgtactccacctggaggggcatgaaatcggtgtcgggttttgcgtccttggcggccaccacggtacccaggagcatcgtatctcccatcttgactaccacggagccgtcggcctgcttggccagtttgcccgtttcgatctcgatctggcgtccgtcggccagcgtgatgatcttgcggactgcgttgtacagcttcttttcttccataaaaatctaaacctataatgtttttcgaatcgttgtcctttacgaaaatgaaggcaacccctcgttgggaattgccctcatttctccctcgcggattatcggcggaggttgagcgtcttgacgatggcgcggtagcgctcgatgtcgacctctttcagatactccagcaacgcgcggcgcttaccgaccaggcgcagcagtgcgcgctgggttccgaagtcgtgtttgttgctcttgaggtgttctgtaaggtggctgatacggtacgaaaacaacgcgatctggctctcgggcgaacccgtgtcggtgttagacttgccgtactggccgaaaagctcctgctttttctctgctgttaaataagccatttttgaaagtttatttaaattccactctacgacgcatcccccttaccgtggataacgccagagcgtccggcaaagttacgaaataattgacaattaagcatggcaaatgaaaaattatttaccttttttacacggatttatcgccttaaactccggaaaatactatttttgcggcaaaacaagtctacgttatggtaaagacgcttattttcgcactcctcgcgacgatgtgcgcaaccttcctgtggggctgcggcggcaaggtttcctatacgaccgtcgacgggacgatgctcggcacgacgctgcacgtggtggccgacgtgcagggcacttcgccgcaggagctctacgccgccgtcatggcgctcgaccgggaggccaaggcctcgatgtcgatcttcgacccggcgtcgctgctgagccgcctgaaccgcaaccagaccgacagcgtcgaccgccatatcgccttcaacctccgcctggccgacagcatcagctcgctgagcgacggccgttacgacgtgaccgtcaaaccgctcgtcgaggcgtggggcttcgccgggaaagaggcgcaggagaacccgaacgtcgattcgatccttgcgttcgtgggccgtcaaaaggtgcgcatcgaaaacggccgcctgataaaggacgatccccgtgtgcagctggatttcaattcgatcgccaaaggatataccgtcgacctgctcgcgcagctcgtcgaatcgttcggcgccaggaactacatcgtcgacatcggcggcgaagtccgctgcaagggcgtcaaccggcaggggaatccgtggcgcatcggcatcgagaccccgttcgacggcaacatgtcgaacggcgaatacctccagcggcgtatcgggatgaccgaaggcggcctggccacctcgggcaattaccgccgtttctacctcgatgccaaaggcaacaagatcgcccacacgatcgacccccgcacggggcgcagcgccgtttcgcgcctgctgtcggtgacggtcgcggctccgacctgcgccgaggccgacgctctgggaaccatgttcctggcgatgggggccgacgatgcgctggccgcggcgaagtccatgccccggatgaaggtctatttcatcctcgccgacggcgcggatggctatgaagagtatgtttcgcccgccatgaaggcggcaatcatgcaataaccgatttatgaaaagcgcagttttcctctacaacacccaatccgg

SEQ ID NO: 817 - DNA, 4000 bp, Escherichia coli
  misc_feature (312)..(312): n is a, c, g, or t
  misc_feature (708)..(708): n is a, c, g, or t
  misc_feature (738)..(738): n is a, c, g, or t
  misc_feature (813)..(813): n is a, c, g, or t
  misc_feature (828)..(828): n is a, c, g, or t
  misc_feature (853)..(854): n is a, c, g, or t
  misc_feature (873)..(873): n is a, c, g, or t
  misc_feature (927)..(927): n is a, c, g, or t
  misc_feature (945)..(945): n is a, c, g, or t
  misc_feature (999)..(999): n is a, c, g, or t
  misc_feature (1736)..(1736): n is a, c, g, or t
  misc_feature (1869)..(1869): n is a, c, g, or t
  misc_feature (1959)..(1959): n is a, c, g, or t
  misc_feature (1988)..(1989): n is a, c, g, or t
aaaagatgaaaatgtattgggcatttcttttatatcgaaaggaagctgttcaatagaataaagagacgagtcccaaatggttttaatgattaaatgattgttttttagtccatcaatttcctcttcctcttcaggggcataaatactttcagcataaatagcatcaaaatcataatcgatgtatatcttttttagggtatctattggatcccctatgaaaaaatttagtcggtggccatatttttttaaactctgatccaattcaataagcccttgatgctgaaaatacttacggtgtgctgctactctggnaaacccccactgcacatctttatcaaatgtttgattttgaatgtaaataaatgctatttcgttggcatcatccagcgctttatttaaaacactattgtcttgaagacgaagattattgcgaaaccaaaagagaattttcatattagttattattccgacaacgttttgagcaatatttaacctggtcccaacatgtcttccattttttacgccactcaaatgggcgttggcacgtcttacaaatttttttaggtttttcgattttcatttaagacaaatagtatcttgaattagtttatctgtataactaggtaaaaaaatttatttagcactataattgagttaatgaaaaaaaaattcacctttttattttttctacttacctcttgtgccacncctgttaaacaaggaaccacctatcctgcnccacataatgactatcaaggtgttgttataaaagagcatttcggtaaagaagatccctatgattttatgattcgnacttgtaaaatatanggtggcttggacgaatccagtgtcnntgatttaggtgaagatacntttttacaagaggttattcaatttaagtgtaattatcatggccgacttcaagangaattaaatattgatggnaaatcctctcaaaggctaagtggtgctgcagcaaagataaaatgtgagaacttnaactttgaagtaggcactgtggattttcgaaaatgcatggaggaactaacaaaataattctatgaaatttttattaaattcactatttataattagcttgagtttttgctttaatctcttatatgcagagacaaaaagcttttcattgcaatgtacaggtaaaagtcaatttgaaattgttggttctcctggtgttaaagaagagataaaaactgttacatacaaagtaattgatggcgaacttcaggatctgaataatatagcttgtgaattttctgatgctcttgttacctgtgaatctagtttcttaaactttagaaagcttatcattaatcaagaaagcaaaaccgttaaagattttattgccgggaataaaggctttggccaatacacagagagttttgagggtaaatgtgattaaggtcaataaaattagtggtcaacttttcgaggtggatgtcagtcacgatggccaaacaaaacatcaggttactttgtcgacagatgattatataaagcttagcaaagcaaaaatcagtgacgaagaattaatagtagcctcatttaaatttctgcttgatagagaatcgaatcaatctattctcaaagaatttaacttaaatattattcaaaaatattttcctgaatacctacgtgtgattgattcttacttctaattacaagaaactcatttagaaaaatattgtcttttttgggtaactaacaaatttgggganatgcatgacactgcgcttttttttactacttttttttatactcaatttatctgccgaagaacaacaaccaaaagacgggatttatcaagaaaaatttgacgacggcaaacttaaatatgagatttcatttatngaaggaaaaaaacacggtaaagaaattttttggtatgaaaatggaaataaaaaaatgcaaagtcattttataaatggagttgaagagggnttatggaatcaatggcatgaaaacggggnnaaaaaattagaagtaaattacagcaacggaaaagaaaatggactgtggcaacaatggtatgaagatggaaagcttaaatctaaagtaaactttattaatggtgtgaaagatggtatcgaaacatattggaatcgcgatggaagtatccgataccaagacaactatataaacggaaaaattacaaaaccttaattatggctaactataatgtcagtggattagtcacattatcagagcttgccaaagaaaataatcaatcttggtgggtttatattgttgtatgtgcagatcacagcttctatacaggcataaccaatgatattcataaaagattgtctgtgcataattcaggcaaaggtgcaaaatacacgcaaagtcgactcccagtaaaattagtttatcaagaatgttatcccagcagagttaaagcaggtcaaagagaatatcaaattaaacaattaagtcgctctgataaagaaaaattaattcattcttaaatagacttttaataaaaatcccttaacatagatttatgtatcaatggtttgaaaaactaataaatccctttcctaacggtatttttaagacccctcctaattcactttccaaatttatttggcaatgtactgatggaatacgaggctatattttcctcatggcttttttcaccacagtaatagcaagttttgaggctattttatatacggtacttggaaaaatgattgatttgatgaatgaagaaggcccccaagattttttaattaatcacagttctgttttaattttccttggcattatattgataggtagtactttatttgtggcagcacaaacaatttttaaacatcaatcactagcgggtgtttttcctatgcgtatgcgttggaattttcatcgcttattattaaaccaaagtattgatttttataacaatgaattttcaggacgtattgctaccaaggtcatgcaaactgcactagcagttcgtgatatgtggtttattcttgccgatattttaatttatgttgttgtatacataacaacaatgattattttggtcggaaatctcaattcatatttatttttcccttttttgatatggctatctctctaccttattgcactttttcattttgtacccaagcttgcaaagctttcaaaaaatcaagctgatgccagatcactcatgacgggtcgtattactgatgcctatacaaatattagtgtagtaaaacttttttcccattcaggtcgcgaatcagaatatgcaaagcattcaatggttgaatttctgaaaacggttcatgcccagatgcgacaagtttcgaccattgaagtaataaatcattttctcagtatgttcttggttgtcagtacagcagcgacatgtatctggttatggtcaaatgaagtgattcttgttggcactgtagcaactgcatgtgctatggcattgaggcttaatggtatctcacactgggtcatgtgggagatgacatcactatacgagcaaatgggtacagctcaagatggtcttaatatgttgtcaagacaacaagaaattgaagatactataggatctcggattgttaagtttcctaaatccgatatcaacattaaaaatatcactttttcttataagaaacatgatgccttatttaaaaattttaatttaaaaataaaacaaggagaaaaagttggcttagttgggcgttcgggtgcaggtaaaaccacattgataaatcttctacttcgattttatgatttaaaagagggggaaatcttgattaatgattatgatataaaaaaaattacacaaaacagtctaagagcgaatatcgcgatggtaacgcaagacacctcattactgcatcgaagcattaaagaaaatattgcttatggcaatccaagtgcttctaaaaaaaatatcattgctgctgcgaaaaaagctcaggcacacaattttattataaaattaaaagatcaatatggaaacaagggctacgacaca

SEQ ID NO: 818 - DNA, 4000 bp, Escherichia coli
  misc_feature (1983)..(1983): n is a, c, g, or t
  misc_feature (1988)..(1989): n is a, c, g, or t
  misc_feature (1995)..(1995): n is a, c, g, or t
caggaggcgttcttatgggaacaaaagggatgagtgtgcttaggcatattattgaacaggaaaggaaatttcctcaggcaacaggcagtcttgccggattgttaatggacttaatatatgcggctaaggttatatcaagagaagttaataaggccggccttgttgatatacttggcctcaccggtgaagaaaatgtttctggtgatgaagtaaaaaagctggatgaatatgccaatgacaaattatttaattccatggatcatgggggacatctttgcataatggcatcagaggagagtgacgaagtcattcccattccagataaattccctaaaggtaaatatgtactgctctttgatccacttgatggttcgtccaatatcgatgcgaatgtaagtataggaacaatattttccatacatctaaaaaaaacagatggtgaaaacggaacactcgaagactgccttcaaaagggaagtgatcaggtcgctgccggttacatcatttatggttccagtactgtactggtctatacaacaggccagggcgtaaacggttacacgctagaccccagtgtgggtgagttcctgttatcacatgaagatataaaaaccccctcaaaaggggaaatctatagtgcaaatgaaggaaatgcgaaattctgggatgaagggacaaaaaaatacatcagccatctgaaagaaaaagattctgacacaggcaggccatactcattgcgttacatcgggtcactggtatctgattttcacagaaatctactctacggtggtatattcctatatcctgccgattacaaagacccaaagaaaccaaaaggtaaattgcgtttattatacgaggcctcacctttagcatttatagtagaacaagctggtggaatggcaacaaccggcaaagaaaatataatggacattgtgccgacagagctccatcagaaagtacccttaatcataggaagcaaagaagacgtgcttacttatcagaaatttgtcgctgataacgcaaactaatacaaaaaatacagaataaacctgaatcttgtttcactttcataaagtgtattcccgccttcttctgtagctgttgatactatatttcctttcaatgcatacatctatctcttcctgcctgttttgtaagcctttccacaagaaagaccgaaatgcctgcttgtatcgcacaaccaataccttcgaactcccaaacttcttcataatccattaaagtattaatcgatttgacttgatgtatatattttgatattgtttccttttcttgcaggtggcaaaaatgacaaaggtaaaaatctgtggtataaaaactttaagtgacgcaaaattcgctgttgattacggtgtagatgctattggttttgtgtttgcagaaagtatacgaaatgtaagcaaggaaaaagcacgtgctatcgtacaaaaattacctccattcgttacgactgttggacttttcgtcaatgataccgcagaaaatatcgaagcaatctgcaggttttgcggtctggacgccatacaactccacggaaatgaacgaccaagtttattaaataaactgaaagttttcaaaactattaaagcgtttcgaatacaaaatgaaaaagatattattccaataagaaaatacaagcctgacgccatcctgctcgacggatactcagaaaataaaatgggtggcaccggtacctcttttgactggaagattgtaaaaggattaaggacttcaatccccgttatagttgcaggaggattaacacatttaaatgtctcacaggccataagaatcgtaaatccttacgcagtagatgtttcctccggtgtagaaagtagccccggcaaaaaagacagaaaactgataaagaaatttattgatgccgcaaaagggtagaatttcccgtcattaaatatcatctgataaaatattattgcacacataccttaattttgatanattannagtttncaattttaaagcttattttcagatcgagaagacactatgttaaagaaaagatttacaagcaaaaactgcgttacctgtaaaagatgtatgattgaatgtgctatcaggcattcacaggcacaggattttgccttatcagctctggaaaaaccggctccagtcccaaggattaatataagtttcagaaaagataagccgcatgcaacagtatgtcagaattgcaagaacccaaaatgcatggaggcatgtgattatggcgcaattactaaatatgaggatggtaatgtcgttatagaccaggagaaatgtaatggctgttgggcatgtgttgacgcctgtcctttcggtgcaatcactaaggaaacagaaatgaatgttgccataaactgcgatgattgtaaagggtatgatgatatggcttgcgtagaggcatgtaagacttctgcgctgacatacaaagttgaaaagaaggttgccgttactgttgaagtgtagtaattgctttgttactgttataagaagtacgtaaagggctaaagctttaactcctccgggaattaggctttagccttttatgaaggaatttaaattgtgatagttttaaatgtagttcaattaacctatatattttataaacgttgaacagctagatgatttgtttcaggagaaaagcatgaaaaagattacgttgcaaattaaccagaaggaatatgaagctcatgaaggtgagaccatcatggaggttaccaagaagaaccgtatccatattccctatttatgtcattggagccttctaaagccttttggacagtgcaggatgtgtgttgttgaggtagacgggaatctgggtccggtaactgcctgtaatactactgtctgggatggtatggacgttgtaacagaaagtgataacattgcagaactacggaaaaacaacctgaggttgatacttgccaaccatcccaatgattgtatgacctgtgaaaagacaggtaattgtaagctacagaattacgcctaccaatttgatgtgcatgcagaatggagccagcagactattcgtaaatttccggaacgtcccaataacggtgtgatagagtgggacaaggataaatgtattatgtgtaccaggtgctcacgtacctgcgctgagctccaggggtcatacgcactcggatttaaggctcacgggtttacggcaattggtactccaagcaagactaatatctctaaagaaggtgattgcgaactatgcggacagtgtatagatgcatgcccggttggagcattacaggaattatctgctaaaagcaagggaagatcctggcaatttgaaaaggtcaggaccacctgtacttactgtggaacaggatgtaattactatcttaatgtaaaagataaaaaagtagtttctatctcaccatgctttgaggcccctgtaaataataagggtagtctctgtgtaaaaggcagatttggttatgaacatatccatcataaagacaggctgactacaccactaataaggaagaatggagaactggaagaagccacctgggaagaggcaataaccctcgttgctgaaaagttcacagagattaagaagaagtacggcccggacagtctgggatttctatcttcatcaagatgtacaaatgaagaaaactacatcttccagaaactgggacgaatgatgggtactaataacgtagataactgcgcaagggtttgccatagcgcgagcgtctcaggacttgctgcatgttatggcagtggagcagcgactaattcgttcgggcagatacctgatgctgaactgctattcgtaataggcgctaacccctatgaggcacacccgattgtcggacttaagataaaagaagctcttaataacggggccagactaatcgttggtgacccgcgaagaactcaactagtagacagggcggacatatggctgaatctgataccaggtacaaacattgcgctattaaatggaatcata

SEQ ID NO: 819 - DNA, 4000 bp, Escherichia coli
  misc_feature (1)..(1): n is a, c, g, or t
  misc_feature (3)..(5): n is a, c, g, or t
  misc_feature (7)..(15): n is a, c, g, or t
  misc_feature (17)..(17): n is a, c, g, or t
  misc_feature (19)..(22): n is a, c, g, or t
  misc_feature (24)..(24): n is a, c, g, or t
  misc_feature (26)..(31): n is a, c, g, or t
  misc_feature (34)..(36): n is a, c, g, or t
  misc_feature (38)..(39): n is a, c, g, or t
  misc_feature (41)..(45): n is a, c, g, or t
  misc_feature (47)..(55): n is a, c, g, or t
  misc_feature (57)..(60): n is a, c, g, or t
  misc_feature (62)..(65): n is a, c, g, or t
  misc_feature (67)..(67): n is a, c, g, or t
  misc_feature (69)..(70): n is a, c, g, or t
  misc_feature (72)..(75): n is a, c, g, or t
  misc_feature (77)..(82): n is a, c, g, or t
  misc_feature (84)..(87): n is a, c, g, or t
  misc_feature (89)..(90): n is a, c, g, or t
  misc_feature (92)..(94): n is a, c, g, or t
  misc_feature (98)..(98): n is a, c, g, or t
  misc_feature (100)..(100): n is a, c, g, or t
  misc_feature (102)..(106): n is a, c, g, or t
  misc_feature (108)..(113): n is a, c, g, or t
  misc_feature (116)..(116): n is a, c, g, or t
  misc_feature (118)..(123): n is a, c, g, or t
  misc_feature (125)..(127): n is a, c, g, or t
  misc_feature (129)..(133): n is a, c, g, or t
  misc_feature (138)..(142): n is a, c, g, or t
  misc_feature (144)..(144): n is a, c, g, or t
  misc_feature (146)..(149): n is a, c, g, or t
  misc_feature (151)..(155): n is a, c, g, or t
  misc_feature (157)..(157): n is a, c, g, or t
  misc_feature (161)..(161): n is a, c, g, or t
  misc_feature (163)..(169): n is a, c, g, or t
  misc_feature (172)..(174): n is a, c, g, or t
  misc_feature (176)..(178): n is a, c, g, or t
  misc_feature (180)..(183): n is a, c, g, or t
  misc_feature (185)..(185): n is a, c, g, or t
  misc_feature (187)..(187): n is a, c, g, or t
  misc_feature (189)..(195): n is a, c, g, or t
  misc_feature (197)..(200): n is a, c, g, or t
  misc_feature (202)..(202): n is a, c, g, or t
  misc_feature (204)..(206): n is a, c, g, or t
  misc_feature (208)..(211): n is a, c, g, or t
  misc_feature (213)..(213): n is a, c, g, or t
  misc_feature (216)..(218): n is a, c, g, or t
  misc_feature (222)..(223): n is a, c, g, or t
  misc_feature (225)..(225): n is a, c, g, or t
  misc_feature (227)..(228): n is a, c, g, or t
  misc_feature (230)..(231): n is a, c, g, or t
  misc_feature (234)..(234): n is a, c, g, or t
  misc_feature (236)..(239): n is a, c, g, or t
  misc_feature (243)..(244): n is a, c, g, or t
  misc_feature (247)..(247): n is a, c, g, or t
  misc_feature (249)..(249): n is a, c, g, or t
  misc_feature (252)..(257): n is a, c, g, or t
  misc_feature (259)..(259): n is a, c, g, or t
  misc_feature (270)..(271): n is a, c, g, or t
  misc_feature (274)..(274): n is a, c, g, or t
  misc_feature (387)..(387): n is a, c, g, or t
  misc_feature (391)..(391): n is a, c, g, or t
  misc_feature (612)..(612): n is a, c, g, or t
  misc_feature (652)..(652): n is a, c, g, or t
  misc_feature (691)..(691): n is a, c, g, or t
  misc_feature (694)..(694): n is a, c, g, or t
  misc_feature (697)..(697): n is a, c, g, or t
  misc_feature (700)..(700): n is a, c, g, or t
  misc_feature (712)..(712): n is a, c, g, or t
  misc_feature (877)..(877): n is a, c, g, or t
  misc_feature (1307)..(1307): n is a, c, g, or t
  misc_feature (1653)..(1653): n is a, c, g, or t
  misc_feature (1986)..(1986): n is a, c, g, or t
  misc_feature (1998)..(1998): n is a, c, g, or t
  misc_feature (2130)..(2130): n is a, c, g, or t
  misc_feature (2231)..(2231): n is a, c, g, or t
  misc_feature (2328)..(2328): n is a, c, g, or t
  misc_feature (2331)..(2331): n is a, c, g, or t
  misc_feature (3007)..(3007): n is a, c, g, or t
  misc_feature (3469)..(3469): n is a, c, g, or t
  misc_feature (3976)..(3976): n is a, c, g, or t
ncnnngnnnnnnnnntntnnnntnannnnnngtnnngnntnnnnntnnnnnnnnnannnngnnnnantnncnnnncnnnnnngnnnnanntnnnttgntnannnnngnnnnnnttntnnnnnntnnngnnnnntattnnnnncntnnnngnnnnntnttcncnnnnnnngtnnntnnngnnnncncnannnnnnncnnnngncnnncnnnncnccnnnatgnncncnncnngcntnnnncacnncgncnccnnnnnnancccatgtggcnnccnagatccggctaggtttgcatttcggacagcacccgactcacatagtgggccaccgcatacaccttggacatggtgccggaataatccatgtaggtgggacccaccacccccangccnccgagtggggcgccgggggaaccgtagccggtggccaccaccgaggtgcagcgcaactgatcgtcccgggtttcgtccccgatgagcacgctcacctggtctaggtcttggatgctggccaagagcttcaggataatgacctgctcttccagggcttgaaggatggtgggcagatcgtgcgggttgatgcggatgaggtgggattggccagcaaggatcanccgatcgttggggggttcgaccagggtttcgatgagcacngtgacgcatcgggacaggtggctggtgacctccgggtcnggntgngtnatagcggccagngagccggcggcatcggcgagggttttcccatccagggcctggttgagaaggtcccgcaaaaccatgatgtggtcggcttcgcacgtgtggtctaattccacatggcgttggtcgacccggcccgtgtccgtgatgagcaccagcagcagccgggtgggggtgagngacaccacttcgcagtgtttcacgtggctggcccgcaggttggggagctgcacgatggcggtttggcgggtgaattggctcaggagttgcgcggagcggtgtagcacatcctccaggttgacgccgtcttcgagaaaagtcagtatggtgcggcgttccgcatcggagaggggtttgatgtcgctaagggagtcgacgaacagccggtaccctttttgggtggggagccggccggagctggcatgttgttggctgatatagccttcggcctctagagcggccatgtcgttgcggatggtggcggaggacacgtcgaatctatgccgatcgagcagggctttcgaaccgaccggttcctgggtggcaatatagtcggcgacgattgcacgcagcacctgctggcggcgttcctcggctgcggatgccattnacgtcctcctcacgatgattggttttacgattcacccatcaccaggatatcggcaatcatgccgtcggcgagcagccgcccagcctcggtcacggtaacccgctggtccgacacatcaatcaggcccgggaattcccgcgccttggcgagctccttgtcgttgaaacatgtcaccggcagcccttcccgcagccgcagccccaacatgacccgttcctcatggcgttgcgccgcggtgagcttttcgacgcccgccaccggcagcacccccgacgctagccgctgcgcgtaggtagccgggtgtttgacgttatagaaccggaggtcgcccaggtgggagtgggcnccggggccggcaccccaccagtcttcgtcccgccaatagcccaggttatgccggcattccccaccgggctgcgcccagttggacacctcgtaccaccggtagccggccgccactagggcggcgtcgataagcgcgtaccgatccgcgtacacgtcctcgtcgggggcgggtagttcaccgcgccgcaccttgcgcgccatgcgggtgccgtcctcgacgatgagtgagtaggcgctcacgtggtccaccccggacgctatgacctgctctaccgtggcctgcacgtcagcgtcggtttcggtgggggtgccgtagatcatgtccaggttgatntgtgcgaacccngccgcccgcgcctctgcgaccgcggcgaatgcccggcctggggtgtggcggcgctctagcacctgcagcacgtgggcgctggcggactgcatgcccagggagattcgggtaaacccggcgtcgcggagctcngcgaaaaactcggggctggtggattcgggattggattcggtggtgatctccgcgccggggttgatgccgaaggtgttacggatcgcggtgaggatgcggcncaggccctgggcccccagcagtgacggggtgccacccccgataaaaatcgtgtcggcggggcgtttgaattcggcgagttcgagttcttgttcgagngcntcaagataggtttccggggacgcggaggtacccagttcacctggggtgtaggtattaaaatcgcaataaccacaccgggaggaacaaaacggcacgtgaatatagacgccaaacattgacggtattttacgacacgtgagcgccggcggcacgtcccatctttgccttcacccgggcaacaacagcatcaatgcgggcgcgttcgttcaaaaattcgggcggatgcgaaccccgcatggtgcgggtcacccccggatagtcggcgaccaccgcttcccgccacgccttcgccgcgctggtcaccgcgtcggaggtgtaaccgaacacggtgagtaatgtgcgctcgtcttcggcgctgcgaactgctttctcggtttccgccagttcccaatccacaatgtgggccaggtattgtctaacaagctcggtacgatcttgcagaatgtgattaatctcctgcaccatgactggcgaattatttgtaatggggaactggttccgcagcagctgagcgttcatgggggtgggccgcttcatttgctcgtcaccatcgggcatggtggcggcaacagtgccggaggccagcccggacgtcagtgcttgtcggattccttttagttccctgataatggtgcgggagtcggtcctagcgtcgccgataatgtcttcgaattcngcgacgcagtcctccaccagctcgacatcccagtcggcgatggcttcggcgatattttctatgaaagttgctacctcatcgccgatgttaaagatttcttgggtcaattcccggtggcgcaatgtggcagtcaatacctgcattatttatggtcacccctcattgtcacggtcagattcactgaggttaccaatgaaactggtttttcttacgaagaaagactttaattcagttggtcatgatttgcttcatgcctcgccgaattgagatcaaatctacataaaatatctcacctcacaataagtatcggatttgaagcattagcgctggtaaaggtgctcgatttccttcgcgtatcgacgagcaaccacgttacgctttactttcatggtcggtgtgagctcatcggcttcctcagttaaatctcggtctaggatatggaatttcttaatcgcttcagcntgcgacaccatcttatttgtgtcgtttaccgcatcttgaatttccgcccgcagggccgggtcggtggccagttctgccacggtgcgggattctgggatattgcggttgagtttccaccgccggagggcgtcctcatccagtgtgaccagcagcccgataaagggtttgccatcaccgacaaccatggcctggctgatgagcgggtgggcgaccagggcgtcttccatgggttcgggggacacgttcttgccgccggcggtgacgatgaggtctttcttccggccggtgatgaccaggtgcccggattcgaggatttcacccaggtcaccggtgttaaaccagccgtcgtcggtgaaggattcctcagttgcggttgggttgttccaataaccgtcgaacacggtggtgcccttgatgaggatttcgctgtcgtcattaatccgcaccgatacccccccaatgggtgggcccacggtgccaattttctggtccacgaagtccacggtngcggccgcggtggtttcggtcagc

SEQ ID NO: 820 - DNA, 4000 bp, Escherichia coli
  misc_feature (1)..(1312): n is a, c, g, or t
  misc_feature (1398)..(1399): n is a, c, g, or t
  misc_feature (1401)..(1401): n is a, c, g, or t
  misc_feature (1404)..(1404): n is a, c, g, or t
  misc_feature (1406)..(1409): n is a, c, g, or t
  misc_feature (1496)..(1496): n is a, c, g, or t
  misc_feature (1498)..(1498): n is a, c, g, or t
  misc_feature (1502)..(1502): n is a, c, g, or t
  misc_feature (1526)..(1526): n is a, c, g, or t
  misc_feature (1987)..(1987): n is a, c, g, or t
  misc_feature (1992)..(1992): n is a, c, g, or t
  misc_feature (2832)..(2832): n is a, c, g, or t
  misc_feature (3757)..(3757): n is a, c, g, or t
  misc_feature (3880)..(3880): n is a, c, g, or t
nnnnnnnnnnnnnnnnnnnnnnnnnnnnnnnnnnnnnnnnnnnnnnnnnnnnnnnnnnnnnnnnnnnnnnnnnnnnnnnnnnnnnnnnnnnnnnnnnnnnnnnnnnnnnnnnnnnnnnnnnnnnnnnnnnnnnnnnnnnnnnnnnnnnnnnnnnnnnnnnnnnnnnnnnnnnnnnnnnnnnnnnnnnnnnnnnnnnnnnnnnnnnnnnnnnnnnnnnnnnnnnnnnnnnnnnnnnnnnnnnnnnnnnnnnnnnnnnnnnnnnnnnnnnnnnnnnnnnnnnnnnnnnnnnnnnnnnnnnnnnnnnnnnnnnnnnnnnnnnnnnnnnnnnnnnnnnnnnnnnnnnnnnnnnnnnnnnnnnnnnnnnnnnnnnnnnnnnnnnnnnnnnnnnnnnnnnnnnnnnnnnnnnnnnnnnnnnnnnnnnnnnnnnnnnnnnnnnnnnnnnnnnnnnnnnnnnnnnnnnnnnnnnnnnnnnnnnnnnnnnnnnnnnnnnnnnnnnnnnnnnnnnnnnnnnnnnnnnnnnnnnnnnnnnnnnnnnnnnnnnnnnnnnnnnnnnnnnnnnnnnnnnnnnnnnnnnnnnnnnnnnnnnnnnnnnnnnnnnnnnnnnnnnnnnnnnnnnnnnnnnnnnnnnnnnnnnnnnnnnnnnnnnnnnnnnnnnnnnnnnnnnnnnnnnnnnnnnnnnnnnnnnnnnnnnnnnnnnnnnnnnnnnnnnnnnnnnnnnnnnnnnnnnnnnnnnnnnnnnnnnnnnnnnnnnnnnnnnnnnnnnnnnnnnnnnnnnnnnnnnnnnnnnnnnnnnnnnnnnnnnnnnnnnnnnnnnnnnnnnnnnnnnnnnnnnnnnnnnnnnnnnnnnnnnnnnnnnnnnnnnnnnnnnnnnnnnnnnnnnnnnnnnnnnnnnnnnnnnnnnnnnnnnnnnnnnnnnnnnnnnnnnnnnnnnnnnnnnnnnnnnnnnnnnnnnnnnnnnnnnnnnnnnnnnnnnnnnnnnnnnnnnnnnnnnnnnnnnnnnnnnnnnnnnnnnnnnnnnnnnnnnnnnnnnnnnnnnnnnnnnnnnnnnnnnnnnnnnnnnnnnnnnnnnnnnnnnnnnnnnnnnnnnnnnnnnnnnnnnnnnnnnnnnnnnnnnnnnnnnnnnnnnnnnnnnnnnnnnnnnnnnnnnnnnnnnnnnnnnnnnnnnnnnnnnnnnnnnnnnnnnnnnnnnnnnnnnnnnnnnnnnnnnnnnnnnnnnnnnnnnnnnnnnnnnnnnnnnnnnnnnnnnnnnnnnnnnnnnnnnnnnnnnnnnnnnnnnnnnnnnnnnnnnnnnnnnnnnnnnnnnnnnnnnnnngttaaaatttttagatagttgcatcaaacgatttgaaataagaagtccaacagttgaaaagcgacggcccccaccgtagccaaaannanccnannnnattttatctatcttgccacccaagcttttaatatcagaattcatatgtctcaaatgattggttttaatagttgaaatatcttttttnancccnttcacgtggccgtgcaaacttatnatatgttctcgagtcgttttgggtgtcatgttctccttgcaatttcctgttcagacggtgacaataacgcagtctcactccgtgtcaagcctgtttgtggacttgtttgtgctacgggtgctacgttaggcatagaagtcttgggtaaaggaggcgtttgaattttagattcatctccaggagatccaaagcctttaaatggattaattaaatttttaattctttgaggccagagcgttggattaagtggaacaccagtaggaaaggtgctccaaaatcctcctatcttctgtggttttttagcaggttctcctaaacttcttccatcgtattgaagcttgatcatatccaacccgagtttaggatatgcataacctggtcttaatacataacccacgtaaggatcgtccttagttaatctttgtgcttgcttttcaatagctgcttctcttttcttgaancgtgnctttgaataattagtaggtgtaaaggttccatccattaaattattaatcatccttcgtgaaacattttgttcttttaattttgctctaatattaaaatcattgacccctatgatccgtgcatcctgaatcattctataaaaatctttttgaactcggagtgcttcctgttgcatctgatcaaactctccaatgataacttcaggtcctcgatcttgaaaatctgcagctgaatatatcttttcagtatcatccaccgctcttaataatctttggaattctcctgttttatattccattgattttaatacatcgatattgatgaccctaattcctgacaataaagcgataagctcatctttaagatagataggttgaccgctcttacttaggtctccgcttgcacctccatgaattttttggaaggtagaaacaacaccaggttcaacagcattcattaaatgcataaatgatttttccattttatcggagatgttatctgattcagaataaattctaactccttctgctgttctgcctccacgaccccctaataaaataccagcaggttgaacatcgaggatcgcttccagtcctaactgttcagagatgaaaggacgcatcaattccatgagtggtccatctttatctaacattaatcctagtacaaaatcttctgcgtcttgaggatttaagttctggtcctgggctttttgtaaagctgcggtaaatggtttttgtaagatgtcataaggactaaagtacgaaaaattaaaagcctttgcatttccttgtttaaatccagtcatagcaagcagatttgcatttctatcccagtctgntgcgaaagatctcttgtaagcatcccattgctcttcagaagttcctgttagaacttgtgatgtggccattaatcctgctcccagtcccccaaaccctaaagtagctcccagtaatccacgcactcccatctgtctgattctaacattaggatgagcggattgtcttaaactaaagtccataatacgcacagcatttctaatgatctctgaaggaaaagctatgaaattacctatgggaaattttcttaaagttttaatagctggcggaactttcctgtaagtgggataggtatttctaatttcaaaagctgaaacttcatcgagcaaatcatccatgcttcttttggctcctgttaaaggattaatatcatctaagtattgccccatatattttgcataatcatgaacggctttacgcgtcggcaagacgtctgtcagttgagatttaacccattgtctaccataaattttccaaccactatctccccctgcataaagtcgggttgcagttttcacaaacttggtttctgaaaatctattaaagagtttatctaaattattgatggcaccactttttaaatctcttagaagagatcccatctctgcggtgataatattttcatccatcgttcctaaacgaatttctttttcgataaaattccataattgtttttcattaattcctttgcctggaaagatatcatccaatacaattttaaaagagtcaggtacacttgctcttcctccaatatggcctcgaattaaagggaaggtccctgccgaatacacattacgcatttgagtttgaggagagaaaacggtcttacccatctgtgtcataactttaaactgcatgaggtgacgatagatagatgctctaatgagtttatccatgactcctcccactccttgaactgcattcacnatttctttacttgcaacaagtccttgcatttcactagggagaactcctagctgaggaatcctatgtattttttgagctccaataatataaggccgtgctgcttcttcagttttaaagagccanggtcttgccgcggttaaacctgctcgtgcaatcgcatcatagcctaatttagtataaagctcgctcagcatttcacctgttgtcgttaatacttgagctctaagattagtctcctgtcct

SEQ ID NO: 821 - DNA, 4000 bp, Escherichia coli
  misc_feature (1)..(1792): n is a, c, g, or t
  misc_feature (1975)..(1975): n is a, c, g, or t
  misc_feature (1988)..(1989): n is a, c, g, or t
  misc_feature (2046)..(2046): n is a, c, g, or t
  misc_feature (2980)..(2980): n is a, c, g, or t
nnnnnnnnnnnnnnnnnnnnnnnnnnnnnnnnnnnnnnnnnnnnnnnnnnnnnnnnnnnnnnnnnnnnnnnnnnnnnnnnnnnnnnnnnnnnnnnnnnnnnnnnnnnnnnnnnnnnnnnnnnnnnnnnnnnnnnnnnnnnnnnnnnnnnnnnnnnnnnnnnnnnnnnnnnnnnnnnnnnnnnnnnnnnnnnnnnnnnnnnnnnnnnnnnnnnnnnnnnnnnnnnnnnnnnnnnnnnnnnnnnnnnnnnnnnnnnnnnnnnnnnnnnnnnnnnnnnnnnnnnnnnnnnnnnnnnnnnnnnnnnnnnnnnnnnnnnnnnnnnnnnnnnnnnnnnnnnnnnnnnnnnnnnnnnnnnnnnnnnnnnnnnnnnnnnnnnnnnnnnnnnnnnnnnnnnnnnnnnnnnnnnnnnnnnnnnnnnnnnnnnnnnnnnnnnnnnnnnnnnnnnnnnnnnnnnnnnnnnnnnnnnnnnnnnnnnnnnnnnnnnnnnnnnnnnnnnnnnnnnnnnnnnnnnnnnnnnnnnnnnnnnnnnnnnnnnnnnnnnnnnnnnnnnnnnnnnnnnnnnnnnnnnnnnnnnnnnnnnnnnnnnnnnnnnnnnnnnnnnnnnnnnnnnnnnnnnnnnnnnnnnnnnnnnnnnnnnnnnnnnnnnnnnnnnnnnnnnnnnnnnnnnnnnnnnnnnnnnnnnnnnnnnnnnnnnnnnnnnnnnnnnnnnnnnnnnnnnnnnnnnnnnnnnnnnnnnnnnnnnnnnnnnnnnnnnnnnnnnnnnnnnnnnnnnnnnnnnnnnnnnnnnnnnnnnnnnnnnnnnnnnnnnnnnnnnnnnnnnnnnnnnnnnnnnnnnnnnnnnnnnnnnnnnnnnnnnnnnnnnnnnnnnnnnnnnnnnnnnnnnnnnnnnnnnnnnnnnnnnnnnnnnnnnnnnnnnnnnnnnnnnnnnnnnnnnnnnnnnnnnnnnnnnnnnnnnnnnnnnnnnnnnnnnnnnnnnnnnnnnnnnnnnnnnnnnnnnnnnnnnnnnnnnnnnnnnnnnnnnnnnnnnnnnnnnnnnnnnnnnnnnnnnnnnnnnnnnnnnnnnnnnnnnnnnnnnnnnnnnnnnnnnnnnnnnnnnnnnnnnnnnnnnnnnnnnnnnnnnnnnnnnnnnnnnnnnnnnnnnnnnnnnnnnnnnnnnnnnnnnnnnnnnnnnnnnnnnnnnnnnnnnnnnnnnnnnnnnnnnnnnnnnnnnnnnnnnnnnnnnnnnnnnnnnnnnnnnnnnnnnnnnnnnnnnnnnnnnnnnnnnnnnnnnnnnnnnnnnnnnnnnnnnnnnnnnnnnnnnnnnnnnnnnnnnnnnnnnnnnnnnnnnnnnnnnnnnnnnnnnnnnnnnnnnnnnnnnnnnnnnnnnnnnnnnnnnnnnnnnnnnnnnnnnnnnnnnnnnnnnnnnnnnnnnnnnnnnnnnnnnnnnnnnnnnnnnnnnnnnnnnnnnnnnnnnnnnnnnnnnnnnnnnnnnnnnnnnnnnnnnnnnnnnnnnnnnnnnnnnnnnnnnnnnnnnnnnnnnnnnnnnnnnnnnnnnnnnnnnnnnnnnnnnnnnnnnnnnnnnnnnnnnnnnnnnnnnnnnnnnnnnnnnnnnnnnnnnnnnnnnnnnnnnnnnnnnnnnnnnnnnnnnnnnnnnnnnnnnnnnnnnnnnnnnnnnnnnnnnnnnnnnnnnnnnnnnnnnnnnnnnnnnnnnnnnnnnnnnnnnnnnnnnnnnnnnnnnnnnnnnnnnnnnnnnnnnnnnnnnnnnnnnnnnnnnnnnnnnnnnnnnnnnnnnnnnnnnnnnnnnnnnnnnnnnnncatcaaaaacacacaatcaatcaatcaatcaatcaatcaaaaaaaaaaccaaaaaccatacgacaccaaggattctcaagtggttccccactcaatactaattcggcccattgaggcttaactttcgtgtgccgatgggtacgagtgctttgctcaaggtatgatcgtatgatagtctacggnatgggggatgttnncagccgcggatcacgtggggtatggtagcaaaagttatgggtataattaactatgtnacgtccatagcacatggaccacacgatgcgaatgtattatcgcgcgaccacgtgtcgtactgtgtgatgatttggcctagaccaccgcgttgatgggtgacgtgtgcggtgtaacgctcgcgtgcgttttcgtcgcgcgacgagcggtcgcgcgacgatggctcgcgccgcactcgttcgcgcgcgcgcgagggagatgtatgcgtttgaacggtcgtcgtatgcgcgcgtgcgcgcggcggaggtggcgcgagagagaacgcgcgatgtggaggcggtgttgcgagacgcgcgcgcgctgaagagtcaactggtggctggcgtcgacgaggaggatgacgacgcggatggcgccgtggcggcggcgttggatgcgcgggcgatgcgtgaggagttgctcacgtcgttggatgcgattgagtgtgcgctggcggaggatgcggagcagaggaaacgcgaggatgcgagcgcggaggagaaggacgcggcggtgaataagatgcagctcgacgccgagacgcgcgatagggatccacaggttgtaaagcttgtgaatgacgccatggatgcgttgggtgaagcgaagacagcgatggcgtcgccggtgttgtctatatctcgtacgccagatacggatggagtggatgagaatgcggtcgatgaagccatggagcggacgcgacgcgcgttgggtcgctttacgcaaaatcttgagcgggcgctcgcgctcgaacctgaatactatcacatcagcattcaattggctatgttttatttcacgcacggcgccatcgctgacgcagtgtcgcacatgcgacgcacgtacgaacacacgccagcgtgcgtcgccgcgtatacgctcgccgggcaaatgtacgaagacatcgggctattcaatcacgccgaacagtgctacgcgcaagggataaatacngtattcgaccacgcagattattgggtgtcgctcgccaagctcatgtgcgcaaagttcggcgcggtgtcgaacgcgattcagctcatacgaaccgcgcgcgtcggcggtcccgaaggcaaatggcagaaacctggcaaacatccattggcgctattccttctcgcgtacatgctacatttgaatgggtactccgcggaacctgcgagtttgtacaggcaagccatgaatgcgggtgtgggcatcttgagtctgtatccactcgcaaaggtggcgagtgatggcgacgacgacgatgccgtggagcaatacgccggaatctggcgcgcacacgtggcgcgcgcacgtggcgcgtgcgaagacgacgacaccgcgcgtgcaaaccacgcggaatacgtcgaggcgcattacggctcgctggaaatgttcaactcgtacactgtcgctccgcaatggtttgaagtgttgtcacgcaaggcgagcgcgtacgccgccattcggtcgcacgacgccgacggcgcggtggccgtaccggacacattcacgttcgagaccatcgatggtattcgcgacgacgagacttacattattaaaggcgcatactcgcgatacgcggggtctttcgcgaaaagttcgagtcgtatcgtgcacggcgcggacgccagggcagcgctggaagacgaacgggcgcgagagacgcgtggggaagtcatcgtccagcgctacatccgcgatgtcgtgacggacgaatgcggtcgtaagtgcgcaattcgttgtcacgtcgcgtttctaccaaacgcaaatccagcgctcgacgttgcgtacgtgtgtaagcacgtcgatgtgtattctgccgcgacggtgtatcgtcgcgcgcgcgcgtgtgaggaacgcgcggcaccttcagagtttctcttggatgtcgacgctctcaccaaccgaggcacgagtggtgatggaaattcagccacagtgcgtgaaatgcagttgggtgacgagctcgcgcgagtgctcggtgtcgac

SEQ ID NO: 822 - DNA, 4000 bp, Escherichia coli
  misc_feature (1802)..(1802): n is a, c, g, or t
  misc_feature (1987)..(1987): n is a, c, g, or t
  misc_feature (2734)..(2734): n is a, c, g, or t
  misc_feature (3044)..(3044): n is a, c, g, or t
  misc_feature (3202)..(3202): n is a, c, g, or t
  misc_feature (3880)..(3880): n is a, c, g, or t
tacgacttgcccgtcatgggtatcatacggaaatgttatccagtacaacctacgaagaagccaacaaccggatttggccttggattcgacagaggtcgcgctggttgaaagggtatatgataacctacagggttcatatgcgatcaccgatactgttacttcgacaacttgggtggcgcaaatttgtgggtttccagatcatatttttagccagccttagtcaatttatacttgccccagtcctatggtccttttggattattccttttggtctgccgcatcccattctgccattgctggggccaaatggcgcgcaagccattatcagtttctttttaaccatactcggagcagatattatcatcagtctctttgcgttgagcaaaacgcaccaccgagggcttgggcgctataccccaaccctatggctgtattttcacctcggaacattggccgctttcaaggccggttacgaaatgattttcagcccgtacttttgggataaaaccacccacggccattcactaaaatcggtcaaaactacgccgatgcaaccgccagtgagtcaatctttaaccgagtgacaaatgcagcagaaatatgatctttcaacgccccaaatgcccgatcttcatcacgcatctcaatcgcctctacaatcgcctgatgctcatcgagcgccgttttgcttcgaccctttacagccaatgacgtggtggccatcaacgccatggtgcgatgtaccaaatccaattgttgcaccaaatagcggttgtgcgacgccagatgaatttgtttgtgaaaccgccgattggccaaagacagagccggcggatctccaatcaaaccgcggtcttcaagcaccatatcgcgcaggacccgtacctcttcagtggtggcatgccgagccgccaatcgcgccgccagcgcctctaattccgcgcgtacggcatagagttctgtcatctgattgtggtccaatgtggcgacgataaggctgcggccatcgcgcgccaaaagtgactgcgtctccaaccgttgcaacgcttcccgaatcggagtgcgagagacgccaaaccgctctgcaagatcactttcaaccagtctatctccgggtttgaaaataccgccgtctattgcatccaaaaccaacttataggcatctttctgcggtattttgtttggtgttgtcatctgcgttatctccggcgattacccgaaccaccctagccttgtcttaacccgtccggcaagccttacccaccattgtactgcaggcgggaacacgctaggttttataaatgcttcaaaacagtttccgccatgtcacgcagtgggtctttgatctggacaatacgctctacccgccagaggcgcggttgtttgaccagatcgaagtcaaaatgtcggcctatgtcatgacttcgctgggggtagaccaagccactgccgaccagttgcgtcaggactattggcgcgattacggcacaacgttggccggcttgatgcgtgaacataatgtcgaccccgccccctatctgttcgacgtgcatgatattgacctgtcgcagctgaacaaagatccagctctggccacagcaatcgacgcgctgccaggacgcaaaatagtctataccaatggcaccgcgccctatgcccgtcaggtgttggtagcgcgcggccttgatcaagtgtttgacgccgtctatggcgtcgaggaggccaactatctgcccaaacccgaactgggtgcgtttgagacgatctttgcactggatggtattcatccacggcaagcggcnatgttcgaagatgaagcccgaaatctaaaagtcccccacagtctggggatgcaaaccgttcatgtcgcaccggttccagttacagccccctatctgcagcatcacacggatgatttgcggctgtttcttgaacatctggtctgagacaggatgacgcttcgaccggatcacagtgccgcactagntcccctgaaaagaggaatggcatgatgcagcacaattttgacattattatctcaggcgccggcttggccggactggtcaccgctgtcgccttcggcagcgccgggtttgatgtgctttgcgtcgaccctgccctgcctgtcaccgagcgcgacaaacccggggccgatctgcgcagcaccgcatttttgcaacccgcccgcgattttttggtgtcgttaggactgtgggatcatctctcgacgcatgctaccccgcttgaggtgatgcagatcatggatgctggcgcaggtgataaaacaccaagagtgaccaaacagtttgaagcgcgcgacatctccgaactgccgtttggctggaacctgcccaactggctgttgcggcgcgaaatacttaagatcctgcaccagctgccaaacgtgacgctacgtagcggaattgccagtgtcgggttgtttacccgcctcaaagaagcccgtgtcaccttcagcgatggcagccgcgcgcgggcaaaattggtcatcgccgccgatgggcccaaatcagccatgcgtcgggccgccggaatcgctgtcaacaccagccggtacggtcaaaaagccttggcatttgcagtcacccacgcgcaaccacacgaaaacgtctcaaccgaaattcaccgcagcggcggcccgttcaccttggtcccccttcccgattggcagggtcagccgtcttcggctgtggtctggatggaaacaggggccaangcgaatgcactccatcagatgccagcacctgccttcgaggccgcaatgaccgagcggtcttacagcgtcttgggtccactgacgttggcctcacgcaggaccttatggccaatcatcagccagaccgccggacgcctctgcggccagcggctggcactggtcgcagaggctgcccatgtgatgcccccgatcggcgcacaagggctgaacaccagcttaaaagacgtaaaatgcctgtttcatcatgcgcaagccagaccagatgatctgggggacaccgccatgcttgacgcctatcatcgcgaccggntcaccgatattcgcacccgtgctgcagggatcgagatattgaaccgcacctcaatgctgtctgtaccgaccctacgcgatgccagagctgctgcgttacaggggttgcacggtatcgcacctttgcgaaagtccgttatgcagcttggcctcggcctnccccgagaagggtagcctgctttgcagcacggtatctttacaacatggtacctttacaacaccgtatcgagcaccgttttcaagcgccccagagtggcttcaacattataaagcttatccaaaccgaacagacccaaccggaaggttgaaaacccttcaggctcgtcgcattgcaagggcactccggcggcaatctgcatgccttgggccgcaaatttactgccgttctggatcgccggatcgtcagtatagctcacaaccacccccggcgcgccaaagccatcagcagcgacagaccgaatacctttgcttgctagcatcgcccgtacaccatctcccaattgccactgcgccgcgcacaggcgctcaaagccataatcgcgggtctcaatcatggtgtctcggaacgcgcgcagcgcatcggtcggcatcgtggagtggtaggcctgcccaccgttttcatagatttgcatgatgccgtgccattttttcaaatcaattgcgaaactgtcggatgtagagtgttcaagccgggcaactgccctcgcagacatcataaccaacccggcacagggcgaagccgaccaacccttttgtggcgctgagatcagcacatcgacaccagtggcgcgcatgtcgacccatgcacaccccgaagcaatacaatccagcaccatnagcgccccaacgtcatgtgcggccgccgccagcgcggtgatatacgcgtctggtaatatcacccctgccgaagtttccacatgtggagcaaacaccacatccggcttttcggcccgaatt

SEQ ID NO: 823 - DNA, 4000 bp, Escherichia coli
  misc_feature (28)..(28): n is a, c, g, or t
  misc_feature (31)..(31): n is a, c, g, or t
  misc_feature (37)..(37): n is a, c, g, or t
  misc_feature (70)..(70): n is a, c, g, or t
  misc_feature (103)..(103): n is a, c, g, or t
  misc_feature (115)..(115): n is a, c, g, or t
  misc_feature (139)..(139): n is a, c, g, or t
  misc_feature (142)..(142): n is a, c, g, or t
  misc_feature (144)..(145): n is a, c, g, or t
  misc_feature (178)..(178): n is a, c, g, or t
  misc_feature (190)..(190): n is a, c, g, or t
  misc_feature (286)..(286): n is a, c, g, or t
  misc_feature (304)..(304): n is a, c, g, or t
  misc_feature (313)..(313): n is a, c, g, or t
  misc_feature (328)..(328): n is a, c, g, or t
  misc_feature (331)..(331): n is a, c, g, or t
  misc_feature (382)..(382): n is a, c, g, or t
  misc_feature (607)..(607): n is a, c, g, or t
  misc_feature (616)..(616): n is a, c, g, or t
  misc_feature (661)..(661): n is a, c, g, or t
  misc_feature (721)..(721): n is a, c, g, or t
  misc_feature (757)..(757): n is a, c, g, or t
  misc_feature (829)..(829): n is a, c, g, or t
  misc_feature (832)..(832): n is a, c, g, or t
  misc_feature (862)..(862): n is a, c, g, or t
  misc_feature (991)..(991): n is a, c, g, or t
  misc_feature (1039)..(1039): n is a, c, g, or t
  misc_feature (1041)..(1042): n is a, c, g, or t
  misc_feature (1819)..(1819): n is a, c, g, or t
  misc_feature (2059)..(2059): n is a, c, g, or t
  misc_feature (2215)..(2215): n is a, c, g, or t
  misc_feature (2248)..(2248): n is a, c, g, or t
  misc_feature (2362)..(2362): n is a, c, g, or t
  misc_feature (2587)..(2587): n is a, c, g, or t
  misc_feature (2689)..(2689): n is a, c, g, or t
  misc_feature (2695)..(2695): n is a, c, g, or t
  misc_feature (2776)..(2776): n is a, c, g, or t
  misc_feature (2792)..(2792): n is a, c, g, or t
  misc_feature (2794)..(2794): n is a, c, g, or t
  misc_feature (2860)..(2860): n is a, c, g, or t
  misc_feature (2912)..(2912): n is a, c, g, or t
  misc_feature (2915)..(2916): n is a, c, g, or t
  misc_feature (2919)..(2920): n is a, c, g, or t
  misc_feature (2924)..(2925): n is a, c, g, or t
  misc_feature (2927)..(2927): n is a, c, g, or t
  misc_feature (2931)..(2932): n is a, c, g, or t
  misc_feature (2934)..(2934): n is a, c, g, or t
  misc_feature (2936)..(2936): n is a, c, g, or t
  misc_feature (2942)..(2944): n is a, c, g, or t
  misc_feature (2946)..(2946): n is a, c, g, or t
  misc_feature (2954)..(2957): n is a, c, g, or t
  misc_feature (2961)..(2961): n is a, c, g, or t
  misc_feature (2963)..(2963): n is a, c, g, or t
  misc_feature (2965)..(2966): n is a, c, g, or t
  misc_feature (2969)..(2971): n is a, c, g, or t
  misc_feature (2973)..(2983): n is a, c, g, or t
  misc_feature (2985)..(2987): n is a, c, g, or t
  misc_feature (2991)..(2991): n is a, c, g, or t
  misc_feature (2994)..(2994): n is a, c, g, or t
  misc_feature (2996)..(2996): n is a, c, g, or t
  misc_feature (2999)..(3000): n is a, c, g, or t
  misc_feature (3005)..(3008): n is a, c, g, or t
  misc_feature (3011)..(3011): n is a, c, g, or t
  misc_feature (3014)..(3014): n is a, c, g, or t
  misc_feature (3016)..(3016): n is a, c, g, or t
  misc_feature (3018)..(3020): n is a, c, g, or t
  misc_feature (3022)..(3022): n is a, c, g, or t
  misc_feature (3026)..(3034): n is a, c, g, or t
  misc_feature (3038)..(3042): n is a, c, g, or t
  misc_feature (3049)..(3050): n is a, c, g, or t
  misc_feature (3052)..(3052): n is a, c, g, or t
  misc_feature (3058)..(3060): n is a, c, g, or t
  misc_feature (3062)..(3062): n is a, c, g, or t
  misc_feature (3064)..(3065): n is a, c, g, or t
  misc_feature (3067)..(3067): n is a, c, g, or t
  misc_feature (3069)..(3070): n is a, c, g, or t
  misc_feature (3072)..(3074): n is a, c, g, or t
  misc_feature (3076)..(3076): n is a, c, g, or t
  misc_feature (3079)..(3079): n is a, c, g, or t
  misc_feature (3082)..(3082): n is a, c, g, or t
  misc_feature (3086)..(3086): n is a, c, g, or t
  misc_feature (3089)..(3089): n is a, c, g, or t
  misc_feature (3091)..(3091): n is a, c, g, or t
  misc_feature (3093)..(3095): n is a, c, g, or t
  misc_feature (3097)..(3097): n is a, c, g, or t
  misc_feature (3100)..(3100): n is a, c, g, or t
  misc_feature (3104)..(3105): n is a, c, g, or t
  misc_feature (3113)..(3116): n is a, c, g, or t
  misc_feature (3118)..(3118): n is a, c, g, or t
  misc_feature (3120)..(3120): n is a, c, g, or t
  misc_feature (3122)..(3123): n is a, c, g, or t
  misc_feature (3128)..(3128): n is a, c, g, or t
  misc_feature (3131)..(3132): n is a, c, g, or t
  misc_feature (3135)..(3138): n is a, c, g, or t
  misc_feature (3141)..(3146): n is a, c, g, or t
  misc_feature (3149)..(3151): n is a, c, g, or t
  misc_feature (3154)..(3155): n is a, c, g, or t
  misc_feature (3158)..(3159): n is a, c, g, or t
  misc_feature (3161)..(3161): n is a, c, g, or t
  misc_feature (3163)..(3163): n is a, c, g, or t
  misc_feature (3165)..(3165): n is a, c, g, or t
  misc_feature (3167)..(3167): n is a, c, g, or t
  misc_feature (3170)..(3175): n is a, c, g, or t
  misc_feature (3177)..(3178): n is a, c, g, or t
  misc_feature (3180)..(3180): n is a, c, g, or t
  misc_feature (3183)..(3184): n is a, c, g, or t
  misc_feature (3186)..(3189): n is a, c, g, or t
  misc_feature (3191)..(3192): n is a, c, g, or t
  misc_feature (3194)..(3194): n is a, c, g, or t
  misc_feature (3196)..(3197): n is a, c, g, or t
  misc_feature (3200)..(3202): n is a, c, g, or t
  misc_feature (3204)..(3205): n is a, c, g, or t
  misc_feature (3208)..(3210): n is a, c, g, or t
  misc_feature (3212)..(3219): n is a, c, g, or t
  misc_feature (3221)..(3221): n is a, c, g, or t
  misc_feature (3223)..(3223): n is a, c, g, or t
  misc_feature (3225)..(3235): n is a, c, g, or t
  misc_feature (3241)..(3244): n is a, c, g, or t
  misc_feature (3246)..(3248): n is a, c, g, or t
  misc_feature (3250)..(3262): n is a, c, g, or t
  misc_feature (3268)..(3272): n is a, c, g, or t
  misc_feature (3274)..(3274): n is a, c, g, or t
  misc_feature (3276)..(3278): n is a, c, g, or t
  misc_feature (3282)..(3285): n is a, c, g, or t
  misc_feature (3287)..(3288): n is a, c, g, or t
  misc_feature (3291)..(3293): n is a, c, g, or t
  misc_feature (3295)..(3295): n is a, c, g, or t
  misc_feature (3297)..(3304): n is a, c, g, or t
  misc_feature (3306)..(3306): n is a, c, g, or t
  misc_feature (3308)..(3308): n is a, c, g, or t
  misc_feature (3313)..(3313): n is a, c, g, or t
  misc_feature (3315)..(3318): n is a, c, g, or t
  misc_feature (3320)..(3320): n is a, c, g, or t
  misc_feature (3322)..(3324): n is a, c, g, or t
  misc_feature (3326)..(3331): n is a, c, g, or t
  misc_feature (3333)..(3333): n is a, c, g, or t
  misc_feature (3337)..(3337): n is a, c, g, or t
  misc_feature (3340)..(3340): n is a, c, g, or t
  misc_feature (3343)..(3344): n is a, c, g, or t
  misc_feature (3347)..(3347): n is a, c, g, or t
  misc_feature (3350)..(3352): n is a, c, g, or t
  misc_feature (3356)..(3356): n is a, c, g, or t
  misc_feature (3358)..(3358): n is a, c, g, or t
  misc_feature (3361)..(3361): n is a, c, g, or t
  misc_feature (3364)..(3367): n is a, c, g, or t
  misc_feature (3369)..(3375): n is a, c, g, or t
  misc_feature (3377)..(3379): n is a, c, g, or t
  misc_feature (3385)..(3386): n is a, c, g, or t
  misc_feature (3388)..(3389): n is a, c, g, or t
  misc_feature (3392)..(3395): n is a, c, g, or t
  misc_feature (3397)..(3397): n is a, c, g, or t
  misc_feature (3399)..(3400): n is a, c, g, or t
  misc_feature (3402)..(3404): n is a, c, g, or t
  misc_feature (3406)..(3406): n is a, c, g, or t
  misc_feature (3408)..(3409): n is a, c, g, or t
  misc_feature (3411)..(3411): n is a, c, g, or t
  misc_feature (3413)..(3415): n is a, c, g, or t
  misc_feature (3418)..(3419): n is a, c, g, or t
  misc_feature (3422)..(3423): n is a, c, g, or t
  misc_feature (3425)..(3425): n is a, c, g, or t
  misc_feature (3428)..(3428): n is a, c, g, or t
  misc_feature (3430)..(3431): n is a, c, g, or t
  misc_feature (3433)..(3434): n is a, c, g, or t
  misc_feature (3437)..(3437): n is a, c, g, or t
  misc_feature (3439)..(3440): n is a, c, g, or t
  misc_feature (3448)..(3448): n is a, c, g, or t
  misc_feature (3450)..(3456): n is a, c, g, or t
  misc_feature (3469)..(3469): n is a, c, g, or t
  misc_feature (3474)..(3476): n is a, c, g, or t
  misc_feature (3482)..(3482): n is a, c, g, or t
  misc_feature (3484)..(3484): n is a, c, g, or t
  misc_feature (3486)..(3486): n is a, c, g, or t
  misc_feature (3488)..(3488): n is a, c, g, or t
  misc_feature (3490)..(3492): n is a, c, g, or t
  misc_feature (3495)..(3498): n is a, c, g, or t
  misc_feature (3500)..(3500): n is a, c, g, or t
  misc_feature (3503)..(3503): n is a, c, g, or t
  misc_feature (3506)..(3506): n is a, c, g, or t
  misc_feature (3512)..(3512): n is a, c, g, or t
  misc_feature (3515)..(3519): n is a, c, g, or t
  misc_feature (3523)..(3523): n is a, c, g, or t
  misc_feature (3525)..(3527): n is a, c, g, or t
  misc_feature (3531)..(3531): n is a, c, g, or t
  misc_feature (3533)..(3533): n is a, c, g, or t
  misc_feature (3535)..(3535): n is a, c, g, or t
  misc_feature (3538)..(3543): n is a, c, g, or t
  misc_feature (3548)..(3548): n is a, c, g, or t
  misc_feature (3550)..(3550): n is a, c, g, or t
  misc_feature (3552)..(3552): n is a, c, g, or t
  misc_feature (3554)..(3554): n is a, c, g, or t
  misc_feature (3556)..(3556): n is a, c, g, or t
  misc_feature (3558)..(3560): n is a, c, g, or t
  misc_feature (3562)..(3562): n is a, c, g, or t
  misc_feature (3564)..(3570): n is a, c, g, or t
  misc_feature (3572)..(3573): n is a, c, g, or t
  misc_feature (3578)..(3582): n is a, c, g, or t
  misc_feature (3585)..(3586): n is a, c, g, or t
  misc_feature (3589)..(3589): n is a, c, g, or t
  misc_feature (3592)..(3596): n is a, c, g, or t
  misc_feature (3600)..(3601): n is a, c, g, or t
  misc_feature (3604)..(3605): n is a, c, g, or t
  misc_feature (3607)..(3607): n is a, c, g, or t
  misc_feature (3609)..(3609): n is a, c, g, or t
  misc_feature (3613)..(3617): n is a, c, g, or t
  misc_feature (3619)..(3621): n is a, c, g, or t
  misc_feature (3623)..(3625): n is a, c, g, or t
  misc_feature (3627)..(3631): n is a, c, g, or t
  misc_feature (3633)..(3634): n is a, c, g, or t
  misc_feature (3636)..(3637): n is a, c, g, or t
  misc_feature (3639)..(3639): n is a, c, g, or t
  misc_feature (3648)..(3649): n is a, c, g, or t
  misc_feature (3651)..(3652): n is a, c, g, or t
  misc_feature (3655)..(3655): n is a, c, g, or t
  misc_feature (3657)..(3659): n is a, c, g, or t
  misc_feature (3663)..(3665): n is a, c, g, or t
  misc_feature (3668)..(3668): n is a, c, g, or t
  misc_feature (3671)..(3673): n is a, c, g, or t
  misc_feature (3676)..(3676): n is a, c, g, or t
  misc_feature (3678)..(3679): n is a, c, g, or t
  misc_feature (3682)..(3682): n is a, c, g, or t
  misc_feature (3688)..(3688): n is a, c, g, or t
  misc_feature (3690)..(3691): n is a, c, g, or t
  misc_feature (3696)..(3697): n is a, c, g, or t
  misc_feature (3702)..(3705): n is a, c, g, or t
  misc_feature (3707)..(3707): n is a, c, g, or t
  misc_feature (3710)..(3714): n is a, c, g, or t
  misc_feature (3716)..(3717): n is a, c, g, or t
  misc_feature (3719)..(3719): n is a, c, g, or t
  misc_feature (3722)..(3728): n is a, c, g, or t
  misc_feature (3730)..(3732): n is a, c, g, or t
  misc_feature (3736)..(3736): n is a, c, g, or t
  misc_feature (3738)..(3738): n is a, c, g, or t
  misc_feature (3743)..(3748): n is a, c, g, or t
  misc_feature (3750)..(3753): n is a, c, g, or t
  misc_feature (3755)..(3757): n is a, c, g, or t
  misc_feature (3760)..(3761): n is a, c, g, or t
  misc_feature (3763)..(3763): n is a, c, g, or t
  misc_feature (3768)..(3773): n is a, c, g, or t
  misc_feature (3775)..(3775): n is a, c, g, or t
  misc_feature (3777)..(3781): n is a, c, g, or t
  misc_feature (3784)..(3787): n is a, c, g, or t
  misc_feature (3790)..(3793): n is a, c, g, or t
  misc_feature (3796)..(3796): n is a, c, g, or t
  misc_feature (3799)..(3802): n is a, c, g, or t
  misc_feature (3804)..(3804): n is a, c, g, or t
  misc_feature (3807)..(3814): n is a, c, g, or t
  misc_feature (3817)..(3817): n is a, c, g, or t
  misc_feature (3819)..(3821): n is a, c, g, or t
  misc_feature (3828)..(3828): n is a, c, g, or t
  misc_feature (3830)..(3830): n is a, c, g, or t
  misc_feature (3832)..(3834): n is a, c, g, or t
  misc_feature (3840)..(3842): n is a, c, g, or t
  misc_feature (3845)..(3850): n is a, c, g, or t
  misc_feature (3852)..(3853): n is a, c, g, or t
  misc_feature (3856)..(3858): n is a, c, g, or t
  misc_feature (3860)..(3864): n is a, c, g, or t
  misc_feature (3867)..(3870): n is a, c, g, or t
  misc_feature (3872)..(3872): n is a, c, g, or t
  misc_feature (3874)..(3878): n is a, c, g, or t
  misc_feature (3880)..(3882): n is a, c, g, or t
  misc_feature (3884)..(3887): n is a, c, g, or t
  misc_feature (3895)..(3895): n is a, c, g, or t
  misc_feature (3898)..(3899): n is a, c, g, or t
  misc_feature (3901)..(3903): n is a, c, g, or t
  misc_feature (3908)..(3908): n is a, c, g, or t
  misc_feature (3910)..(3914): n is a, c, g, or t
  misc_feature (3917)..(3917): n is a, c, g, or t
  misc_feature (3919)..(3919): n is a, c, g, or t
  misc_feature (3921)..(3921): n is a, c, g, or t
  misc_feature (3924)..(3925): n is a, c, g, or t
  misc_feature (3928)..(3928): n is a, c, g, or t
  misc_feature (3930)..(3930): n is a, c, g, or t
  misc_feature (3933)..(3936): n is a, c, g, or t
  misc_feature (3941)..(3946): n is a, c, g, or t
  misc_feature (3951)..(3957): n is a, c, g, or t
  misc_feature (3965)..(3965): n is a, c, g, or t
  misc_feature (3970)..(3970): n is a, c, g, or t
  misc_feature (3974)..(3977): n is a, c, g, or t
  misc_feature (3980)..(3981): n is a, c, g, or t
  misc_feature (3983)..(3983): n is a, c, g, or t
  misc_feature (3988)..(3988): n is a, c, g, or t
  misc_feature (3994)..(3994): n is a, c, g, or t
  misc_feature (3997)..(3998): n is a, c, g, or t
actcatagcgtgctcatagcccttttgnacngctgtncttatcgccacgccttcacgcaaaagctcacgnatacgctcatttatgatgacgtttgcatcaacngccataccgatngttagcacgataccagccataccnggnanngtaagcgtcgctccaaaaagcgccatgacagcnactaatataacnacgtctgcaactagcgcgatatttgcaaaaattccagaaattccataataaactagcataaatagcacgactaaaatagatccagcagcaagagcnaccatgctttgattgatnctctcttgncctaaagatggaccnacncttcttttttctagcatcttaacaggtgctaaaagtgcgccacttctaagngcgatcgctacgtcgtgagcctcgtcaagtgtaaagccaccgctgatctggccgctgccgccacctattctttcatttataactggagctgaatagaccttgccatcaagcacgatagcaagccttttaccgacatttgcaccagtaaaatcaccaaaaattctagcaccttctgaatttagtgtgaaatttatgatcggtaggttattttgctgagaaaatgcnacctttgcntcagttagcatcgagccatcaagcacagggatatttttaacgacntattttacgcggtcatttttagcatctttaaagatcacgtcaccatagctttcagcctcngcctcgctcatggtattagcctgatcttgtcttttntcatcaactgccataagctgcaagtgagcagcctttgcgataagatctctcgctctttgctcgtcttcttcngtntttatgccaggaagctcgactaggatattntctttgccttgtctagcgactgttggctcagctagaccaaactgatcaagcctgtttctaatggtctcaacagcttgtgagatcgcatactcgatcgtatcaagcctctcttgctctgtaagagtgatntgatagtttagaccatcttttttgatatcaagcccttttatctcagcnanngccttatcaacctttggagcctcgtcactatcaagtagcgcaaaatcaacactatcttcttttatcttaaatttatcaatgagcacatcttcttttttggcataataatttatgcttccagcgattgacttgatcttagagtggatggcttcgttagtttcaacaccaagaagcatatgaagaccgccttgaaggtcaagtcctagcgaaattttagctccgctttgagtctgaaaaaaagatggcaccgaaaagccaaaaccaaaaaccaaggctaatattaatataatcagcctatatgtaactcttgcgttacgcattatttatcttcgatctttttagctacaaactcgcgtgctatacgaacgattacatcatcgttaagtttaactttgataaaatcattttcggctttaatcacttcgcatataagtccgccattagttactatcttatcgcctttgtcaagagctgcaagcattgctgcgtgggctttttgttgtttttgttgaggtctgataaccaaaaagtaaaatatggcgaaaagcacaacaagaggtagtaatgatgttaaaaaatcagcgttttgcatggatttccttatttgtaagatttttaaacggacattttagcactaaaattataataaaagcctttgtcggtgcttttttgctttctaatttcatttttttagctatggctgaaaatcaaattttaaatttcatctcaccttttctcacgctagctggaattttcgtcatcataaatttaagcagngctggctttttcgcagctggatttttcactgggattttgtggttttactggatcggctttagttttatctactatgagcttgtctggcttatcccatttgtcatcctctttgtagcccttgtttatggacttttgttttggatagcctcttttccaagctttgtggcactaagagccgttttgctatttttaataagctacgtgcatccatttggctttaactggtttaaccttgaagcnacgcttgttttaggcgcttttgagccaaatactagagggcttatatttatatttttagcagccatttctttgagtttaaaaggtaaaattttaaaatttatcctagcttttatctgcctcatcgccgctttgcagtttaaaagtaacgaggcaaanactctgccatttgacgtggagctagtaaatacnaatgtcgctcaaagagtgcgctgggataaaagcttgcgcatgaaatttacaaatgaaaatttagacatgataaatagcgctatcgccgagcaaaaacgtctcatcgtgctgccngagagtgcgtttccattatttatgacaaatgagccactgcttgttgatgagctaaaagagctttcaaaacagataactatcgtagctggcgcgcttgcttatgaaaataagcaaatttataactctgcatttttgtttcaagatggcactcttagacgaatggataagaaatttttagtgccatttggagaagaaattcctctgccaaaatttatgcaagatgcngtaaataagctattttttggcggagctagcgactttaaaaaggctgaaaattttagtgactatgagatagacggggttaaaatcagaaatgctatctgctangaggcnacaagagaggagctttataagggcgaatttgacgtggtcgtggctatcacaaacaacggctggtttgtgccaagtagcgancctgtgcttcaaagantncttataaaacaccttgctacaaagtataataaagcggtctatcacagcgtaaatggctcaaaaagngagatcataaagcctaaaaaagcgttttgggatgagttttaaaagaaatttnaannggnntttnnanaaanncncntttttnnntntttttttnnnnaaancntnnaannntnnnnnnnnnnnannntttnccnanggnnttttnnnnttnccncntnnncntttnnnnnnnnntttnnnnntaaaaanntntctttnnntngnntntnnannncnaanttntttnttntncnnngnggngttnnagaaaaannnncncntnnaaaanttnnaannnnatnnnnnnttnnnccnnttnngngngntnccnnnnnntnnanacnnannnnanntngnnttnnnannccnnntnnnnnnnntntntnnnnnnnnnnntttttnnnnannncnnnnnnnnnnnnntttttnnnnntncnnngcgnnnngnnaannncncnnnnnnnnancnttttntnnnncntnnntnnnnnngngccnccnccnnttnggnnntatncnccnaannnntnnnnnnntnnntttttnncnnttnnnncncnntnnngnanngngnnntgnnttnnanatntnncnnttngnnttttatanannnnnnnttttttttttttntatannncttttngnangncnnnttnnnntnttnaantttttnttnnnnngcgnannncttntntnttnnnnnnctccncncnangngnnnanannnnnnnanngtggnnnnnttnnggnttnnnnntttnnaanntntntttnnnnncnnnannnannnnnanntnngnttttttatnnannccnannntttnnnggnttnnnttngnnaanttttanannttttnncaaannnntnttnnnnnanntntannnnnnngnnnaaantnttttnnnnnncnnnntnnnaanncnaaaannnnnncntnnnnnccnnnnccnnnntcnccnnnncnttnnnnnnnnccntnnnttttatntngnnntttttnnnttnnnnnnannttnnncnnnnnatnnnntngnnnnnannncnnnncttttttnaanntnnnctttncnnnnnatncnanatnngcnanagnnnnttttnnnnnnttttnnnnnnntttttaanagagntttnnnnttnngnttttntctccnccnntt

SEQ ID NO: 824 - DNA, 4000 bp, Escherichia coli
  misc_feature (1167)..(1167): n is a, c, g, or t
  misc_feature (1991)..(1992): n is a, c, g, or t
  misc_feature (3163)..(3163): n is a, c, g, or t
  misc_feature (3768)..(3768): n is a, c, g, or t
tagaaagttgccccttgtccgagttcactttcgacgccaatgcgcccccccataagatcaacaagactacgtgaaatcgatagacctaaacctgtcccaccaaaccgccgcgtaatagtgccttctgcctgggtaaaggcttcaaataatttttgctgattgtctttagagataccaatgccggtatcgctgacacgaaagcgaagaataatgttatcgtttttcatttctactttttcaaccgcgataacgactttccccgcttcggtgaacttcacggcattgcctgcaaggttcatgagaatttgtcgcaatcgaacgggatcgcttaacacccaatcagggcaattgggatcagcaaaggaaatgaaactgacgtcgcgaccgcgttctttaacggatggtgcgagcgtatccgccacgccattaataattgcagacaatgaaacgggaacattttccaagtccattcggccggcttcgatctttgagaaatccagaatgtcatcaatgatgcgaagtaatgcctcagcagattcccgaaccgttctgagcatatttctttgctcacgttcgaggtgggttttctccaggagttcgaccatacctgtcacgccgttcattggcgttcgtatttcatggctcattgcagcaaggaagctggattttgcctgacttgcggattccgcaatttccttagcgacttgtaattcttgttcggcttctttcagcctcgtgatatcaacaatgacgcctgctacgcccgttgtttttccgtcagcgttttcaaactgcgccttctcaatcatgacgtggtgtttcttgccgtcagcaaaaattttctgggtctcgtatgaataacgccgcttgcccatcccgacagcacgatcttgcgggtcatacctttcggctagatccgggcgatctaaatcaaagggagattttccgatgatctcatcaggagttaaaccttcgacggattcaaatgctgcatttgcacctgtaaattgaccgttatcattcttataaaagattgggtttggtatggtatccaataatgttttttggaaatctaactggtcacctagtagtgcttcgcgtcgacgcagggtcgtcacaaggtaatccaatgccctacccatgctggcgatctcatcgttgccgctngtaggaatatccgcttcacgtccttcaacaaaagcagccatacttgtttgtaaaagcaataattggcggatcacatgccagtatagatagatcatcaccaatacaattatgagtaaaccaaacaagctaaatataagtgctttgtttctcgatttatcagtggcgacaccgattgtattctgttcggcaagatacggtttaatgcgttatctgcaattttaccggcaataacttcataattttttgtgaaggaatacagtggtgtatttgtaaaattattgtcatccagtgcatttagaatcgtggaccttgagctttcttgaagtcgccgcgtttcactatcaaattcagacataagtctgatgatcaaaatatcactcgtttgaatggcttttcgaatatcctcgattagagattttgacgcagcaatatctggaaaattatcaaatatatccgcaatactggttatggattttatttcagctcaagttagcggcgtctacaagaacttccagccgacgttcagccaagtcgttaacttgcatttctattttctagttatcggtatagatgactgcgccgatacacgcgacgatcacagcgaccagtgcaaaaactaagaacacacgcgttgcgactgatattctcatttatataacccctaggccgctattgtgcggtttgacgacatcgcgcctttgcgaggatcaacgttaacaacatgagaggcaaccgtgctgttacctgtttcagagtccagcgcgacacaggttaacgtaattgtaaatggggactgtgtggcgcaggcagtgagttgaaattcnntatcactcgtggtctctaatgtccacacccctcctccatgatttttaccttgagacaacatcgtaccgggtggcatgtcacctacggtgatggagagcgcaccgtgtccttcaggatcaaaaagatccgcatccagacgtaaagacattattctaatgtcagtattcgcgtacttcaattgagggagcactgagctgcttaagattgatcgctgtgcaattgtctcatgacccacattagatcgcacgcgccatgaaacctgcaaagaagcaggtttggattgatccataggaggcacaatcgacacatgatcagcttctgatatcgttaagtgccaaataccatcacccatatttttgccgtgcgttaaaaaagcaccgggtaataagcccgtgacgcgcacctgaacatcatgttccgtgttgatgcgtgacaagtgaagtttctgcggggctcgggtgttatcgcgccccccttttggtgctaataatggcattgagggattaaggtctacaggcgcaccaatggggccacgtacagacatatcgtgccacttagaaacatctacaccgagtcgctcgtagatttcacgctcggagtcagatgccttgcctcgaatgaactcacgtaaactcaggagttcatcgacgaatgccgggctttttaaatcattaagtgaagcatccacaatcaagacgtcggcatgcgtatcttgggcagactctacttcaggtacttctgctgtctgggtatcatcgacgtcaatgatcgccagttcttgttctggattgtctaagggacctgaaggttcgatcgccatcaacggttctgagtcattagaaactaacggcaatagttcaggcatggcgtctgtttctgaggtcacacgcgttgcagattttaacgcgctttgaacgtcaataatcaagtcgccttgccatgagataccctggtcatttatctggccttgaacggtaatggccggagaaccagaagaaacatgcgtgtcttcaatatcaataccgacaagtgacggcccatcttctttattgtcgccaaggacctcgtaacgcatcaagatttcgaaaggtaacgagacattcaaaagtggaatgacaaaattggtcggcgcatcaaaaccatttggccatgtcagcacgcgatcaaaagnaattcccccgtcaagataaacgtacaaccgaaccgaacttaattcagggcctggcgcgagacgaattgaaaaggattttccgtgatcgtctgcgaatggatcgttcgcgacatgtatcgttgccgactgaggtgacccatcaccaatatccatgataatgaccatgtcaaaatcactggtatcctccgtgatgacaatactgagattatccaatagcgttgccggcacaacccatgagttgtcgtcattttgcgcgcccgctgttaaggatgcgccagttggaaggccagaaaaagtgaccgaaatatccgttaatatttctggatcattgatgcccacagagacatcaagatcgattacaaccatcgttgaatgatctgagttgctgctttctacgggtgtcgtttcgtcattttcttcagtgaccagggcagcgtcatattttggttcagatatgttttcaggttctggttgaacgaatcgctccggtgatacagcgtccccatcaagcccggcgggaagcgaaggcttctttaatgccttcgaaaccttaggctcaccaacagtttgactgagccagcggatatcgccagcatgcggtgctngtgctaacttttgtccattctggtcttcttctgacatatgtcctcacgcaaaattaaaatgatcccggcgacgcacgtcttgctataagttgcgcggcgtctacgatctcgcttattctagctggatcaacgtgaacgcgcgagagccacgtttatgatggactatttaacgaagagatatacaccgaattatggctgattctgcccacatcctagttgttgaagatgacgc

SEQ ID NO: 825 - DNA, 4000 bp, Escherichia coli
  misc_feature (1)..(2): n is a, c, g, or t
  misc_feature (4)..(4): n is a, c, g, or t
  misc_feature (7)..(7): n is a, c, g, or t
  misc_feature (9)..(9): n is a, c, g, or t
  misc_feature (11)..(12): n is a, c, g, or t
  misc_feature (18)..(18): n is a, c, g, or t
  misc_feature (22)..(24): n is a, c, g, or t
  misc_feature (27)..(27): n is a, c, g, or t
  misc_feature (29)..(30): n is a, c, g, or t
  misc_feature (32)..(34): n is a, c, g, or t
  misc_feature (36)..(36): n is a, c, g, or t
  misc_feature (38)..(38): n is a, c, g, or t
  misc_feature (40)..(42): n is a, c, g, or t
  misc_feature (49)..(49): n is a, c, g, or t
  misc_feature (51)..(51): n is a, c, g, or t
  misc_feature (55)..(58): n is a, c, g, or t
  misc_feature (60)..(60): n is a, c, g, or t
  misc_feature (62)..(62): n is a, c, g, or t
  misc_feature (64)..(64): n is a, c, g, or t
  misc_feature (66)..(67): n is a, c, g, or t
  misc_feature (70)..(70): n is a, c, g, or t
  misc_feature (74)..(75): n is a, c, g, or t
  misc_feature (77)..(82): n is a, c, g, or t
  misc_feature (84)..(86): n is a, c, g, or t
  misc_feature (88)..(89): n is a, c, g, or t
  misc_feature (92)..(92): n is a, c, g, or t
  misc_feature (94)..(95): n is a, c, g, or t
  misc_feature (99)..(99): n is a, c, g, or t
  misc_feature (103)..(105): n is a, c, g, or t
  misc_feature (107)..(107): n is a, c, g, or t
  misc_feature (109)..(110): n is a, c, g, or t
  misc_feature (113)..(114): n is a, c, g, or t
  misc_feature (116)..(116): n is a, c, g, or t
  misc_feature (119)..(119): n is a, c, g, or t
  misc_feature (127)..(128): n is a, c, g, or t
  misc_feature (131)..(135): n is a, c, g, or t
  misc_feature (140)..(141): n is a, c, g, or t
  misc_feature (143)..(144): n is a, c, g, or t
  misc_feature (146)..(146): n is a, c, g, or t
  misc_feature (149)..(154): n is a, c, g, or t
  misc_feature (160)..(160): n is a, c, g, or t
  misc_feature (162)..(164): n is a, c, g, or t
  misc_feature (166)..(168): n is a, c, g, or t
  misc_feature (171)..(171): n is a, c, g, or t
  misc_feature (176)..(176): n is a, c, g, or t
  misc_feature (178)..(178): n is a, c, g, or t
  misc_feature (180)..(180): n is a, c, g, or t
  misc_feature (182)..(183): n is a, c, g, or t
  misc_feature (185)..(188): n is a, c, g, or t
  misc_feature (190)..(190): n is a, c, g, or t
  misc_feature (192)..(192): n is a, c, g, or t
  misc_feature (194)..(195): n is a, c, g, or t
  misc_feature (197)..(201): n is a, c, g, or t
  misc_feature (203)..(206): n is a, c, g, or t
  misc_feature (209)..(209): n is a, c, g, or t
  misc_feature (213)..(213): n is a, c, g, or t
  misc_feature (215)..(216): n is a, c, g, or t
  misc_feature (218)..(218): n is a, c, g, or t
  misc_feature (220)..(220): n is a, c, g, or t
  misc_feature (223)..(223): n is a, c, g, or t
  misc_feature (227)..(227): n is a, c, g, or t
  misc_feature (232)..(235): n is a, c, g, or t
  misc_feature (239)..(239): n is a, c, g, or t
  misc_feature (241)..(243): n is a, c, g, or t
  misc_feature (245)..(246): n is a, c, g, or t
  misc_feature (250)..(260): n is a, c, g, or t
  misc_feature (264)..(264): n is a, c, g, or t
  misc_feature (266)..(267): n is a, c, g, or t
  misc_feature (269)..(272): n is a, c, g, or t
  misc_feature (274)..(274): n is a, c, g, or t
  misc_feature (276)..(277): n is a, c, g, or t
  misc_feature (279)..(279): n is a, c, g, or t
  misc_feature (281)..(283): n is a, c, g, or t
  misc_feature (285)..(287): n is a, c, g, or t
  misc_feature (289)..(290): n is a, c, g, or t
  misc_feature (292)..(292): n is a, c, g, or t
  misc_feature (294)..(296): n is a, c, g, or t
  misc_feature (298)..(298): n is a, c, g, or t
  misc_feature (301)..(301): n is a, c, g, or t
  misc_feature (305)..(305): n is a, c, g, or t
  misc_feature (311)..(316): n is a, c, g, or t
  misc_feature (318)..(318): n is a, c, g, or t
  misc_feature (321)..(323): n is a, c, g, or t
  misc_feature (325)..(327): n is a, c, g, or t
  misc_feature (329)..(330): n is a, c, g, or t
  misc_feature (332)..(333): n is a, c, g, or t
  misc_feature (337)..(339): n is a, c, g, or t
  misc_feature (341)..(342): n is a, c, g, or t
  misc_feature (344)..(344): n is a, c, g, or t
  misc_feature (346)..(346): n is a, c, g, or t
  misc_feature (349)..(350): n is a, c, g, or t
  misc_feature (352)..(352): n is a, c, g, or t
  misc_feature (354)..(356): n is a, c, g, or t
  misc_feature (358)..(358): n is a, c, g, or t
  misc_feature (360)..(362): n is a, c, g, or t
  misc_feature (365)..(365): n is a, c, g, or t
  misc_feature (367)..(368): n is a, c, g, or t
  misc_feature (370)..(371): n is a, c, g, or t
  misc_feature (373)..(375): n is a, c, g, or t
  misc_feature (377)..(377): n is a, c, g, or t
  misc_feature (384)..(384): n is a, c, g, or t
  misc_feature (388)..(392): n is a, c, g, or t
  misc_feature (394)..(394): n is a, c, g, or t
  misc_feature (396)..(396): n is a, c, g, or t
  misc_feature (400)..(400): n is a, c, g, or t
  misc_feature (402)..(413): n is a, c, g, or t
  misc_feature (415)..(418): n is a, c, g, or t
  misc_feature (420)..(421): n is a, c, g, or t
  misc_feature (423)..(424): n is a, c, g, or t
  misc_feature (426)..(426): n is a, c, g, or t
  misc_feature (428)..(428): n is a, c, g, or t
  misc_feature (430)..(432): n is a, c, g, or t
  misc_feature (435)..(438): n is a, c, g, or t
  misc_feature (440)..(440): n is a, c, g, or t
  misc_feature (443)..(444): n is a, c, g, or t
  misc_feature (448)..(450): n is a, c, g, or t
  misc_feature (453)..(453): n is a, c, g, or t
  misc_feature (455)..(458): n is a, c, g, or t
  misc_feature (460)..(460): n is a, c, g, or t
  misc_feature (462)..(464): n is a, c, g, or t
  misc_feature (468)..(474): n is a, c, g, or t
  misc_feature (477)..(477): n is a, c, g, or t
  misc_feature (479)..(480): n is a, c, g, or t
  misc_feature (482)..(485): n is a, c, g, or t
  misc_feature (488)..(493): n is a, c, g, or t
  misc_feature (495)..(497): n is a, c, g, or t
  misc_feature (499)..(499): n is a, c, g, or t
  misc_feature (501)..(501): n is a, c, g, or t
  misc_feature (503)..(504): n is a, c, g, or t
  misc_feature (506)..(506): n is a, c, g, or t
  misc_feature (509)..(509): n is a, c, g, or t
  misc_feature (511)..(512): n is a, c, g, or t
  misc_feature (518)..(519): n is a, c, g, or t
  misc_feature (521)..(521): n is a, c, g, or t
  misc_feature (523)..(523): n is a, c, g, or t
  misc_feature (527)..(529): n is a, c, g, or t
  misc_feature (532)..(535): n is a, c, g, or t
  misc_feature (537)..(537): n is a, c, g, or t
  misc_feature (539)..(545): n is a, c, g, or t
  misc_feature (547)..(552): n is a, c, g, or t
  misc_feature (554)..(557): n is a, c, g, or t
  misc_feature (559)..(561): n is a, c, g, or t
  misc_feature (563)..(563): n is a, c, g, or t
  misc_feature (566)..(566): n is a, c, g, or t
  misc_feature (570)..(572): n is a, c, g, or t
  misc_feature (574)..(574): n is a, c, g, or t
  misc_feature (576)..(576): n is a, c, g, or t
  misc_feature (578)..(581): n is a, c, g, or t
  misc_feature (590)..(592): n is a, c, g, or t
  misc_feature (594)..(595): n is a, c, g, or t
  misc_feature (598)..(598): n is a, c, g, or t
  misc_feature (600)..(602): n is a, c, g, or t
  misc_feature (604)..(604): n is a, c, g, or t
  misc_feature (607)..(618): n is a, c, g, or t
  misc_feature (621)..(623): n is a, c, g, or t
  misc_feature (625)..(630): n is a, c, g, or t
  misc_feature (633)..(633): n is a, c, g, or t
  misc_feature (635)..(635): n is a, c, g, or t
  misc_feature (638)..(638): n is a, c, g, or t
  misc_feature (641)..(642): n is a, c, g, or t
  misc_feature (646)..(647): n is a, c, g, or t
  misc_feature (650)..(650): n is a, c, g, or t
  misc_feature (652)..(652): n is a, c, g, or t
  misc_feature (655)..(657): n is a, c, g, or t
  misc_feature (660)..(661): n is a, c, g, or t
  misc_feature (663)..(663): n is a, c, g, or t
  misc_feature (665)..(665): n is a, c, g, or t
  misc_feature (667)..(674): n is a, c, g, or t
  misc_feature (676)..(678): n is a, c, g, or t
  misc_feature (681)..(689): n is a, c, g, or t
  misc_feature (691)..(697): n is a, c, g, or t
  misc_feature (699)..(700): n is a, c, g, or t
  misc_feature (702)..(702): n is a, c, g, or t
  misc_feature (704)..(704): n is a, c, g, or t
  misc_feature (707)..(707): n is a, c, g, or t
  misc_feature (709)..(711): n is a, c, g, or t
  misc_feature (717)..(717): n is a, c, g, or t
  misc_feature (719)..(719): n is a, c, g, or t
  misc_feature (722)..(723): n is a, c, g, or t
  misc_feature (725)..(727): n is a, c, g, or t
  misc_feature (730)..(734): n is a, c, g, or t
  misc_feature (737)..(739): n is a, c, g, or t
  misc_feature (741)..(741): n is a, c, g, or t
  misc_feature (743)..(745): n is a, c, g, or t
  misc_feature (747)..(755): n is a, c, g, or t
  misc_feature (757)..(759): n is a, c, g, or t
  misc_feature (762)..(771): n is a, c, g, or t
  misc_feature (773)..(773): n is a, c, g, or t
  misc_feature (777)..(777): n is a, c, g, or t
  misc_feature (780)..(780): n is a, c, g, or t
  misc_feature (782)..(785): n is a, c, g, or t
  misc_feature (787)..(789): n is a, c, g, or t
  misc_feature (791)..(792): n is a, c, g, or t
  misc_feature (794)..(796): n is a, c, g, or t
  misc_feature (799)..(806): n is a, c, g, or t
  misc_feature (808)..(819): n is a, c, g, or t
  misc_feature (822)..(825): n is a, c, g, or t
  misc_feature (827)..(827): n is a, c, g, or t
  misc_feature (854)..(854): n is a, c, g, or t
  misc_feature (866)..(878): n is a, c, g, or t
  misc_feature (881)..(881): n is a, c, g, or t
  misc_feature (883)..(884): n is a, c, g, or t
  misc_feature (887)..(889): n is a, c, g, or t
  misc_feature (892)..(893): n is a, c, g, or t
  misc_feature (932)..(938): n is a, c, g, or t
  misc_feature (940)..(943): n is a, c, g, or t
  misc_feature (945)..(945): n is a, c, g, or t
  misc_feature (947)..(960): n is a, c, g, or t
  misc_feature (997)..(1012): n is a, c, g, or t
  misc_feature (1014)..(1023): n is a, c, g, or t
  misc_feature (1025)..(1026): n is a, c, g, or t
  misc_feature (1063)..(1073): n is a, c, g, or t
  misc_feature (1075)..(1077): n is a, c, g, or t
  misc_feature (1079)..(1086): n is a, c, g, or t
  misc_feature (1088)..(1092): n is a, c, g, or t
  misc_feature (1129)..(1129): n is a, c, g, or t
  misc_feature (1132)..(1136): n is a, c, g, or t
  misc_feature (1138)..(1147): n is a, c, g, or t
  misc_feature (1149)..(1150): n is a, c, g, or t
  misc_feature (1152)..(1152): n is a, c, g, or t
  misc_feature (1154)..(1158): n is a, c, g, or t
  misc_feature (1195)..(1204): n is a, c, g, or t
  misc_feature (1206)..(1211): n is a, c, g, or t
  misc_feature (1215)..(1218): n is a, c, g, or t
  misc_feature (1220)..(1221): n is a, c, g, or t
  misc_feature (1224)..(1224): n is a, c, g, or t
  misc_feature (1261)..(1266): n is a, c, g, or t
  misc_feature (1268)..(1268): n is a, c, g, or t
  misc_feature (1270)..(1278): n is a, c, g, or t
  misc_feature (1280)..(1280): n is a, c, g, or t
  misc_feature (1283)..(1286): n is a, c, g, or t
  misc_feature (1288)..(1290): n is a, c, g, or t
  misc_feature (1327)..(1329): n is a, c, g, or t
  misc_feature (1331)..(1335): n is a, c, g, or t
  misc_feature (1337)..(1339): n is a, c, g, or t
  misc_feature (1341)..(1345): n is a, c, g, or t
  misc_feature (1347)..(1347): n is a, c, g, or t
  misc_feature (1349)..(1351): n is a, c, g, or t
  misc_feature (1354)..(1354): n is a, c, g, or t
  misc_feature (1356)..(1356): n is a, c, g, or t
  misc_feature (1393)..(1400): n is a, c, g, or t
  misc_feature (1402)..(1407): n is a, c, g, or t
  misc_feature (1409)..(1413): n is a, c, g, or t
  misc_feature (1415)..(1415): n is a, c, g, or t
  misc_feature (1417)..(1418): n is a, c, g, or t
  misc_feature (1420)..(1420): n is a, c, g, or t
  misc_feature (1422)..(1422): n is a, c, g, or t
  misc_feature (1460)..(1460): n is a, c, g, or t
  misc_feature (1462)..(1466): n is a, c, g, or t
  misc_feature (1468)..(1472): n is a, c, g, or t
  misc_feature (1474)..(1475): n is a, c, g, or t
  misc_feature (1477)..(1477): n is a, c, g, or t
  misc_feature (1479)..(1488): n is a, c, g, or t
  misc_feature (1525)..(1528): n is a, c, g, or t
  misc_feature (1530)..(1535): n is a, c, g, or t
  misc_feature (1537)..(1539): n is a, c, g, or t
  misc_feature (1541)..(1542): n is a, c, g, or t
  misc_feature (1544)..(1544): n is a, c, g, or t
  misc_feature (1546)..(1546): n is a, c, g, or t
  misc_feature (1548)..(1550): n is a, c, g, or t
  misc_feature (1552)..(1554): n is a, c, g, or t
  misc_feature (1591)..(1591): n is a, c, g, or t
  misc_feature (1593)..(1594): n is a, c, g, or t
  misc_feature (1596)..(1600): n is a, c, g, or t
  misc_feature (1602)..(1602): n is a, c, g, or t
  misc_feature (1604)..(1617): n is a, c, g, or t
  misc_feature (1619)..(1620): n is a, c, g, or t
  misc_feature (1657)..(1661): n is a, c, g, or t
  misc_feature (1663)..(1664): n is a, c, g, or t
  misc_feature (1668)..(1671): n is a, c, g, or t
  misc_feature (1674)..(1677): n is a, c, g, or t
  misc_feature (1679)..(1680): n is a, c, g, or t
  misc_feature (1682)..(1682): n is a, c, g, or t
  misc_feature (1684)..(1686): n is a, c, g, or t
  misc_feature (1723)..(1723): n is a, c, g, or t
  misc_feature (1725)..(1726): n is a, c, g, or t
  misc_feature (1728)..(1728): n is a, c, g, or t
  misc_feature (1730)..(1730): n is a, c, g, or t
  misc_feature (1733)..(1736): n is a, c, g, or t
  misc_feature (1738)..(1743): n is a, c, g, or t
  misc_feature (1745)..(1749): n is a, c, g, or t
  misc_feature (1751)..(1752): n is a, c, g, or t
  misc_feature (1789)..(1792): n is a, c, g, or t
  misc_feature (1795)..(1800): n is a, c, g, or t
  misc_feature (1802)..(1803): n is a, c, g, or t
  misc_feature (1806)..(1808): n is a, c, g, or t
  misc_feature (1810)..(1810): n is a, c, g, or t
  misc_feature (1812)..(1815): n is a, c, g, or t
  misc_feature (1856)..(1857): n is a, c, g, or t
  misc_feature (1859)..(1860): n is a, c, g, or t
  misc_feature (1862)..(1866): n is a, c, g, or t
  misc_feature (1868)..(1868): n is a, c, g, or t
  misc_feature (1870)..(1879): n is a, c, g, or t
  misc_feature (1881)..(1881): n is a, c, g, or t
  misc_feature (1883)..(1884): n is a, c, g, or t
  misc_feature (1922)..(1926): n is a, c, g, or t
  misc_feature (1929)..(1929): n is a, c, g, or t
  misc_feature (1934)..(1938): n is a, c, g, or t
  misc_feature (1940)..(1943): n is a, c, g, or t
  misc_feature (1945)..(1950): n is a, c, g, or t
  misc_feature (1989)..(1992): n is a, c, g, or t
  misc_feature (1994)..(1995): n is a, c, g, or t
  misc_feature (1997)..(1997): n is a, c, g, or t
  misc_feature (2000)..(2008): n is a, c, g, or t
  misc_feature (2011)..(2014): n is a, c, g, or t
  misc_feature (2016)..(2016): n is a, c, g, or t
  misc_feature (2380)..(2381): n is a, c, g, or t
  misc_feature (2633)..(2633): n is a, c, g, or t
nnanacntnanntcaaangaannnaancnntnnntngntnnnctacccntnaaannnncncnananncanactnngnnnnnntnnntnntancnntttnactnnntnannacnntntanaattgcannatnnnnnaactnnannanatnnnnnnatatcntnnngnnngtntgacnancntnnannnntncncnntnnnnnannnngtntatnannancngcngaancatannnntttnannncnntttnnnnnnnnnnnatantnnannnnananncntnnnannngnntntnnnancantttnactacnnnnnnanatnnnannntnntnnaacnnnannancnttnntnannntntnnnaananntnnannncnctttaanattnnnnnanantcanannnnnnnnnnnntnnnntnnanntntnannngtnnnncnacnntttnnnatngnnnnanannnaaannnnnnnaanannannnngannnnnngnnnantntnncnacncnntaaaanngnancatnnncannnnangnnnnnnntnnnnnnannnnannngnagnttgnnnancntnnnnaattgcacnnnanncanannntnaannnnnnnnnnnnagnnnannnnnngtntnacnacnntttnnaantncannntanncnancnnnnnnnntnnnatnnnnnnnnntnnnnnnntnngncnacncnnnaaaatngnacnntnnncannnnnaannnanannnannnnnnnnnannntcnnnnnnnnnncncttnaanannnnannntnntnnnacnnnnnnnntnnnnnnnnnnnnctnnnnanagtttgactaccctttaaaattgcacnatactcaaacgnnnnnnnnnnnnngtntnnttnnngcnnagtttgactaccctttaaaattgcaccatactcaaacannnnnnntnnnntntnnnnnnnnnnnnnngtttgactaccctttaaaattgcaccatactcaaacnnnnnnnnnnnnnnnngnnnnnnnnnntnngtttgactaccctttaaaattgcaccatactcaaacnnnnnnnnnnncnnnannnnnnnntnnnnngtttgactaccctttaaaattgcaccatactcaaacntannnnngnnnnnnnnnnanngnannnnngtttgactaccctttaaaattgcaccatactcaaacnnnnnnnnnngnnnnnnaacnnnncnnaangtttgactaccctttaaaattgcaccatactcaaacnnnnnnantnnnnnnnnngntannnncnnngtttgactaccctttaaaattgcaccatactcaaacnnncnnnnngnnngnnnnncncnnngtntngtttgactaccctttaaaattgcaccatactcaaacnnnnnnnntnnnnnntnnnnnangnntnangtttgactaccctttaaaattgcaccatactcaaacancnnnnntnnnnngnngngnnnnnnnnnngtttgactaccctttaaaattgcaccatactcaaacnnnngnnnnnntnnntnntntngnnntnnngtttgactaccctttaaaattgcaccatactcaaacncnntnnnnnangnnnnnnnnnnnnnntnngtttgactaccctttaaaattgcaccatactcaaacnnnnnanntttnnnnttnnnnanntntnnngtttgactaccctttaaaattgcaccatactcaaacngnncntngannnncnnnnnnannnnnanngtttgactaccctttaaaattgcaccatactcaaacnnnncgnnnnnntnntannncncnnnnatagtttgactaccctttaaaattgcaccatactcaaacgnnannannnnntntnnnnnnnnnntngnngtttgactaccctttaaaattgcaccatactcaaaccnnnnnccnaatcnnnnncnnnnannnnnngtttgactaccctttaaaattgcaccatactcaaactcnnnncnngnctnnnnnnnnnaannnncngtttgactaccctttaaaattgcaccatactcaaacctcaaacctcaaatcagagtatttttacgcaccacacgcatcaattcaaaggacagaatgcaattatttatattatagcataaaatcttattcagacaatgatttcgcacaaatctttgtcaatcaaagtgacaaattcttcgtctgttttatttttcaaagtattttccaaaagaaagagacaaacatcctccagctgcgcctcatagtaaagacttttcaaatccttttcgtttaaaaagttttttagattgaagaaggcaaaacattttatccccaaaatccgcgcattaaaatgaataaaagaaactatagactccaacaaacnntccttttcatccttccagcgcactccgtatgcttttaaaagctgagtcaaactgctttccgtatcaaaatctatcggaaaatccgtttctccgttcagtttttcaaaaaaagcataaatcttctcaacaagttccgaatactcgacggcaaagttgttttcggcaatttgcaccaaacaatttaacaatccgtcccgcgcgcgtttgtctcccaaatcaaaattgaaaaaatcatacagcaattttacgtcnttgactaaggatagtttggtatcgccgtcaaaaagaacaaagtttcccgaattgcctttggattgcagtgcaaattctttgcaaaaatcgaaaaacttgttttcgttttccactacaaggacattgactacggcaggcgtcagctccaacggcttttccaagtcaaaatgagacagaatcacagaaccaccaacctttcggcggtgtctacaaccgtcgattgtttctttccgagaacaaattccatattttcaaattgtctttcggtaacggtaagcatctgaatcagccctttgcccgttttgagttttcttactgtttcttttatcacgtttgcggcggtgttgttcagtattattttggaataaacggattcctgcatcatgaaaaaaccgtttttcaaaagcgcggcgcgaaaccttctgtaatcgcgtcgttcctccgccgtttccgtaggcaaatcaaaaaaaaccactacccgcataaacctaaaactcatattcctttatttttgacgtatccccgtcttccaacgcgttgaaaacgctcttggcatatatagcgattgcatcgtttacaacaaaatatttgtcgtctatctttatttctctgttgagaatatcgcaaaggtatcgtttgaaatccggcgtaagttggcaattatcctttccgaataccgctttgtccacaatcaccctgaaaggctccaccaaatcacagctcagattgaattgattgaactcgcttttgtgcgccaatccgagctgtgtattgaaacccaatcccgcgatttccctgttgaacgcagacagcaaaatggtatatccatagttcaacgccccgttcagaaaggttttgtctcctcttttaaagctcaatccgaacaatgcgtcgaagtatacctttgccgcgtgtccttcacggttggttctgtcattcaattcggtaccgtcgacataacttttcaaaagctcgctctgaggacagcaaagttcggaaagaaattccatctgcttttttattttcatacgtacaatcgccgtccacaccgcgcttttatgttcttctttccaattgagctgccgccgcaaaactccgctgcaatcatgtcttccgtaaagcggcaacagctgtgaaaccggattgtgattttcgtcgcaaaacaaaacgttgactttgttttttattaactcgctcaacaaagctgccgtcaaagaaaccgcggtagactccaccacaagcgaggatatctcgttaagaaacaactttttgacttcttcgccgcgacagacgagatatcccagcttgtattccaacttgcaacgcccccttaccactacaacccgccagctcataggaaccgcttg

SEQ ID NO: 826 - DNA, 4000 bp, Escherichia coli
  misc_feature (344)..(344): n is a, c, g, or t
  misc_feature (366)..(366): n is a, c, g, or t
  misc_feature (381)..(381): n is a, c, g, or t
  misc_feature (390)..(390): n is a, c, g, or t
  misc_feature (393)..(393): n is a, c, g, or t
  misc_feature (402)..(402): n is a, c, g, or t
  misc_feature (408)..(408): n is a, c, g, or t
  misc_feature (417)..(417): n is a, c, g, or t
  misc_feature (435)..(435): n is a, c, g, or t
  misc_feature (477)..(477): n is a, c, g, or t
  misc_feature (483)..(483): n is a, c, g, or t
  misc_feature (1029)..(1029): n is a, c, g, or t
  misc_feature (1404)..(1404): n is a, c, g, or t
  misc_feature (1485)..(1485): n is a, c, g, or t
  misc_feature (1965)..(1965): n is a, c, g, or t
  misc_feature (1988)..(1988): n is a, c, g, or t
  misc_feature (2014)..(2014): n is a, c, g, or t
  misc_feature (2119)..(2119): n is a, c, g, or t
  misc_feature (2134)..(2134): n is a, c, g, or t
  misc_feature (2143)..(2143): n is a, c, g, or t
  misc_feature (2155)..(2155): n is a, c, g, or t
  misc_feature (2176)..(2176): n is a, c, g, or t
  misc_feature (2181)..(2182): n is a, c, g, or t
  misc_feature (2200)..(2200): n is a, c, g, or t
  misc_feature (2224)..(2224): n is a, c, g, or t
  misc_feature (2251)..(2251): n is a, c, g, or t
  misc_feature (2278)..(2278): n is a, c, g, or t
  misc_feature (2293)..(2293): n is a, c, g, or t
  misc_feature (2296)..(2296): n is a, c, g, or t
  misc_feature (2298)..(2298): n is a, c, g, or t
  misc_feature (2309)..(2309): n is a, c, g, or t
  misc_feature (2327)..(2327): n is a, c, g, or t
  misc_feature (2350)..(2350): n is a, c, g, or t
  misc_feature (2400)..(2402): n is a, c, g, or t
  misc_feature (2481)..(2483): n is a, c, g, or t
  misc_feature (2485)..(2485): n is a, c, g, or t
  misc_feature (2488)..(2490): n is a, c, g, or t
  misc_feature (2493)..(2493): n is a, c, g, or t
  misc_feature (2497)..(2500): n is a, c, g, or t
  misc_feature (2502)..(2504): n is a, c, g, or t
  misc_feature (2506)..(2506): n is a, c, g, or t
  misc_feature (2508)..(2511): n is a, c, g, or t
  misc_feature (2515)..(2526): n is a, c, g, or t
  misc_feature (2528)..(2528): n is a, c, g, or t
  misc_feature (2530)..(2531): n is a, c, g, or t
  misc_feature (2533)..(2535): n is a, c, g, or t
  misc_feature (2538)..(2539): n is a, c, g, or t
  misc_feature (2541)..(2545): n is a, c, g, or t
  misc_feature (2548)..(2551): n is a, c, g, or t
  misc_feature (2553)..(2555): n is a, c, g, or t
  misc_feature (2557)..(2560): n is a, c, g, or t
  misc_feature (2562)..(2563): n is a, c, g, or t
  misc_feature (2565)..(2570): n is a, c, g, or t
  misc_feature (2572)..(2578): n is a, c, g, or t
  misc_feature (2580)..(2586): n is a, c, g, or t
  misc_feature (2588)..(2609): n is a, c, g, or t
  misc_feature (2611)..(2618): n is a, c, g, or t
  misc_feature (2620)..(2631): n is a, c, g, or t
  misc_feature (2634)..(2660): n is a, c, g, or t
  misc_feature (2662)..(2665): n is a, c, g, or t
  misc_feature (2667)..(2678): n is a, c, g, or t
  misc_feature (2680)..(2686): n is a, c, g, or t
  misc_feature (2689)..(2701): n is a, c, g, or t
  misc_feature (2703)..(2717): n is a, c, g, or t
  misc_feature (2719)..(2734): n is a, c, g, or t
  misc_feature (2736)..(2736): n is a, c, g, or t
  misc_feature (2738)..(2743): n is a, c, g, or t
  misc_feature (2745)..(2745): n is a, c, g, or t
  misc_feature (2747)..(2752): n is a, c, g, or t
  misc_feature (2754)..(2754): n is a, c, g, or t
  misc_feature (2756)..(2760): n is a, c, g, or t
  misc_feature (2762)..(2780): n is a, c, g, or t
  misc_feature (2782)..(2789): n is a, c, g, or t
  misc_feature (2791)..(2802): n is a, c, g, or t
  misc_feature (2804)..(2829): n is a, c, g, or t
  misc_feature (2831)..(2832): n is a, c, g, or t
  misc_feature (2834)..(2857): n is a, c, g, or t
  misc_feature (2859)..(2863): n is a, c, g, or t
  misc_feature (2865)..(2879): n is a, c, g, or t
  misc_feature (2881)..(2895): n is a, c, g, or t
  misc_feature (2898)..(2900): n is a, c, g, or t
  misc_feature (2902)..(2907): n is a, c, g, or t
  misc_feature (2909)..(2918): n is a, c, g, or t
  misc_feature (2920)..(2926): n is a, c, g, or t
  misc_feature (2928)..(2930): n is a, c, g, or t
  misc_feature (2932)..(2934): n is a, c, g, or t
  misc_feature (2936)..(2936): n is a, c, g, or t
  misc_feature (2938)..(2940): n is a, c, g, or t
  misc_feature (2942)..(2945): n is a, c, g, or t
  misc_feature (2947)..(2949): n is a, c, g, or t
  misc_feature (2951)..(2952): n is a, c, g, or t
  misc_feature (2954)..(2956): n is a, c, g, or t
  misc_feature (2958)..(2966): n is a, c, g, or t
  misc_feature (2968)..(2977): n is a, c, g, or t
  misc_feature (2980)..(2981): n is a, c, g, or t
  misc_feature (2983)..(2983): n is a, c, g, or t
  misc_feature (2985)..(2989): n is a, c, g, or t
  misc_feature (2991)..(2999): n is a, c, g, or t
  misc_feature (3001)..(3003): n is a, c, g, or t
  misc_feature (3005)..(3006): n is a, c, g, or t
  misc_feature (3008)..(3014): n is a, c, g, or t
  misc_feature (3018)..(3021): n is a, c, g, or t
  misc_feature (3023)..(3024): n is a, c, g, or t
  misc_feature (3026)..(3029): n is a, c, g, or t
  misc_feature (3031)..(3038): n is a, c, g, or t
  misc_feature (3041)..(3046): n is a, c, g, or t
  misc_feature (3049)..(3049): n is a, c, g, or t
  misc_feature (3051)..(3057): n is a, c, g, or t
  misc_feature (3059)..(3079): n is a, c, g, or t
  misc_feature (3083)..(3088): n is a, c, g, or t
  misc_feature (3090)..(3092): n is a, c, g, or t
  misc_feature (3094)..(3094): n is a, c, g, or t
  misc_feature (3096)..(3096): n is a, c, g, or t
  misc_feature (3098)..(3112): n is a, c, g, or t
  misc_feature (3115)..(3115): n is a, c, g, or t
  misc_feature (3117)..(3129): n is a, c, g, or t
  misc_feature (3131)..(3137): n is a, c, g, or t
  misc_feature (3139)..(3139): n is a, c, g, or t
  misc_feature (3141)..(3148): n is a, c, g, or t
  misc_feature (3150)..(3163): n is a, c, g, or t
  misc_feature (3165)..(3165): n is a, c, g, or t
  misc_feature (3167)..(3185): n is a, c, g, or t
  misc_feature (3187)..(3196): n is a, c, g, or t
  misc_feature (3199)..(3215): n is a, c, g, or t
  misc_feature (3217)..(3222): n is a, c, g, or t
  misc_feature (3224)..(3232): n is a, c, g, or t
  misc_feature (3234)..(3234): n is a, c, g, or t
  misc_feature (3236)..(3252): n is a, c, g, or t
  misc_feature (3255)..(3269): n is a, c, g, or t
  misc_feature (3272)..(3276): n is a, c, g, or t
  misc_feature (3278)..(3284): n is a, c, g, or t
  misc_feature (3286)..(3292): n is a, c, g, or t
  misc_feature (3294)..(3304): n is a, c, g, or t
  misc_feature (3306)..(3306): n is a, c, g, or t
  misc_feature (3308)..(3311): n is a, c, g, or t
  misc_feature (3314)..(3325): n is a, c, g, or t
  misc_feature (3327)..(3347): n is a, c, g, or t
  misc_feature (3350)..(3350): n is a, c, g, or t
  misc_feature (3352)..(3373): n is a, c, g, or t
  misc_feature (3375)..(3392): n is a, c, g, or t
  misc_feature (3394)..(3399): n is a, c, g, or t
  misc_feature (3401)..(3415): n is a, c, g, or t
  misc_feature (3417)..(3433): n is a, c, g, or t
  misc_feature (3435)..(3444): n is a, c, g, or t
  misc_feature (3446)..(3453): n is a, c, g, or t
  misc_feature (3455)..(3473): n is a, c, g, or t
  misc_feature (3475)..(3500): n is a, c, g, or t
  misc_feature (3502)..(3506): n is a, c, g, or t
  misc_feature (3508)..(3586): n is a, c, g, or t
  misc_feature (3588)..(3616): n is a, c, g, or t
  misc_feature (3618)..(3620): n is a, c, g, or t
  misc_feature (3623)..(3623): n is a, c, g, or t
  misc_feature (3625)..(3626): n is a, c, g, or t
  misc_feature (3628)..(3632): n is a, c, g, or t
  misc_feature (3634)..(3638): n is a, c, g, or t
  misc_feature (3641)..(3670): n is a, c, g, or t
  misc_feature (3672)..(3680): n is a, c, g, or t
  misc_feature (3682)..(3682): n is a, c, g, or t
  misc_feature (3684)..(3698): n is a, c, g, or t
  misc_feature (3700)..(3703): n is a, c, g, or t
  misc_feature (3705)..(3717): n is a, c, g, or t
  misc_feature (3719)..(3756): n is a, c, g, or t
  misc_feature (3758)..(3763): n is a, c, g, or t
  misc_feature (3765)..(3775): n is a, c, g, or t
  misc_feature (3777)..(3788): n is a, c, g, or t
  misc_feature (3790)..(3829): n is a, c, g, or t
  misc_feature (3833)..(3849): n is a, c, g, or t
  misc_feature (3851)..(3874): n is a, c, g, or t
  misc_feature (3877)..(3903): n is a, c, g, or t
  misc_feature (3905)..(3908): n is a, c, g, or t
  misc_feature (3910)..(3912): n is a, c, g, or t
  misc_feature (3914)..(3923): n is a, c, g, or t
  misc_feature (3925)..(3944): n is a, c, g, or t
  misc_feature (3946)..(3952): n is a, c, g, or t
  misc_feature (3954)..(3954): n is a, c, g, or t
  misc_feature (3956)..(3959): n is a, c, g, or t
  misc_feature (3961)..(3973): n is a, c, g, or t
  misc_feature (3975)..(3975): n is a, c, g, or t
  misc_feature (3977)..(4000): n is a, c, g, or t
ttgaactcaactctactaaaagaacccgacatagccggatcaagcgtatgctgttccaatcccatcaaatcctcaaatgttttttgttgtgccgtaaaacagttttcgttcagatatttcagcaaatttcctttttctataattccattgtcatccagaatctttacagacaccgaaaaaagagatgccgtgggaacttcaaccatatctcccggttcaaatgttcgccatccacgacttccaagctgtctaaacaaatattgatattgacttggagatagtacctccaacatatatgctctacgaatcatcatcgcaattgagacatgccatttttcttttantcttaaatattcatttaaaacngttggatattgaagntctttcaanaangcttctttnggcagnaaaaatgcngatgcaaattgatttgcntctgattcattgctccgatactcggcatctgcttgcgatttnacatcngaaacaatatgaccgagtatccagtgtcctagttcgtgagccaacgtaaagttcaatcttgcaggtgttgttttatctgtattatatgttgtgaaatagaacctcttgctttctccattattggcaaggaccggaatgtgactgattgcgtccaaatgccctacgttttccgagaaagaagttaccacaattccaagattttgtaacagatagctcatattacgaatgggcctatccgataagtccaatttttcccgaattttttttgcgattagttccatgtcagaacactctgctacagatttcatacaatcgatcaattgttcggttgatggatattcaatatattctgcaaaaaagtcataaatatatgatttcaatacatcaatgtttgtttgccgtagttttacggctcttgtcgtggttgtagttgctctacaatatgcaactccgggactaaaattatcgctgctaccttcaaagaaaaatttcggtggaaatttcaattcttgcgaaattgctaatactttatcggcacttggtttnattaaaccattttcatactgagagacagtttgctttgtcacccctatcttttctgctagcttaggactggaaatattttggatttcacgagccaatgtcagccgcattccattaaactcggatgtaacaatggcacccattttttacccatctttccgtacaaattttttccgcggtttgaattccggaatactgtcgatttgaacgccatactcattaccagtttcttccttaaacttagtaatttcatcttccggaacagcttctttccaattcatcggaattgcagaatccaaattcatttcatcaacgatgcaaccatttgcattcaaaatttccaatgtacagcttctgatcaattgagctaaatccaancggtacgttaaaattccaaatctcaagacttcaccgtctactgcttgctccaattcatcgaagggcttttcggctttttgntgcacagctttatcttgtccaaacagtgacatctgctcatactggggaaccatttcattcaaatcttgattagccggaagtcccgaaaaaacgtaatgcatctcaccattctgcaatttgacaagtctattgcggaaattttcttggcgaagaatcataatggctgttttgctgtgaggatcatatgccacagcatacttccagcttccagagaccatcaaaaccacacgatatcctgcctttgttaaatgttcatgttcattttgaaagatatgtgcccagccgtgctgtccttttccgttagaatacatcaaatcggcatagacaccttcattttcttccatgccatggtagatgctttcaacaatcagttttgccattgccattgcggaatcttcaaaaaatgcttttttcatgtgaacctccttcacagatgaaattataagcggtggaattttcttatacttcatattttacatnaattttgtaaaaagtcaagtgancgaatgacgttttatgcattcaaatncaaaagcgcagcacctcccaaaaagtactgcgcttttgtataatttgagctaccagttagtcctccaacccacagctcccggtcacattcttcaaatattcctcngggtcaccattcagnatcaaatcngcatagcccagngggtcattgtagatgagatantccanntccgacctctgcgccatngtcacatccaacgcatcctcgacnccggtgcaattgatggaaatttttctnccatcccggagcagcagctccacgcanccggtgtccatgttnaantngcaaactcttncatcgtacttcatgttcntgtcctcctgaaatcatgttgtngcttatgtcggtcaatctatgatttcggatttcatcttccacggacaccnnnattgaattttccgaagaaaacaaataatccgaacccatctcctatcggaaacaagttcggattatttttgtttggtccnnntngcnnnaancgannnnannncntnnnnaacnnnnnnnnnnnncncnncnnnaanngnnnnncannnngnnntnnnntnntnnnnnncnnnnnnngnnnnnnnannnnnnnnnnnnnnnnnnnnnntnnnnnnnntnnnnnnnnnnnnatnnnnnnnnnnnnnnnnnnnnnnnnnnntnnnntnnnnnnnnnnnntnnnnnnntcnnnnnnnnnnnnnannnnnnnnnnnnnnncnnnnnnnnnnnnnnnnantnnnnnncnannnnnncngnnnnntnnnnnnnnnnnnnnnnnnngnnnnnnnngnnnnnnnnnnnntnnnnnnnnnnnnnnnnnnnnnnnnnntnngnnnnnnnnnnnnnnnnnnnnnnnntnnnnncnnnnnnnnnnnnnnntnnnnnnnnnnnnnnnctnnncnnnnnngnnnnnnnnnngnnnnnnncnnngnnnangnnngnnnncnnntnncnnncnnnnnnnnncnnnnnnnnnngtnncngnnnnngnnnnnnnnnannntnncnnnnnnngccnnnncnntnnnngnnnnnnnnctnnnnnncangnnnnnnncnnnnnnnnnnnnnnnnnnnnncaannnnnncnnngngntnnnnnnnnnnnnnnncgngnnnnnnnnnnnnncnnnnnnntncnnnnnnnncnnnnnnnnnnnnnnantnnnnnnnnnnnnnnnnnnngnnnnnnnnnnacnnnnnnnnnnnnnnnnngnnnnnncnnnnnnnnngnannnnnnnnnnnnnnnnncannnnnnnnnnnnnnncgnnnnnannnnnnngnnnnnnncnnnnnnnnnnncncnnnnaannnnnnnnnnnncnnnnnnnnnnnnnnnnnnnnnaanannnnnnnnnnnnnnnnnnnnnngnnnnnnnnnnnnnnnnnncnnnnnnannnnnnnnnnnnnnngnnnnnnnnnnnnnnnnncnnnnnnnnnntnnnnnnnncnnnnnnnnnnnnnnnnnnncnnnnnnnnnnnnnnnnnnnnnnnnnnannnnntnnnnnnnnnnnnnnnnnnnnnnnnnnnnnnnnnnnnnnnnnnnnnnnnnnnnnnnnnnnnnnnnnnnnnnnnnnnnnnncnnnnnnnnnnnnnnnnnnnnnnnnnnnnngnnngcngnncnnnnncnnnnngtnnnnnnnnnnnnnnnnnnnnnnnnnnnnnngnnnnnnnnnangnnnnnnnnnnnnnnngnnnnannnnnnnnnnnnncnnnnnnnnnnnnnnnnnnnnnnnnnnnnnnnnnnnnnnannnnnnannnnnnnnnnngnnnnnnnnnnnncnnnnnnnnnnnnnnnnnnnnnnnnnnnnnnnnnnnnnnnnggcnnnnnnnnnnnnnnnnncnnnnnnnnnnnnnnnnnnnnnnnngcnnnnnnnnnnnnnnnnnnnnnnnnnnngnnnncnnncnnnnnnnnnncnnnnnnnnnnnnnnnnnnnngnnnnnnncngnnnncnnnnnnnnnnnnncncnnnnnnnnnnnnnnnnnnnnnnnn

SEQ ID NO: 827 - DNA, 4000 bp, Escherichia coli
  misc_feature (1)..(8): n is a, c, g, or t
  misc_feature (10)..(10): n is a, c, g, or t
  misc_feature (12)..(12): n is a, c, g, or t
  misc_feature (15)..(20): n is a, c, g, or t
  misc_feature (22)..(25): n is a, c, g, or t
  misc_feature (27)..(29): n is a, c, g, or t
  misc_feature (31)..(31): n is a, c, g, or t
  misc_feature (33)..(37): n is a, c, g, or t
  misc_feature (39)..(43): n is a, c, g, or t
  misc_feature (45)..(48): n is a, c, g, or t
  misc_feature (50)..(51): n is a, c, g, or t
  misc_feature (53)..(55): n is a, c, g, or t
  misc_feature (59)..(62): n is a, c, g, or t
  misc_feature (64)..(68): n is a, c, g, or t
  misc_feature (70)..(77): n is a, c, g, or t
  misc_feature (79)..(79): n is a, c, g, or t
  misc_feature (81)..(86): n is a, c, g, or t
  misc_feature (88)..(92): n is a, c, g, or t
  misc_feature (94)..(100): n is a, c, g, or t
  misc_feature (102)..(103): n is a, c, g, or t
  misc_feature (106)..(114): n is a, c, g, or t
  misc_feature (117)..(118): n is a, c, g, or t
  misc_feature (120)..(122): n is a, c, g, or t
  misc_feature (125)..(125): n is a, c, g, or t
  misc_feature (127)..(127): n is a, c, g, or t
  misc_feature (129)..(138): n is a, c, g, or t
  misc_feature (140)..(144): n is a, c, g, or t
  misc_feature (146)..(146): n is a, c, g, or t
  misc_feature (148)..(151): n is a, c, g, or t
  misc_feature (153)..(154): n is a, c, g, or t
  misc_feature (156)..(159): n is a, c, g, or t
  misc_feature (161)..(163): n is a, c, g, or t
  misc_feature (165)..(165): n is a, c, g, or t
  misc_feature (167)..(167): n is a, c, g, or t
  misc_feature (169)..(171): n is a, c, g, or t
  misc_feature (173)..(175): n is a, c, g, or t
  misc_feature (177)..(179): n is a, c, g, or t
  misc_feature (181)..(193): n is a, c, g, or t
  misc_feature (197)..(199): n is a, c, g, or t
  misc_feature (201)..(202): n is a, c, g, or t
  misc_feature (204)..(212): n is a, c, g, or t
  misc_feature (214)..(216): n is a, c, g, or t
  misc_feature (219)..(227): n is a, c, g, or t
  misc_feature (229)..(230): n is a, c, g, or t
  misc_feature (232)..(239): n is a, c, g, or t
  misc_feature (241)..(243): n is a, c, g, or t
  misc_feature (248)..(249): n is a, c, g, or t
  misc_feature (251)..(252): n is a, c, g, or t
  misc_feature (254)..(258): n is a, c, g, or t
  misc_feature (260)..(264): n is a, c, g, or t
  misc_feature (269)..(269): n is a, c, g, or t
  misc_feature (271)..(271): n is a, c, g, or t
  misc_feature (273)..(273): n is a, c, g, or t
  misc_feature (275)..(276): n is a, c, g, or t
  misc_feature (278)..(283): n is a, c, g, or t
  misc_feature (285)..(286): n is a, c, g, or t
  misc_feature (288)..(288): n is a, c, g, or t
  misc_feature (290)..(290): n is a, c, g, or t
  misc_feature (292)..(292): n is a, c, g, or t
  misc_feature (297)..(303): n is a, c, g, or t
  misc_feature (305)..(305): n is a, c, g, or t
  misc_feature (307)..(314): n is a, c, g, or t
  misc_feature (316)..(327): n is a, c, g, or t
  misc_feature (330)..(335): n is a, c, g, or t
  misc_feature (337)..(338): n is a, c, g, or t
  misc_feature (340)..(343): n is a, c, g, or t
  misc_feature (345)..(345): n is a, c, g, or t
  misc_feature (349)..(349): n is a, c, g, or t
  misc_feature (351)..(354): n is a, c, g, or t
  misc_feature (356)..(364): n is a, c, g, or t
  misc_feature (366)..(370): n is a, c, g, or t
  misc_feature (372)..(377): n is a, c, g, or t
  misc_feature (379)..(379): n is a, c, g, or t
  misc_feature (382)..(383): n is a, c, g, or t
  misc_feature (386)..(394): n is a, c, g, or t
  misc_feature (396)..(398): n is a, c, g, or t
  misc_feature (400)..(401): n is a, c, g, or t
  misc_feature (403)..(415): n is a, c, g, or t
  misc_feature (417)..(421): n is a, c, g, or t
  misc_feature (425)..(427): n is a, c, g, or t
  misc_feature (429)..(433): n is a, c, g, or t
  misc_feature (435)..(437): n is a, c, g, or t
  misc_feature (440)..(441): n is a, c, g, or t
  misc_feature (443)..(445): n is a, c, g, or t
  misc_feature (448)..(450): n is a, c, g, or t
  misc_feature (452)..(452): n is a, c, g, or t
  misc_feature (455)..(460): n is a, c, g, or t
  misc_feature (462)..(469): n is a, c, g, or t
  misc_feature (471)..(473): n is a, c, g, or t
  misc_feature (478)..(478): n is a, c, g, or t
  misc_feature (480)..(491): n is a, c, g, or t
  misc_feature (493)..(495): n is a, c, g, or t
  misc_feature (498)..(499): n is a, c, g, or t
  misc_feature (501)..(504): n is a, c, g, or t
  misc_feature (506)..(513): n is a, c, g, or t
  misc_feature (515)..(515): n is a, c, g, or t
  misc_feature (517)..(529): n is a, c, g, or t
  misc_feature (531)..(549): n is a, c, g, or t
  misc_feature (551)..(551): n is a, c, g, or t
  misc_feature (553)..(553): n is a, c, g, or t
  misc_feature (556)..(557): n is a, c, g, or t
  misc_feature (560)..(565): n is a, c, g, or t
  misc_feature (567)..(572): n is a, c, g, or t
  misc_feature (574)..(576): n is a, c, g, or t
  misc_feature (578)..(587): n is a, c, g, or t
  misc_feature (589)..(590): n is a, c, g, or t
  misc_feature (592)..(596): n is a, c, g, or t
  misc_feature (598)..(601): n is a, c, g, or t
  misc_feature (603)..(610): n is a, c, g, or t
  misc_feature (612)..(613): n is a, c, g, or t
  misc_feature (615)..(619): n is a, c, g, or t
  misc_feature (621)..(621): n is a, c, g, or t
  misc_feature (623)..(623): n is a, c, g, or t
  misc_feature (628)..(629): n is a, c, g, or t
  misc_feature (631)..(645): n is a, c, g, or t
  misc_feature (648)..(648): n is a, c, g, or t
  misc_feature (650)..(650): n is a, c, g, or t
  misc_feature (652)..(654): n is a, c, g, or t
  misc_feature (656)..(656): n is a, c, g, or t
  misc_feature (658)..(658): n is a, c, g, or t
  misc_feature (660)..(660): n is a, c, g, or t
  misc_feature (662)..(669): n is a, c, g, or t
  misc_feature (671)..(676): n is a, c, g, or t
  misc_feature (679)..(682): n is a, c, g, or t
  misc_feature (684)..(686): n is a, c, g, or t
  misc_feature (688)..(692): n is a, c, g, or t
  misc_feature (695)..(695): n is a, c, g, or t
  misc_feature (698)..(702): n is a, c, g, or t
  misc_feature (704)..(707): n is a, c, g, or t
  misc_feature (709)..(715): n is a, c, g, or t
  misc_feature (718)..(721): n is a, c, g, or t
  misc_feature (723)..(726): n is a, c, g, or t
  misc_feature (728)..(728): n is a, c, g, or t
  misc_feature (730)..(748): n is a, c, g, or t
  misc_feature (750)..(752): n is a, c, g, or t
  misc_feature (755)..(755): n is a, c, g, or t
  misc_feature (758)..(764): n is a, c, g, or t
  misc_feature (766)..(768): n is a, c, g, or t
  misc_feature (770)..(779): n is a, c, g, or t
  misc_feature (782)..(782): n is a, c, g, or t
  misc_feature (784)..(793): n is a, c, g, or t
  misc_feature (795)..(796): n is a, c, g, or t
  misc_feature (800)..(809): n is a, c, g, or t
  misc_feature (813)..(817): n is a, c, g, or t
  misc_feature (819)..(829): n is a, c, g, or t
  misc_feature (831)..(832): n is a, c, g, or t
  misc_feature (834)..(836): n is a, c, g, or t
  misc_feature (839)..(841): n is a, c, g, or t
  misc_feature (843)..(852): n is a, c, g, or t
  misc_feature (854)..(859): n is a, c, g, or t
  misc_feature (861)..(867): n is a, c, g, or t
  misc_feature (870)..(871): n is a, c, g, or t
  misc_feature (874)..(877): n is a, c, g, or t
  misc_feature (880)..(889): n is a, c, g, or t
  misc_feature (892)..(892): n is a, c, g, or t
  misc_feature (894)..(898): n is a, c, g, or t
  misc_feature (900)..(908): n is a, c, g, or t
  misc_feature (910)..(925): n is a, c, g, or t
  misc_feature (927)..(931): n is a, c, g, or t
  misc_feature (933)..(942): n is a, c, g, or t
  misc_feature (944)..(944): n is a, c, g, or t
  misc_feature (946)..(947): n is a, c, g, or t
  misc_feature (949)..(954): n is a, c, g, or t
  misc_feature (956)..(958): n is a, c, g, or t
  misc_feature (961)..(961): n is a, c, g, or t
  misc_feature (963)..(968): n is a, c, g, or t
  misc_feature (970)..(972): n is a, c, g, or t
  misc_feature (974)..(974): n is a, c, g, or t
  misc_feature (976)..(977): n is a, c, g, or t
  misc_feature (981)..(981): n is a, c, g, or t
  misc_feature (983)..(984): n is a, c, g, or t
  misc_feature (986)..(986): n is a, c, g, or t
  misc_feature (989)..(991): n is a, c, g, or t
  misc_feature (993)..(993): n is a, c, g, or t
  misc_feature (995)..(997): n is a, c, g, or t
  misc_feature (999)..(999): n is a, c, g, or t
  misc_feature (1001)..(1009): n is a, c, g, or t
  misc_feature (1011)..(1014): n is a, c, g, or t
  misc_feature (1016)..(1016): n is a, c, g, or t
  misc_feature (1018)..(1022): n is a, c, g, or t
  misc_feature (1025)..(1028): n is a, c, g, or t
  misc_feature (1030)..(1031): n is a, c, g, or t
  misc_feature (1033)..(1034): n is a, c, g, or t
  misc_feature (1036)..(1037): n is a, c, g, or t
  misc_feature (1039)..(1045): n is a, c, g, or t
  misc_feature (1047)..(1051): n is a, c, g, or t
  misc_feature (1055)..(1057): n is a, c, g, or t
  misc_feature (1059)..(1059): n is a, c, g, or t
  misc_feature (1061)..(1066): n is a, c, g, or t
  misc_feature (1069)..(1069): n is a, c, g, or t
  misc_feature (1071)..(1075): n is a, c, g, or t
  misc_feature (1078)..(1079): n is a, c, g, or t
  misc_feature (1081)..(1090): n is a, c, g, or t
  misc_feature (1094)..(1096): n is a, c, g, or t
  misc_feature (1099)..(1107): n is a, c, g, or t
  misc_feature (1109)..(1111): n is a, c, g, or t
  misc_feature (1113)..(1119): n is a, c, g, or t
  misc_feature (1121)..(1121): n is a, c, g, or t
  misc_feature (1125)..(1127): n is a, c, g, or t
  misc_feature (1129)..(1130): n is a, c, g, or t
  misc_feature (1132)..(1135): n is a, c, g, or t
  misc_feature (1137)..(1139): n is a, c, g, or t
  misc_feature (1142)..(1150): n is a, c, g, or t
  misc_feature (1153)..(1156): n is a, c, g, or t
  misc_feature (1158)..(1164): n is a, c, g, or t
  misc_feature (1166)..(1166): n is a, c, g, or t
  misc_feature (1170)..(1170): n is a, c, g, or t
  misc_feature (1172)..(1175): n is a, c, g, or t
  misc_feature (1177)..(1178): n is a, c, g, or t
  misc_feature (1180)..(1180): n is a, c, g, or t
  misc_feature (1182)..(1187): n is a, c, g, or t
  misc_feature (1189)..(1190): n is a, c, g, or t
  misc_feature (1192)..(1193): n is a, c, g, or t
  misc_feature (1196)..(1204): n is a, c, g, or t
  misc_feature (1207)..(1209): n is a, c, g, or t
  misc_feature (1211)..(1212): n is a, c, g, or t
  misc_feature (1215)..(1215): n is a, c, g, or t
  misc_feature (1217)..(1230): n is a, c, g, or t
  misc_feature (1232)..(1240): n is a, c, g, or t
  misc_feature (1242)..(1245): n is a, c, g, or t
  misc_feature (1247)..(1251): n is a, c, g, or t
  misc_feature (1253)..(1253): n is a, c, g, or t
  misc_feature (1255)..(1259): n is a, c, g, or t
  misc_feature (1261)..(1261): n is a, c, g, or t
  misc_feature (1264)..(1266): n is a, c, g, or t
  misc_feature (1268)..(1268): n is a, c, g, or t
  misc_feature (1270)..(1274): n is a, c, g, or t
  misc_feature (1276)..(1276): n is a, c, g, or t
  misc_feature (1278)..(1280): n is a, c, g, or t
  misc_feature (1282)..(1293): n is a, c, g, or t
  misc_feature (1296)..(1298): n is a, c, g, or t
  misc_feature (1300)..(1302): n is a, c, g, or t
  misc_feature (1304)..(1304): n is a, c, g, or t
  misc_feature (1308)..(1310): n is a, c, g, or t
  misc_feature (1312)..(1312): n is a, c, g, or t
  misc_feature (1314)..(1320): n is a, c, g, or t
  misc_feature (1322)..(1322): n is a, c, g, or t
  misc_feature (1324)..(1329): n is a, c, g, or t
  misc_feature (1331)..(1331): n is a, c, g, or t
  misc_feature (1333)..(1333): n is a, c, g, or t
  misc_feature (1335)..(1335): n is a, c, g, or t
  misc_feature (1338)..(1340): n is a, c, g, or t
  misc_feature (1342)..(1345): n is a, c, g, or t
  misc_feature (1347)..(1355): n is a, c, g, or t
  misc_feature (1357)..(1360): n is a, c, g, or t
  misc_feature (1362)..(1365): n is a, c, g, or t
  misc_feature (1367)..(1370): n is a, c, g, or t
  misc_feature (1372)..(1373): n is a, c, g, or t
  misc_feature (1375)..(1378): n is a, c, g, or t
  misc_feature (1380)..(1388): n is a, c, g, or t
  misc_feature (1390)..(1392): n is a, c, g, or t
  misc_feature (1394)..(1394): n is a, c, g, or t
  misc_feature (1396)..(1411): n is a, c, g, or t
  misc_feature (1413)..(1419): n is a, c, g, or t
  misc_feature (1422)..(1424): n is a, c, g, or t
  misc_feature (1426)..(1427): n is a, c, g, or t
  misc_feature (1429)..(1435): n is a, c, g, or t
  misc_feature (1437)..(1438): n is a, c, g, or t
  misc_feature (1441)..(1447): n is a, c, g, or t
  misc_feature (1449)..(1449): n is a, c, g, or t
  misc_feature (1453)..(1455): n is a, c, g, or t
  misc_feature (1459)..(1461): n is a, c, g, or t
  misc_feature (1463)..(1470): n is a, c, g, or t
  misc_feature (1472)..(1473): n is a, c, g, or t
  misc_feature (1475)..(1476): n is a, c, g, or t
  misc_feature (1478)..(1478): n is a, c, g, or t
  misc_feature (1480)..(1484): n is a, c, g, or t
  misc_feature (1487)..(1505): n is a, c, g, or t
  misc_feature (1507)..(1512): n is a, c, g, or t
  misc_feature (1514)..(1517): n is a, c, g, or t
  misc_feature (1985)..(1985): n is a, c, g, or t
  misc_feature (2243)..(2243): n is a, c, g, or t
  misc_feature (2291)..(2291): n is a, c, g, or t
  misc_feature (2645)..(2645): n is a, c, g, or t
  misc_feature (2654)..(2654): n is a, c, g, or t
  misc_feature (2723)..(2723): n is a, c, g, or t
  misc_feature (2729)..(2729): n is a, c, g, or t
  misc_feature (2731)..(2732): n is a, c, g, or t
  misc_feature (2738)..(2738): n is a, c, g, or t
  misc_feature (2741)..(2743): n is a, c, g, or t
  misc_feature (2747)..(2748): n is a, c, g, or t
  misc_feature (2750)..(2752): n is a, c, g, or t
  misc_feature (2761)..(2763): n is a, c, g, or t
  misc_feature (2765)..(2766): n is a, c, g, or t
  misc_feature (2771)..(2771): n is a, c, g, or t
  misc_feature (2773)..(2774): n is a, c, g, or t
  misc_feature (2776)..(2776): n is a, c, g, or t
  misc_feature (2778)..(2778): n is a, c, g, or t
  misc_feature (2781)..(2781): n is a, c, g, or t
  misc_feature (2783)..(2783): n is a, c, g, or t
  misc_feature (2787)..(2787): n is a, c, g, or t
  misc_feature (2791)..(2794): n is a, c, g, or t
  misc_feature (2796)..(2797): n is a, c, g, or t
  misc_feature (2799)..(2802): n is a, c, g, or t
  misc_feature (2804)..(2809): n is a, c, g, or t
  misc_feature (2814)..(2816): n is a, c, g, or t
  misc_feature (2819)..(2819): n is a, c, g, or t
  misc_feature (2821)..(2825): n is a, c, g, or t
  misc_feature (2828)..(2830): n is a, c, g, or t
  misc_feature (2832)..(2832): n is a, c, g, or t
  misc_feature (2837)..(2839): n is a, c, g, or t
  misc_feature (2841)..(2841): n is a, c, g, or t
  misc_feature (2843)..(2843): n is a, c, g, or t
  misc_feature (2846)..(2847): n is a, c, g, or t
  misc_feature (2849)..(2850): n is a, c, g, or t
  misc_feature (2854)..(2854): n is a, c, g, or t
  misc_feature (2860)..(2861): n is a, c, g, or t
  misc_feature (2864)..(2872): n is a, c, g, or t
  misc_feature (2876)..(2881): n is a, c, g, or t
  misc_feature (2883)..(2885): n is a, c, g, or t
  misc_feature (2887)..(2891): n is a, c, g, or t
  misc_feature (2893)..(2894): n is a, c, g, or t
  misc_feature (2896)..(2899): n is a, c, g, or t
  misc_feature (2901)..(2902): n is a, c, g, or t
  misc_feature (2904)..(2906): n is a, c, g, or t
  misc_feature (2910)..(2910): n is a, c, g, or t
  misc_feature (2912)..(2912): n is a, c, g, or t
  misc_feature (2914)..(2916): n is a, c, g, or t
  misc_feature (2919)..(2921): n is a, c, g, or t
  misc_feature (2924)..(2924): n is a, c, g, or t
  misc_feature (2926)..(2928): n is a, c, g, or t
  misc_feature (2930)..(2931): n is a, c, g, or t
  misc_feature (2933)..(2936): n is a, c, g, or t
  misc_feature (2938)..(2938): n is a, c, g, or t
  misc_feature (2940)..(2941): n is a, c, g, or t
  misc_feature (2944)..(2944): n is a, c, g, or t
  misc_feature (2946)..(2946): n is a, c, g, or t
  misc_feature (2949)..(2950): n is a, c, g, or t
  misc_feature (2954)..(2955): n is a, c, g, or t
  misc_feature (2958)..(2963): n is a, c, g, or t
  misc_feature (2965)..(2968): n is a, c, g, or t
  misc_feature (2970)..(2971): n is a, c, g, or t
  misc_feature (2974)..(2984): n is a, c, g, or t
  misc_feature (2986)..(2995): n is a, c, g, or t
  misc_feature (2997)..(2998): n is a, c, g, or t
  misc_feature (3000)..(3003): n is a, c, g, or t
  misc_feature (3009)..(3009): n is a, c, g, or t
  misc_feature (3011)..(3011): n is a, c, g, or t
  misc_feature (3014)..(3014): n is a, c, g, or t
  misc_feature (3016)..(3016): n is a, c, g, or t
  misc_feature (3020)..(3021): n is a, c, g, or t
  misc_feature (3023)..(3024): n is a, c, g, or t
  misc_feature (3026)..(3027): n is a, c, g, or t
  misc_feature (3030)..(3030): n is a, c, g, or t
  misc_feature (3032)..(3032): n is a, c, g, or t
  misc_feature (3034)..(3035): n is a, c, g, or t
  misc_feature (3038)..(3038): n is a, c, g, or t
  misc_feature (3040)..(3040): n is a, c, g, or t
  misc_feature (3042)..(3043): n is a, c, g, or t
  misc_feature (3045)..(3048): n is a, c, g, or t
  misc_feature (3050)..(3051): n is a, c, g, or t
  misc_feature (3054)..(3056): n is a, c, g, or t
  misc_feature (3058)..(3058): n is a, c, g, or t
  misc_feature (3061)..(3066): n is a, c, g, or t
  misc_feature (3068)..(3068): n is a, c, g, or t
  misc_feature (3070)..(3070): n is a, c, g, or t
  misc_feature (3072)..(3073): n is a, c, g, or t
  misc_feature (3075)..(3082): n is a, c, g, or t
  misc_feature (3084)..(3084): n is a, c, g, or t
  misc_feature (3086)..(3086): n is a, c, g, or t
  misc_feature (3088)..(3091): n is a, c, g, or t
  misc_feature (3093)..(3105): n is a, c, g, or t
  misc_feature (3109)..(3109): n is a, c, g, or t
  misc_feature (3111)..(3111): n is a, c, g, or t
  misc_feature (3114)..(3116): n is a, c, g, or t
  misc_feature (3118)..(3119): n is a, c, g, or t
  misc_feature (3123)..(3127): n is a, c, g, or t
  misc_feature (3130)..(3130): n is a, c, g, or t
  misc_feature (3132)..(3135): n is a, c, g, or t
  misc_feature (3137)..(3137): n is a, c, g, or t
  misc_feature (3139)..(3148): n is a, c, g, or t
  misc_feature (3150)..(3152): n is a, c, g, or t
  misc_feature (3156)..(3156): n is a, c, g, or t
  misc_feature (3158)..(3158): n is a, c, g, or t
  misc_feature (3160)..(3161): n is a, c, g, or t
  misc_feature (3163)..(3163): n is a, c, g, or t
  misc_feature (3166)..(3170): n is a, c, g, or t
  misc_feature (3172)..(3172): n is a, c, g, or t
  misc_feature (3176)..(3176): n is a, c, g, or t
  misc_feature (3178)..(3178): n is a, c, g, or t
  misc_feature (3180)..(3184): n is a, c, g, or t
  misc_feature (3187)..(3188): n is a, c, g, or t
  misc_feature (3190)..(3190): n is a, c, g, or t
  misc_feature (3192)..(3194): n is a, c, g, or t
  misc_feature (3196)..(3204): n is a, c, g, or t
  misc_feature (3207)..(3208): n is a, c, g, or t
  misc_feature (3210)..(3210): n is a, c, g, or t
  misc_feature (3212)..(3212): n is a, c, g, or t
  misc_feature (3214)..(3216): n is a, c, g, or t
  misc_feature (3219)..(3220): n is a, c, g, or t
  misc_feature (3224)..(3224): n is a, c, g, or t
  misc_feature (3226)..(3226): n is a, c, g, or t
  misc_feature (3228)..(3228): n is a, c, g, or t
  misc_feature (3230)..(3232): n is a, c, g, or t
  misc_feature (3234)..(3238): n is a, c, g, or t
  misc_feature (3240)..(3249): n is a, c, g, or t
  misc_feature (3252)..(3253): n is a, c, g, or t
  misc_feature (3255)..(3256): n is a, c, g, or t
  misc_feature (3258)..(3259): n is a, c, g, or t
  misc_feature (3261)..(3261): n is a, c, g, or t
  misc_feature (3263)..(3263): n is a, c, g, or t
  misc_feature (3265)..(3268): n is a, c, g, or t
  misc_feature (3271)..(3271): n is a, c, g, or t
  misc_feature (3274)..(3275): n is a, c, g, or t
  misc_feature (3279)..(3282): n is a, c, g, or t
  misc_feature (3284)..(3285): n is a, c, g, or t
  misc_feature (3288)..(3293): n is a, c, g, or t
  misc_feature (3295)..(3295): n is a, c, g, or t
  misc_feature (3297)..(3298): n is a, c, g, or t
  misc_feature (3300)..(3302): n is a, c, g, or t
  misc_feature (3305)..(3306): n is a, c, g, or t
  misc_feature (3308)..(3308): n is a, c, g, or t
  misc_feature (3312)..(3315): n is a, c, g, or t
  misc_feature (3317)..(3318): n is a, c, g, or t
  misc_feature (3320)..(3320): n is a, c, g, or t
  misc_feature (3323)..(3325): n is a, c, g, or t
  misc_feature (3327)..(3327): n is a, c, g, or t
  misc_feature (3329)..(3329): n is a, c, g, or t
  misc_feature (3331)..(3334): n is a, c, g, or t
  misc_feature (3336)..(3338): n is a, c, g, or t
  misc_feature (3340)..(3341): n is a, c, g, or t
  misc_feature (3343)..(3347): n is a, c, g, or t
  misc_feature (3349)..(3356): n is a, c, g, or t
  misc_feature (3358)..(3358): n is a, c, g, or t
  misc_feature (3360)..(3360): n is a, c, g, or t
  misc_feature (3362)..(3362): n is a, c, g, or t
  misc_feature (3365)..(3368): n is a, c, g, or t
  misc_feature (3370)..(3370): n is a, c, g, or t
  misc_feature (3372)..(3372): n is a, c, g, or t
  misc_feature (3374)..(3377): n is a, c, g, or t
  misc_feature (3379)..(3379): n is a, c, g, or t
  misc_feature (3382)..(3383): n is a, c, g, or t
  misc_feature (3386)..(3392): n is a, c, g, or t
  misc_feature (3394)..(3394): n is a, c, g, or t
  misc_feature (3396)..(3397): n is a, c, g, or t
  misc_feature (3400)..(3401): n is a, c, g, or t
  misc_feature (3403)..(3405): n is a, c, g, or t
  misc_feature (3407)..(3407): n is a, c, g, or t
  misc_feature (3410)..(3410): n is a, c, g, or t
  misc_feature (3412)..(3413): n is a, c, g, or t
  misc_feature (3416)..(3417): n is a, c, g, or t
  misc_feature (3419)..(3419): n is a, c, g, or t
  misc_feature (3422)..(3423): n is a, c, g, or t
  misc_feature (3428)..(3428): n is a, c, g, or t
  misc_feature (3430)..(3430): n is a, c, g, or t
  misc_feature (3432)..(3435): n is a, c, g, or t
  misc_feature (3437)..(3438): n is a, c, g, or t
  misc_feature (3441)..(3442): n is a, c, g, or t
  misc_feature (3444)..(3446): n is a, c, g, or t
  misc_feature (3449)..(3452): n is a, c, g, or t
  misc_feature (3455)..(3455): n is a, c, g, or t
  misc_feature (3459)..(3462): n is a, c, g, or t
  misc_feature (3468)..(3469): n is a, c, g, or t
  misc_feature (3471)..(3472): n is a, c, g, or t
  misc_feature (3474)..(3474): n is a, c, g, or t
  misc_feature (3479)..(3481): n is a, c, g, or t
  misc_feature (3483)..(3485): n is a, c, g, or t
  misc_feature (3489)..(3495): n is a, c, g, or t
  misc_feature (3498)..(3498): n is a, c, g, or t
  misc_feature (3501)..(3503): n is a, c, g, or t
  misc_feature (3507)..(3507): n is a, c, g, or t
  misc_feature (3510)..(3513): n is a, c, g, or t
  misc_feature (3517)..(3517): n is a, c, g, or t
  misc_feature (3519)..(3525): n is a, c, g, or t
  misc_feature (3527)..(3530): n is a, c, g, or t
  misc_feature (3534)..(3534): n is a, c, g, or t
  misc_feature (3536)..(3540): n is a, c, g, or t
  misc_feature (3542)..(3545): n is a, c, g, or t
  misc_feature (3547)..(3547): n is a, c, g, or t
  misc_feature (3550)..(3551): n is a, c, g, or t
  misc_feature (3555)..(3558): n is a, c, g, or t
  misc_feature (3560)..(3566): n is a, c, g, or t
  misc_feature (3568)..(3569): n is a, c, g, or t
  misc_feature (3572)..(3577): n is a, c, g, or t
  misc_feature (3580)..(3580): n is a, c, g, or t
  misc_feature (3583)..(3587): n is a, c, g, or t
  misc_feature (3589)..(3590): n is a, c, g, or t
  misc_feature (3592)..(3592): n is a, c, g, or t
  misc_feature (3594)..(3602): n is a, c, g, or t
  misc_feature (3605)..(3605): n is a, c, g, or t
  misc_feature (3608)..(3608): n is a, c, g, or t
  misc_feature (3611)..(3611): n is a, c, g, or t
  misc_feature (3615)..(3615): n is a, c, g, or t
  misc_feature (3617)..(3623): n is a, c, g, or t
  misc_feature (3625)..(3626): n is a, c, g, or t
  misc_feature (3628)..(3628): n is a, c, g, or t
  misc_feature (3630)..(3631): n is a, c, g, or t
  misc_feature (3635)..(3635): n is a, c, g, or t
  misc_feature (3637)..(3640): n is a, c, g, or t
  misc_feature (3642)..(3642): n is a, c, g, or t
  misc_feature (3644)..(3646): n is a, c, g, or t
  misc_feature (3649)..(3650): n is a, c, g, or t
  misc_feature (3653)..(3654): n is a, c, g, or t
  misc_feature (3656)..(3662): n is a, c, g, or t
  misc_feature (3665)..(3665): n is a, c, g, or t
  misc_feature (3667)..(3667): n is a, c, g, or t
  misc_feature (3669)..(3671): n is a, c, g, or t
  misc_feature (3674)..(3681): n is a, c, g, or t
  misc_feature (3683)..(3684): n is a, c, g, or t
  misc_feature (3686)..(3692): n is a, c, g, or t
  misc_feature (3694)..(3695): n is a, c, g, or t
  misc_feature (3697)..(3701): n is a, c, g, or t
  misc_feature (3704)..(3705): n is a, c, g, or t
  misc_feature (3707)..(3707): n is a, c, g, or t
  misc_feature (3711)..(3711): n is a, c, g, or t
  misc_feature (3713)..(3713): n is a, c, g, or t
  misc_feature (3715)..(3717): n is a, c, g, or t
  misc_feature (3720)..(3720): n is a, c, g, or t
  misc_feature (3722)..(3722): n is a, c, g, or t
  misc_feature (3724)..(3725): n is a, c, g, or t
  misc_feature (3727)..(3728): n is a, c, g, or t
  misc_feature (3731)..(3739): n is a, c, g, or t
  misc_feature (3743)..(3748): n is a, c, g, or t
  misc_feature (3750)..(3752): n is a, c, g, or t
  misc_feature (3754)..(3756): n is a, c, g, or t
  misc_feature (3758)..(3758): n is a, c, g, or t
  misc_feature (3760)..(3761): n is a, c, g, or t
  misc_feature (3763)..(3766): n is a, c, g, or t
  misc_feature (3769)..(3769): n is a, c, g, or t
  misc_feature (3772)..(3772): n is a, c, g, or t
  misc_feature (3774)..(3774): n is a, c, g, or t
  misc_feature (3779)..(3780): n is a, c, g, or t
  misc_feature (3783)..(3785): n is a, c, g, or t
  misc_feature (3787)..(3789): n is a, c, g, or t
  misc_feature (3791)..(3792): n is a, c, g, or t
  misc_feature (3794)..(3794): n is a, c, g, or t
  misc_feature (3797)..(3798): n is a, c, g, or t
  misc_feature (3800)..(3801): n is a, c, g, or t
  misc_feature (3804)..(3805): n is a, c, g, or t
  misc_feature (3807)..(3810): n is a, c, g, or t
  misc_feature (3816)..(3819): n is a, c, g, or t
  misc_feature (3823)..(3823): n is a, c, g, or t
  misc_feature (3825)..(3831): n is a, c, g, or t
  misc_feature (3833)..(3842): n is a, c, g, or t
  misc_feature (3844)..(3847): n is a, c, g, or t
  misc_feature (3850)..(3851): n is a, c, g, or t
  misc_feature (3853)..(3854): n is a, c, g, or t
  misc_feature (3856)..(3857): n is a, c, g, or t
  misc_feature (3860)..(3861): n is a, c, g, or t
  misc_feature (3863)..(3864): n is a, c, g, or t
  misc_feature (3867)..(3869): n is a, c, g, or t
  misc_feature (3871)..(3872): n is a, c, g, or t
  misc_feature (3874)..(3876): n is a, c, g, or t
  misc_feature (3878)..(3879): n is a, c, g, or t
  misc_feature (3882)..(3883): n is a, c, g, or t
  misc_feature (3885)..(3887): n is a, c, g, or t
  misc_feature (3889)..(3890): n is a, c, g, or t
  misc_feature (3892)..(3896): n is a, c, g, or t
  misc_feature (3898)..(3902): n is a, c, g, or t
  misc_feature (3905)..(3905): n is a, c, g, or t
  misc_feature (3909)..(3910): n is a, c, g, or t
  misc_feature (3912)..(3915): n is a, c, g, or t
  misc_feature (3917)..(3919): n is a, c, g, or t
  misc_feature (3922)..(3933): n is a, c, g, or t
  misc_feature (3935)..(3935): n is a, c, g, or t
  misc_feature (3937)..(3937): n is a, c, g, or t
  misc_feature (3940)..(3942): n is a, c, g, or t
  misc_feature (3950)..(3950): n is a, c, g, or t
  misc_feature (3954)..(3955): n is a, c, g, or t
  misc_feature (3957)..(3959): n is a, c, g, or t
  misc_feature (3961)..(3961): n is a, c, g, or t
  misc_feature (3963)..(3964): n is a, c, g, or t
  misc_feature (3966)..(3966): n is a, c, g, or t
  misc_feature (3968)..(3968): n is a, c, g, or t
  misc_feature (3971)..(3977): n is a, c, g, or t
  misc_feature (3982)..(3982): n is a, c, g, or t
  misc_feature (3984)..(3985): n is a, c, g, or t
  misc_feature (3987)..(3988): n is a, c, g, or t
  misc_feature (3990)..(3995): n is a, c, g, or t
nnnnnnnncntnggnnnnnnannnngnnncntnnnnngnnnnngnnnngnntnnnaaannnncnnnnnannnnnnnntngnnnnnnannnnntnnnnnnnannttnnnnnnnnnaanngnnnttncngnnnnnnnnnngnnnnnancnnnntnnannnncnnngntncnnncnnntnnnannnnnnnnnnnnnaaannngnngnnnnnnnnncnnnggnnnnnnnnnanngnnnnnnnngnnngaaannannannnnncnnnnnaaaangncngnngnnnnnncnncngncnttttnnnnnnntngnnnnnnnngnnnnnnnnnnnnttnnnnnngnngnnnngncttncnnnnannnnnnnnncnnnnncnnnnnntnggnnaannnnnnnnncnnnanngnnnnnnnnnnnnngnnnnngccnnncnnnnncnnnccnnannnttnnncnggnnnnnncnnnnnnnngnnnttttncnnnnnnnnnnnngnnnaanncnnnncnnnnnnnncngnnnnnnnnnnnnncnnnnnnnnnnnnnnnnnnncntnggnnggnnnnnngnnnnnngnnntnnnnnnnnnnannannnnntnnnncnnnnnnnngnngnnnnngnanggggnngnnnnnnnnnnnnnnnaancngnnncntngntnnnnnnnnannnnnncgnnnncnnnannnnnccnggnnnnncnnnngnnnnnnnggnnnncnnnntngnnnnnnnnnnnnnnnnnnncnnnggnccnnnnnnncnnncnnnnnnnnnnccngnnnnnnnnnngnntttnnnnnnnnnncccnnnnncnnnnnnnnnnncnncnnnccnnncnnnnnnnnnngnnnnnngnnnnnnnccnnccnnnnctnnnnnnnnnnaancnnnnncnnnnnnnnncnnnnnnnnnnnnnnnngnnnnncnnnnnnnnnncntnnannnnnntnnnggnannnnnnannncngnngggntnntnggnnnantnnncnannnnnnnnncnnnntngnnnnnttnnnngnngnngnnannnnnnncnnnnngggnnngnannnnnnctncnnnnnggnngnnnnnnnnnngggnnnggnnnnnnnnncnnngnnnnnnncngggnnngnngnnnnannnggnnnnnnnnnaannnncnnnnnnncngggntnnnngnngncnnnnnngnngnnaannnnnnnnnttnnncnnccngnnnnnnnnnnnnnntnnnnnnnnntnnnngnnnnncngnnnnntnctnnnancnnnnngncnnngnnnnnnnnnnnnccnnngnnncngggnnngncnnnnnnncngnnnnnncngncnaannngnnnngnnnnnnnnntnnnngnnnngnnnngnngnnnngnnnnnnnnntnnncnannnnnnnnnnnnnnnncnnnnnnnccnnntnnannnnnnngnnggnnnnnnngnaaannncccnnncnnnnnnnncnncnncnannnnnccnnnnnnnnnnnnnnnnnnntnnnnnncnnnntctccctcgtaacttgaagacgcaggggcgcagagcatggttgatttgtcaatcaggcttgaccgccagtggcgggtcgggctacgcagacggcatgaagatgatgccactcattatttgctgtattacctgctaagaccttccggcgggcttgctcacatcgttttcttcccgagatttctgtgccatgcccgcgcaatccttgcgtaaggacgcgccatgaccacgatcaagctgcacaacacgaaaacccgcaaacgcgaggatttcaccccgattgatgataaaaacgtgcggatgtatgtctgtgggcccacggtgtacgaccgcgcccatctgggcaatgcgcgccccgtgatcgtgtttgacgtgctcaaccggttgctgcgtcatgtctatggcgacgcccatgtgacctatgtgcgcaacttcacggatgtggatgacaagatcaacgcgcgcgcagcncaaagcgggcggtctatcggagagattaccgccgagacaacccagtggtttctggacgatatggccgccgtcggcgcgcttgagcccgaccacatgccacgcgccaccgcctatattccgcagatggtcgcgatgatcgaagatctgatcgccaagggacacgcctatgccgccgaggggcatgtgctgttctctgtcgaaagctacaaagcctatggcgcgctgtcgggccggtcgatcgacgatatgattgccggngcgcgggtcgaggttgcgccctacaagcgtaacccgatggatttcgtnctgtggaagccgtcggacgacgcgacgccggggtgggacagcccctggggccgtggccgccccggctggcacatcgaatgctccgccatggcggacgagctgctgtggaaagagcccctgcgtcaggaccgtctgtcggacaaggcgaagagcgcacctcacgtctttgacatccacggcggcggtctggatctgcaattcccccaccacgaggacgagatcgcccaaagctgctgcgccaatggcaccgacgagatggcgcgctactggctgcataacgagatgctgcaggtcgagggcaagaagatgtccaaatcgcttggtaacttcttcaccgtacgcgacctgctggancaaggcgtnccgggagaggtgatccgtttcgtcatgctcagcacgcattaccgcaagccgatggactggaccgagaanaagcgngnngaagcngannngacnntnnngaagtggannnanntgacngnngncntanancctngcgnnnntnncnnnnannnnnntgatnnnatngnnnnngannngnatacnnncnangcnntnncgcntctcgnngannnnnnnnncaannnnnngnnngnnnnncnncnnnnanntnnnaatnangnnngannnctngnnngnntnnnngncnnatngnggnnggannatnnnnnngnnnntnncgnnnnnnnnnnnannnnnnnnnncnntnnnnctgagntnaanancganntnncnnaantngnngangngnngnnnnanntgnnnangannnnnnangntnntnnnnnnnncnangnnnncnnnnnnnnnnnnntggnancgnnntnngagnnnnngancnnnnangnnnnnnnnnnannnatancngnncncannnnngncccnancnnnnnggnngngnnnannnnnnnnncgnngngncnnncgnnggcngntngnnngnnnnngnnnnnnnnnngcnngnncnncngnannnncgnagnntatnnnncnngannnnnntnanntnnntgnnangacnnnngnncnccnnnancncnnnnannngnntnnnnncnnnnnnnngnanangcnnnngntncnnnncncgnncgnnnnnnngntnncgnntnnnancgngnncgnnangcnnggcgngnannnnannganngnnnctnnnncgncgcnnnnccgacnncnngngcgannntnnnggcnnnnnnnatnacnnnggcnaannnnacgncnnnnnnnannnncaangnnnnngnnnngncgnngcannnngnnnnnnngnnggnnnnnntgntgnnnnngnncncnnnnnnnnncgnctnggngggnannnnnnntnngntnnacgngnnnncngnnnttnncgnnannnnnnncgngnannnggnnnnnnnngnnannnnnnncnngnnnnnggnngngcangncnnngangngnngnncgnnnnnnnnnattnnnnnnannncnnncncnncnnnnccnatnangcggnnacnnngnnnanngngcnntnnganncnnnngcgggnnnnatgncnnnnnnngnnnnnnnnnncnnnnccnngnncnncgnngnnggnnncnncnnngnnganntnnncnncnnnnncnnnnncgncgcnnannnngnnntcnnnnnnnnnnnngncnccnnnaacgcggncgcnngnnngntnncngncannnnnnngggcncnngnnannnnnngggca

SEQ ID NO: 828 - DNA, 4000 bp, Escherichia coli
  misc_feature (1987)..(1987): n is a, c, g, or t
  misc_feature (1995)..(1995): n is a, c, g, or t
gcaaaagaaaagtggtttgtagttgcaaccattaatccattgacacattctggaacaaaagaacttccaccacaaattctaagtagatttccagtacgaattagattagaatatccaccagaaaatatagaactagatattgtcaaaaaacatgtttcaggaaattatgaatcagaaattattcaagccataaaattagcaaatacattaagacaagctgcagctgttgaagaattattttattcgccaagtttgagagaaacaattgcatttggaaaattattagataaagaagtacctccaaaagaagctgcaaacattgtttttggaaatgtatacacacagtgggggaatatagagtatcaaaaagtaagtgacattattacttcaatgtttggaaattaaatgcatccaattcaacttcaaaatgattcattagtagaaattgccacttttcttgttcgaaggtggtctgaagaagaggacattataattgaaatttcagataaaatagaaactaaaacaagattgaaggaaaaaaaagtaatcctaacacctttagaaaaaagaataggaagtgattttgaaaaatatagacaatttagaatatcatcatggtatgaagcaatgaaaataaaatattgtgaaaaaattctcagtgaagatcatgcttttggttttattcttaacacaatggaaacaaaaagagtagaacagttaggcagaaaaatttggaaagggatggatgaagaaattatttttaattacacatacatgcttgtggcaagaccacaacttcatacagtttatggaaaagcaagaattgtagaagcattttatcaatattttatgtttggagcaattaaaggaaatatacaatcaagccactttgaaaaaattaaaaaagcagcaatatttgcaaaaaaaattgtcaacgaagcaataaaaaataatcaaaaaacaaattggattgaaaaacatgtaactgaaataattaaaattttagaaatcgattcactattaacaattccaatatcagtggcgtttatgaaagctggaatggcattatcagaagaagagttacgaaaagtgctaaaagtaatttctaaaaataaagagggggattttggttcaattgatccttcatcagtagtaaaaggagagaatgtttatgatgaatacaaagtgctaattgatgaaaataaaaaaatggaaaacaaaggattatcatcagaaacaataggaattcaaattccatctacaaaaaatattgatgaaacagcaatctatgacgtgagtttaatcaatggattaaaaatgaaatttaaagaatggaaagcaggttggaaagaacaacatgtaaaatctggagatgaatttgatgaggaaaattacattgaaggaaatgaaccattttttacagatataaaaaaatcaattaaaaccaaaattgtgatattattagaccattcatcaagtatatcttcagatgcaattgaatacaaaaaagcaacaatagcattatgtgaagtactagcatttcttaaagtaaaatttgcagtatatgcatttagtactcaaaatagatcaatgatatgctggtcaattaaagaagagaatgtaaaatggaataatattactgcaaaaaggttagcacaaatagttgcaaatggatcaacgccattagcagaaatatatgataaaatgtttccaactttacaatcaaaaagaccaaatatttttttgacattaactgatggtgaaccttcagattcagatgcagttagaaatatgacaaaatcattaaaaggattaggaattagcatggttgctttaggattaggtccaaatacaattagagctacaaccatagcaaataatctaaaacatttaggatatgacaaaactatggcagtaagtagattaaaagatattccaaacaaagttatcagtattttagatgtatgaataggagaattaaaaattngaaaacantagtaagaatatcagatattttatatgaccttttaaacattaaaaattagaaataaaattggaagaaaatcaagataacaatattgacaaagatctacttgcacgttttgaaaaagaaatttggagtaaagtaccacatttagaaaataatcaagaaggagaaaaggtggtaaatgcaacaccactagtagacattacagcagattttaaagaatgtgccaaagaagtttacaatctagatctctctaattcagaattacaaatttatggaaaattagattccacattacttacaggttcaataaaaataagaccagcagcgaatataatttacaatgcaattacaacaggaaaaataaaaagtggacaaaccgtaattgaggcaacatcaggtaattttggaattgcattaggaatgttatcaaaattaggattacaagtagtcacaattgtttcaagaaaattacaagaaggagtatttcacgaattaagaaatatgaatatcaaaattatggatttagagatggatatttgtcctgcaccaggaatggaaggtaagaaagatgaattagttgcaaaagcaacagcaggtaacattcgttctcaattatctcagatgggatttgatccaagtatttttgataattcatctaatgaaatagaatcattattagcaaaacaagatattattaatttagcaaaattactctcaaaaatatacaattgtttctgtccagaacaatatgataatgatttgaatgtgaatgcacataaaaccataacaggggcagaaatagatcagcaattacataaagatgggaattcacttgaagaatttaacatcctatgtacatttggtacaggaggaacttcaggaggattaagtaaatacatctctgaaaaatataacaaaaagggagttcatgttatatttccaccaagtggacaagatgttgcagggattagaactcacaataatgcggatggcttaaaatattatcaaccagacaaatatgcgggagaatatgaagtagattttgaaaaagcaaaaccactcctaaaatttttcgtagaaaaaggtcacgacattggagagagtagtgcattagaactttatgcaactttacaactagccagcacaaataaaggaaataaatttgtagtaatgatttgtgatggaatagagaaatatagaaagaacttggaaaaaattggaaaaatacagcctccaggacaagtatcaccacaagatgtagcatcaaatgcagatgattatgacaaagttatttggattcatacacaatatacccctcaagaaggaggaatagaattacttgcaaaatctttaggtattgataaaagtaaaataattataccaaatgcaagaacagcacaacaactattatcaggacaagggattccagatgaaattaataattcacttcaagaatcaaaaggtaaatcattgatggtttgtatggctggaagaacatcattaatggctgcaaatgtattagcagaaaaaggaattgttacagatagtttgataggaggaattacagagcttcccgaagcaagaaacagtgaactttcagaattagttaaacaagcttcacagttttaatttacataaaaattctaccattataattatgaaatgtctttcaatttgtcaaccatttgcagaattaattattcagaatagaaaaacaatagaattaagaacgtggaatacaaattttcgtggagaatttttgatacatgcaccaattaaaattagaaaagaagaatgtaaaaaattgaaaatggagcaaaaatttacaacaagtgcaataataggaaaagcagagttgtgtgatgtaaaaaaatatgaatcattaaaagaaattcaaatagataaaaataaacatttttcatcaaaaacttttcatgaaaaaacatttggatttattttaaaaaatgccaaatcatttagaattcctattccatggaaaggtcaattagg

SEQ ID NO: 829 - DNA, 4000 bp, Escherichia coli
  misc_feature (168)..(168): n is a, c, g, or t
  misc_feature (828)..(828): n is a, c, g, or t
  misc_feature (1302)..(1302): n is a, c, g, or t
  misc_feature (1304)..(1304): n is a, c, g, or t
  misc_feature (1337)..(1337): n is a, c, g, or t
  misc_feature (1349)..(1349): n is a, c, g, or t
  misc_feature (1358)..(1358): n is a, c, g, or t
  misc_feature (1467)..(1467): n is a, c, g, or t
  misc_feature (1480)..(1480): n is a, c, g, or t
  misc_feature (1763)..(1763): n is a, c, g, or t
gtatctgcgaacagatctggaccccaatgataccccgcccgctgcgcctgccaatctgatcgcctatgccgtatcggccagtgaaatccaattgaactgggatgatctctcaaataatgaacgaggatttcacatacgacgctccgtgaacggaatcgatttcaccgncatcgacaccgcccccgtggatgccatcagctacctggaccgaacagcctctcctgacaccacctatacctatcaagtcgaagcctacaccgccagcttcacagtcgcatccaatacggcgacggccaccacgccggatgccatggttctttccgccaacggatacaaaaggaaagggaaagcgcaggtcgacttgacttggtcgggaggttcggaagtgacaagcgtaggcatctggaggagtgtggatggtgggagtttcgtcaacattgcaagcgtcagccacaatccaggcggaacgagctatacagacgtcacaaatcttaagggcagcttcttcgtagactacgaggtacgtagctcgaccggtgagctgagctcaaacacggtgaccgtggtcttttaaaccccggcaccttattcaaggcaattccaccacctgagtccaatgggcgtcgcccagttcggcgacaaaagcctcggcggcctgttcggcggcagatcggctcgggaaaagggcgaaggtggtggagccgcttccggacatcaaactcacttcggccccaagtttgcggagggttgtctggaaaatctcgaggagaggatacttctcgagaaccggaccttccagactgttgaaaaacagatcggaagctgagncaagatcagaaccttgcaaggcttcgaccaatcgtttgcctttgccgggttggccgttcaacaaatcggggaaccgctgcagactttgatatgcccatccggtggatactccaaatccaggtttcaccagaaacaatcctttgtttttcaaggctggaaagggtggaagcgagacgaccttttccccccttccatccgcaagggcaggattgttttggaggaagaacggcacatctgacccgagagtagctgcgatttcctggagcgtttcagcgttgaggggttttcctgtcatctcattcaaggcgttcaaggtgacaccggcattgccgctgccgccccccaatcccgcctccattggaatccgcttgtcgaggtgaatggatacggtcggttccagatcggctttttcataaaagcccctcgccgcccgggtgatcaggttgtcggatcccggactgagatccgctccgncnatcgtcaaatgaatgcccctttccccggaaggntcaaacgtcagnaaatcacanaggggcactgggaacatcaccgtttccagttcatggaaaccatcctcacgcttgcccagaatgttgagcagtagattgactttgcagggtgattgtttttggagcatgnaaaaagtggggtnattcaacaaaaaaggcgccaacattcaagctggcgcctttcgatgaaagtaaatggttgatcaatagtcgaaaacacggaaacgacttccaacgatcgggagcatgtcaccaccgctgaagccgagatcgctgtcagctgcgtatgtggagtccgacaccaggctgggagtgtagttttccgggtaaatgacttcgtccttcactccgacgggatcgtagcttgggattgggaaagtgacgatttcgtaaatccccacagccgtgcgcttcacggactggttnaaaccacggatgaacccggtggtataggattgctcgggaccttcccagagagcggtttgctccatggagtgacgcatttccccaagacgggcaaattcggtcacgtttctcatgccacggccgagcttctgctcaggaccggcacatccggttgccaaaaccacagcagctacacctgccaacaaaatggactttgaaatacgcatcataattaagactttggttgcggagagactaatcatcactccaagcttgtaaaggttttttcgtttattttggacttttatccgtcggttttcgttcgaaatttcaaatatatgagcaggaactatgcctcctcggcctgttttcgctcatccctgcgcgcccaaacacgcgaaatcaacacactcaactcataaagcaagtgcaacggtaatgccatcaaaatcagggtaaacggatcacctgtcggcgtcaaaaacgcacaaatggtcaaattggcgatcacccaatagggtcggaaggtattgagtttcttataatccaggaatccgattttaaccaaggtcaataacaccaccggcaactgaaaactcaaacccatggccaacatgaatttgatcacaaaggtcatgtagtcgcgggcattccattcgtctgcagaaaatccaagccagtttgaaaattgtaccagtgcaagaatggcaattttcatcatgacaaagtagcagaaaagtattcccagaataaacaaaccgacaccgaatccggtcgtctggtaaaggaatttcttctcgtggatcctgagcgcagggaggatgaactgtcccagaaaaaagaagacaaatggagccgaaatcaccaatcctccataaagcatcaaatggaatgcaaccagaaatccatcgacgggcttgtagtttttcagacgatcgcgcagagcgttgagagggttctccgtgctgggctccagactgaggagtattcgatcatcttcctgaataggaacaagcttcaagctgtgcacttcatccaggttttcgatttgaatggtattggtgagtgaaagaatggaaatattcgctatccgggtatcccctaaagtcaatcctacaagatgattgctgttcaacttttggatttcagcttgttccagcggtgctttgaggatcgcgatgatgttgtccagcatggaaaaacacaccaccatgctgacaatgacggcgaccatgcacttgatcagagtccatcgtagatcttcgagatgttccaggaaggttttaaccgggccgccaccttctgcctcatcccattcctgatccacgacgagctcatcgttgggacgaggctcttcttcgctcatgtggggtcaatcgggtacgagaaccgcggcttcaggccttggacgtatcggcggcttcttccttaccgggagctgcgctgccttcgcctgtttcagattcctggggaataggtgccggttcggcagccttgcgaggaggcgccgaagcaacggaatcctcttccatggcctggtggaggtcttgttggacgtccttggtggcctttttgaattctttaattccctgaccaagccccttggccagctctggcaattttttggcgccgaagaaaatgagaatgacgacgagcagaaggatcacttcaggaccctgaagaccgccaatcaacgcaaattgagaatgaagatacaacatatgaaacaattcgttaaatcatcccgattgaaaatgagcaaagcaagatcaaagtaacatgatcaaaccagcaatcaaccggcttttgggtacgacatttgtaagttactgaagcaggacgaattcgccgcgtcggtttttcgaataagctgactcggtatcaccatcgacagcaggcttgtcttcaccccagctttcagtcgtgattctggaggaagcaatgccttccttgaccagaacatcccgcacggacaaggcccggcgctcgcccaaggtgcgattgtactcctcggtgccacgctcatcacaatgtccttcgatgcgaagcttcgcggcgggtgtgtccttgaggatgttcgccacggtgatgattttaggcaactcgctggcgttgacgttgtaacgatcgaaatcgaaatagacggtcgaagtttcaagtcgtgtttccgctttgtccgcgaaatcactcagattctccggaagggtatgaccatctccgtcctcaaactcagtgccttgactgaaattattattatc

SEQ ID NO: 830 - DNA, 4000 bp, Escherichia coli
  misc_feature (2)..(2): n is a, c, g, or t
  misc_feature (4)..(5): n is a, c, g, or t
  misc_feature (8)..(10): n is a, c, g, or t
  misc_feature (13)..(14): n is a, c, g, or t
  misc_feature (18)..(18): n is a, c, g, or t
  misc_feature (20)..(21): n is a, c, g, or t
  misc_feature (23)..(23): n is a, c, g, or t
  misc_feature (26)..(26): n is a, c, g, or t
  misc_feature (30)..(31): n is a, c, g, or t
  misc_feature (34)..(34): n is a, c, g, or t
  misc_feature (36)..(37): n is a, c, g, or t
  misc_feature (41)..(41): n is a, c, g, or t
  misc_feature (43)..(43): n is a, c, g, or t
  misc_feature (50)..(50): n is a, c, g, or t
  misc_feature (52)..(52): n is a, c, g, or t
  misc_feature (56)..(57): n is a, c, g, or t
  misc_feature (59)..(61): n is a, c, g, or t
  misc_feature (63)..(63): n is a, c, g, or t
  misc_feature (68)..(68): n is a, c, g, or t
  misc_feature (71)..(73): n is a, c, g, or t
  misc_feature (76)..(77): n is a, c, g, or t
  misc_feature (83)..(83): n is a, c, g, or t
  misc_feature (86)..(86): n is a, c, g, or t
  misc_feature (90)..(90): n is a, c, g, or t
  misc_feature (95)..(95): n is a, c, g, or t
  misc_feature (99)..(101): n is a, c, g, or t
  misc_feature (105)..(106): n is a, c, g, or t
  misc_feature (109)..(109): n is a, c, g, or t
  misc_feature (122)..(123): n is a, c, g, or t
  misc_feature (127)..(128): n is a, c, g, or t
  misc_feature (130)..(130): n is a, c, g, or t
  misc_feature (133)..(134): n is a, c, g, or t
  misc_feature (139)..(139): n is a, c, g, or t
  misc_feature (141)..(143): n is a, c, g, or t
  misc_feature (145)..(145): n is a, c, g, or t
  misc_feature (151)..(151): n is a, c, g, or t
  misc_feature (156)..(158): n is a, c, g, or t
  misc_feature (160)..(160): n is a, c, g, or t
  misc_feature (162)..(162): n is a, c, g, or t
  misc_feature (168)..(169): n is a, c, g, or t
  misc_feature (171)..(172): n is a, c, g, or t
  misc_feature (174)..(174): n is a, c, g, or t
  misc_feature (189)..(190): n is a, c, g, or t
  misc_feature (197)..(198): n is a, c, g, or t
  misc_feature (204)..(207): n is a, c, g, or t
  misc_feature (209)..(210): n is a, c, g, or t
  misc_feature (212)..(212): n is a, c, g, or t
  misc_feature (215)..(216): n is a, c, g, or t
  misc_feature (219)..(225): n is a, c, g, or t
  misc_feature (227)..(227): n is a, c, g, or t
  misc_feature (229)..(229): n is a, c, g, or t
  misc_feature (233)..(233): n is a, c, g, or t
  misc_feature (237)..(238): n is a, c, g, or t
  misc_feature (241)..(241): n is a, c, g, or t
  misc_feature (247)..(247): n is a, c, g, or t
  misc_feature (249)..(249): n is a, c, g, or t
  misc_feature (251)..(251): n is a, c, g, or t
  misc_feature (253)..(258): n is a, c, g, or t
  misc_feature (261)..(261): n is a, c, g, or t
  misc_feature (264)..(265): n is a, c, g, or t
  misc_feature (267)..(268): n is a, c, g, or t
  misc_feature (270)..(271): n is a, c, g, or t
  misc_feature (273)..(273): n is a, c, g, or t
  misc_feature (277)..(278): n is a, c, g, or t
  misc_feature (280)..(280): n is a, c, g, or t
  misc_feature (283)..(286): n is a, c, g, or t
  misc_feature (291)..(294): n is a, c, g, or t
  misc_feature (296)..(299): n is a, c, g, or t
  misc_feature (301)..(302): n is a, c, g, or t
  misc_feature (304)..(304): n is a, c, g, or t
  misc_feature (306)..(307): n is a, c, g, or t
  misc_feature (310)..(310): n is a, c, g, or t
  misc_feature (312)..(314): n is a, c, g, or t
  misc_feature (316)..(319): n is a, c, g, or t
  misc_feature (321)..(321): n is a, c, g, or t
  misc_feature (323)..(324): n is a, c, g, or t
  misc_feature (327)..(327): n is a, c, g, or t
  misc_feature (329)..(332): n is a, c, g, or t
  misc_feature (336)..(341): n is a, c, g, or t
  misc_feature (345)..(349): n is a, c, g, or t
  misc_feature (351)..(351): n is a, c, g, or t
  misc_feature (353)..(354): n is a, c, g, or t
  misc_feature (356)..(356): n is a, c, g, or t
  misc_feature (360)..(364): n is a, c, g, or t
  misc_feature (367)..(367): n is a, c, g, or t
  misc_feature (369)..(376): n is a, c, g, or t
  misc_feature (378)..(384): n is a, c, g, or t
  misc_feature (386)..(389): n is a, c, g, or t
  misc_feature (392)..(392): n is a, c, g, or t
  misc_feature (395)..(402): n is a, c, g, or t
  misc_feature (404)..(406): n is a, c, g, or t
  misc_feature (408)..(409): n is a, c, g, or t
  misc_feature (414)..(416): n is a, c, g, or t
  misc_feature (419)..(419): n is a, c, g, or t
  misc_feature (421)..(423): n is a, c, g, or t
  misc_feature (425)..(426): n is a, c, g, or t
  misc_feature (429)..(430): n is a, c, g, or t
  misc_feature (432)..(435): n is a, c, g, or t
  misc_feature (440)..(450): n is a, c, g, or t
  misc_feature (452)..(453): n is a, c, g, or t
  misc_feature (455)..(456): n is a, c, g, or t
  misc_feature (458)..(460): n is a, c, g, or t
  misc_feature (462)..(462): n is a, c, g, or t
  misc_feature (464)..(464): n is a, c, g, or t
  misc_feature (466)..(468): n is a, c, g, or t
  misc_feature (470)..(470): n is a, c, g, or t
  misc_feature (472)..(473): n is a, c, g, or t
  misc_feature (476)..(477): n is a, c, g, or t
  misc_feature (481)..(482): n is a, c, g, or t
  misc_feature (484)..(484): n is a, c, g, or t
  misc_feature (486)..(489): n is a, c, g, or t
  misc_feature (491)..(492): n is a, c, g, or t
  misc_feature (495)..(497): n is a, c, g, or t
  misc_feature (499)..(501): n is a, c, g, or t
  misc_feature (504)..(505): n is a, c, g, or t
  misc_feature (508)..(509): n is a, c, g, or t
  misc_feature (511)..(511): n is a, c, g, or t
  misc_feature (513)..(513): n is a, c, g, or t
  misc_feature (515)..(515): n is a, c, g, or t
  misc_feature (517)..(517): n is a, c, g, or t
  misc_feature (519)..(519): n is a, c, g, or t
  misc_feature (522)..(527): n is a, c, g, or t
  misc_feature (529)..(529): n is a, c, g, or t
  misc_feature (533)..(536): n is a, c, g, or t
  misc_feature (541)..(543): n is a, c, g, or t
  misc_feature (545)..(550): n is a, c, g, or t
  misc_feature (553)..(554): n is a, c, g, or t
  misc_feature (556)..(556): n is a, c, g, or t
  misc_feature (559)..(561): n is a, c, g, or t
  misc_feature (565)..(568): n is a, c, g, or t
  misc_feature (570)..(572): n is a, c, g, or t
  misc_feature (574)..(575): n is a, c, g, or t
  misc_feature (577)..(577): n is a, c, g, or t
  misc_feature (581)..(582): n is a, c, g, or t
  misc_feature (587)..(588): n is a, c, g, or t
  misc_feature (591)..(592): n is a, c, g, or t
  misc_feature (595)..(597): n is a, c, g, or t
  misc_feature (599)..(599): n is a, c, g, or t
  misc_feature (601)..(601): n is a, c, g, or t
  misc_feature (604)..(604): n is a, c, g, or t
  misc_feature (607)..(607): n is a, c, g, or t
  misc_feature (610)..(610): n is a, c, g, or t
  misc_feature (616)..(616): n is a, c, g, or t
  misc_feature (620)..(621): n is a, c, g, or t
  misc_feature (624)..(624): n is a, c, g, or t
  misc_feature (626)..(626): n is a, c, g, or t
  misc_feature (630)..(632): n is a, c, g, or t
  misc_feature (638)..(640): n is a, c, g, or t
  misc_feature (643)..(643): n is a, c, g, or t
  misc_feature (647)..(650): n is a, c, g, or t
  misc_feature (652)..(652): n is a, c, g, or t
  misc_feature (656)..(656): n is a, c, g, or t
  misc_feature (658)..(658): n is a, c, g, or t
  misc_feature (660)..(662): n is a, c, g, or t
  misc_feature (665)..(666): n is a, c, g, or t
  misc_feature (669)..(669): n is a, c, g, or t
  misc_feature (671)..(671): n is a, c, g, or t
  misc_feature (673)..(676): n is a, c, g, or t
  misc_feature (680)..(682): n is a, c, g, or t
  misc_feature (684)..(684): n is a, c, g, or t
  misc_feature (687)..(688): n is a, c, g, or t
  misc_feature (691)..(691): n is a, c, g, or t
  misc_feature (694)..(694): n is a, c, g, or t
  misc_feature (698)..(698): n is a, c, g, or t
  misc_feature (700)..(701): n is a, c, g, or t
  misc_feature (703)..(703): n is a, c, g, or t
  misc_feature (705)..(705): n is a, c, g, or t
  misc_feature (707)..(710): n is a, c, g, or t
  misc_feature (713)..(715): n is a, c, g, or t
  misc_feature (717)..(719): n is a, c, g, or t
  misc_feature (722)..(726): n is a, c, g, or t
  misc_feature (730)..(730): n is a, c, g, or t
  misc_feature (733)..(736): n is a, c, g, or t
  misc_feature (738)..(738): n is a, c, g, or t
  misc_feature (740)..(741): n is a, c, g, or t
  misc_feature (743)..(743): n is a, c, g, or t
  misc_feature (746)..(746): n is a, c, g, or t
  misc_feature (748)..(750): n is a, c, g, or t
  misc_feature (753)..(753): n is a, c, g, or t
  misc_feature (756)..(758): n is a, c, g, or t
  misc_feature (760)..(764): n is a, c, g, or t
  misc_feature (766)..(767): n is a, c, g, or t
  misc_feature (769)..(769): n is a, c, g, or t
  misc_feature (771)..(771): n is a, c, g, or t
  misc_feature (773)..(773): n is a, c, g, or t
  misc_feature (776)..(778): n is a, c, g, or t
  misc_feature (781)..(783): n is a, c, g, or t
  misc_feature (785)..(785): n is a, c, g, or t
  misc_feature (787)..(789): n is a, c, g, or t
  misc_feature (791)..(792): n is a, c, g, or t
  misc_feature (795)..(796): n is a, c, g, or t
  misc_feature (803)..(807): n is a, c, g, or t
  misc_feature (811)..(811): n is a, c, g, or t
  misc_feature (814)..(814): n is a, c, g, or t
  misc_feature (816)..(818): n is a, c, g, or t
  misc_feature (821)..(821): n is a, c, g, or t
  misc_feature (824)..(825): n is a, c, g, or t
  misc_feature (827)..(827): n is a, c, g, or t
  misc_feature (829)..(830): n is a, c, g, or t
  misc_feature (833)..(833): n is a, c, g, or t
  misc_feature (835)..(836): n is a, c, g, or t
  misc_feature (838)..(838): n is a, c, g, or t
  misc_feature (840)..(840): n is a, c, g, or t
  misc_feature (842)..(842): n is a, c, g, or t
  misc_feature (844)..(845): n is a, c, g, or t
  misc_feature (847)..(847): n is a, c, g, or t
  misc_feature (849)..(849): n is a, c, g, or t
  misc_feature (851)..(851): n is a, c, g, or t
  misc_feature (853)..(853): n is a, c, g, or t
  misc_feature (856)..(857): n is a, c, g, or t
  misc_feature (862)..(862): n is a, c, g, or t
  misc_feature (864)..(864): n is a, c, g, or t
  misc_feature (866)..(866): n is a, c, g, or t
  misc_feature (868)..(868): n is a, c, g, or t
  misc_feature (871)..(873): n is a, c, g, or t
  misc_feature (876)..(876): n is a, c, g, or t
  misc_feature (878)..(879): n is a, c, g, or t
  misc_feature (881)..(881): n is a, c, g, or t
  misc_feature (884)..(885): n is a, c, g, or t
  misc_feature (888)..(888): n is a, c, g, or t
  misc_feature (890)..(890): n is a, c, g, or t
  misc_feature (892)..(892): n is a, c, g, or t
  misc_feature (894)..(895): n is a, c, g, or t
  misc_feature (898)..(898): n is a, c, g, or t
  misc_feature (900)..(902): n is a, c, g, or t
  misc_feature (904)..(917): n is a, c, g, or t
  misc_feature (921)..(924): n is a, c, g, or t
  misc_feature (926)..(928): n is a, c, g, or t
  misc_feature (930)..(931): n is a, c, g, or t
  misc_feature (934)..(936): n is a, c, g, or t
  misc_feature (938)..(940): n is a, c, g, or t
  misc_feature (942)..(948): n is a, c, g, or t
  misc_feature (950)..(950): n is a, c, g, or t
  misc_feature (954)..(954): n is a, c, g, or t
  misc_feature (957)..(957): n is a, c, g, or t
  misc_feature (960)..(962): n is a, c, g, or t
  misc_feature (964)..(969): n is a, c, g, or t
  misc_feature (972)..(979): n is a, c, g, or t
  misc_feature (981)..(981): n is a, c, g, or t
  misc_feature (983)..(988): n is a, c, g, or t
  misc_feature (990)..(993): n is a, c, g, or t
  misc_feature (995)..(996): n is a, c, g, or t
  misc_feature (998)..(1001): n is a, c, g, or t
  misc_feature (1004)..(1004): n is a, c, g, or t
  misc_feature (1007)..(1009): n is a, c, g, or t
  misc_feature (1011)..(1012): n is a, c, g, or t
  misc_feature (1014)..(1016): n is a, c, g, or t
  misc_feature (1019)..(1019): n is a, c, g, or t
  misc_feature (1021)..(1021): n is a, c, g, or t
  misc_feature (1024)..(1024): n is a, c, g, or t
  misc_feature (1026)..(1029): n is a, c, g, or t
  misc_feature (1032)..(1033): n is a, c, g, or t
  misc_feature (1036)..(1036): n is a, c, g, or t
  misc_feature (1038)..(1038): n is a, c, g, or t
  misc_feature (1040)..(1040): n is a, c, g, or t
  misc_feature (1043)..(1045): n is a, c, g, or t
  misc_feature (1047)..(1049): n is a, c, g, or t
  misc_feature (1051)..(1051): n is a, c, g, or t
  misc_feature (1053)..(1054): n is a, c, g, or t
  misc_feature (1061)..(1061): n is a, c, g, or t
  misc_feature (1063)..(1063): n is a, c, g, or t
  misc_feature (1070)..(1071): n is a, c, g, or t
  misc_feature (1083)..(1084): n is a, c, g, or t
  misc_feature (1091)..(1091): n is a, c, g, or t
  misc_feature (1097)..(1097): n is a, c, g, or t
  misc_feature (1104)..(1104): n is a, c, g, or t
  misc_feature (1110)..(1112): n is a, c, g, or t
  misc_feature (1119)..(1119): n is a, c, g, or t
  misc_feature (1126)..(1127): n is a, c, g, or t
  misc_feature (1130)..(1130): n is a, c, g, or t
  misc_feature (1132)..(1132): n is a, c, g, or t
  misc_feature (1136)..(1136): n is a, c, g, or t
  misc_feature (1144)..(1144): n is a, c, g, or t
  misc_feature (1148)..(1148): n is a, c, g, or t
  misc_feature (1151)..(1152): n is a, c, g, or t
  misc_feature (1154)..(1155): n is a, c, g, or t
  misc_feature (1158)..(1158): n is a, c, g, or t
  misc_feature (1160)..(1161): n is a, c, g, or t
  misc_feature (1165)..(1165): n is a, c, g, or t
  misc_feature (1176)..(1177): n is a, c, g, or t
cnanncgnnngcnntttncnncngtnctanncantnnatgngngcagcgngncggnncnnngnaagcncgnnnggnncgctcnctnttcntcgcngctnnnaaannccntgcgtgcaggagnncganngngtnnggaangnnntncgcagntgtcnnncnanatcctnntnntncgcctgttgtaatannaggcacnnttcatnnnngnngngcnnggnnnnnnntncngtgnacanntgncgggcngnancnnnnnnttngtnngnntnntncacnncnagnnnntgatnnnngnnnngnngnannggncnnncnnnnantnngtncnnnncgtnnnnnngcannnnntngnnantgcnnnnntgnannnnnnnntnnnnnnnannnngcngannnnnnnngnnncnncaatnnnagngnnnanngcnntnnnncgggnnnnnnnnnnncnnannannncngnannngncnnacnngganngntnnnngnnatnnncnnngtnnaanntntncncngnaannnnnngnctgnnnntctgnnntnnnnnnctnngntgnnncagnnnngnnntnncngcanngcggnnatnncannnanancgntcnttncccttncggnnaangnctgnnntgggtnnngtnatgnnnncntcgncnannnagnnagngnannnntcgnnnanatnntcngtnaggntnncntncnnnnagnnnannntgnnnnngganatnnnnananncngtntnnnccnttnnngnnnnntnntntncnaannnatnnngncnnngnngtnngccagcnnnnngccngtncnnncgnctnntncnnacngnnanantncnntntnananaanntatcnanancntcnnngcnanncncgnnttntncntnncgnannncnnnnnnnnnnnnnngtannnncnnncnnaannncnnntnnnnnnngnggtnggnttnnncnnnnnncgnnnnnnnngntnnnnnntnnnncnncnnnnttncannncnntnnnagnanaangnnnngcnncangngnttnnngnnntncnncccacgntntgccctnnacggcaaaagtnnatagttnagaaantgtgccncatttnnngcccgcncccctgnnacngngaanacaacagncagnccnntnncantnnccgntcactgacttnnccggagtcttactgcttacaactccggctcggtcaccccctctgacgcgggaggctgcaggtgtatcattatagccttttccttggcaacatatggttttgccaaaccgcccatcgggtctgccggaaaaggaacgtacctgttatgctgggtattcagttgtcaaggtgctggggaacggactatatccgctaaagagaaaagcgtcggagaatggagtgtgccgccatacgatcttcttctgtttctgcctcattgtacttcctgcgaagccactcaatttctatcggttttaagtatgctgtatgagaattgggtctgcggtctataagagaaattcctccatgcggaccgggcttcgtgtcaatttcgtaaaagtccataaggtaaacaatatcataattgattgtgcggcgagaaacgccgaaccgtttcgcaaaatcatcgatgctatattttttatatgtatataaaagctcaataatttcattgcggcgtatttcgacgtcagacactccatcacctcctctcatttctctaaaccccatcttaaatgtaattagtgcaaaaaccttgcactaattatttgaactttttgtgaatttttgaagttaaaaaaacaccgccgatttcagtaaaggaatcagcggtgttttgcattagaagttttttattccgactatatgccaatagcggaaaagttcctgtctcatacagaaagattcagtgtaagttcttcaatgaaatatctctgtactagtttttctgctgtttgcaatgtatcaggtacagcataaaatttatagcaataccgcacaattcccgcctgacggcttaagcaccgttccggcggctgccgcaccttgctcgccgtatcggtacttagaattatgcggtattgccttatattacttcacctattattatgtgtatccttaccatcttgcttttataaacttttttcatctgttttgcttgcgtatccagcacagattgatttctaagttgcggtgtttttctatcccgatgttcgctgccaagcgaatagtcttacttcacacccttgtcaccaaggtctgacaggtaccgcgcacggcatagctgccgctgcctgcgggcaggaagaagctgtcgcctttcttgacgaccacggtctcaccaccgcaggtcagctcaccctcgccgtctgtgacgagcagcgaaacaaagctcttctcgtccgctgtgtcctcaaacgcgccgttcttggcatccacggtgaaatattcaccctgcgccagatggctgccgaagtcatgcttgacaggcggggtgcgcagggtcacgtccaacgccttctccacgtgcagggcgcggggcttgccgtccgcccccacacggccgtaatcgtacacacggtaggtcacgttggagttctgctgtacctcggcaatgacaatgcccttgcaaatggcgtgcagcgtgccggccggaataaagaagcagtcacccttgtgcaccggcacggcgttcaacacctcggtcagggtgttattcttgatgcgctcctcaaactccgccttggagatttcatggtcaaagccatagtacaggaaggcacccggctcacagtccagcacataccacatttcggtcttgccgtactgatgctcgtttttcagcgcgtactcgttggaggggtgtacctgaatggacagattgttctttgcgtcaatgaactttgtcaggattgggaactgttcaaacttctcgcagtcggtgccaaggcagcccgggtgggcggtcacatagtccgccagcgttgtgccgtccgccagatagctgggaccgtccgggtggcaggaaagcacccacgcctcggccagcgggttcagatcgctcttgatgccaaagtcactgcgcaggcggctgccgccccacaggtaatccttgcagctgggagtcaatttcagtatattcatatggatctcctttacctcaaaatttcattttttactcaggcatcttctgtttcctgttctcgcaaaaaatagcacacaataaacgctgactgtgtcatgcccagccagagtagaaacaccgcattccagcctcggctatgccgccgatgccccgtgcggtcgcagctgcaccaaaataggttatggcgctcagcacagggcgctaaaatcttcactttaagcaaaccacttctcggcgtctttcacaatttcacattcgaccttttcagcagcttctctgttttcggcactgacagaaatgtaaattttcagtttcggctccgtgccggagggacgcacgacaatagagcagttatcttccagcaggaacttcagcacttcagacttgggcagcccgtccaggccataagcataatccagcagctttacaaccttcttaccgccaaacgctttgatattgccgcggaatgcctgcataatgctctgcatcttggcaaaaccggcgctgccgtcgaactcgtagctgtgcagggtgttcaggcagtagccataggtcttgtacagctcgtccagcttatccagcaggctgatgcccttggtggcgtagtagctgaacatctcgcagatcatgtaagcaccgtccacgccgtccttatcgcggacgtaggagccggtcaggtagccgtagctttcctcaaagccgaacacatagctgtctgccctgccctgcttttccagcttgccaatctgctcaccgataaacttgaatcccgtcagcacattgattgtccgcaaaccataatgggtggcaatctgttcccccatatccatcgtcacgatggtcttaaccatgaccgggtcg

SEQ ID NO: 831 - DNA, 4000 bp, Escherichia coli
  misc_feature (6)..(7): n is a, c, g, or t
  misc_feature (11)..(11): n is a, c, g, or t
  misc_feature (13)..(13): n is a, c, g, or t
  misc_feature (15)..(15): n is a, c, g, or t
  misc_feature (19)..(20): n is a, c, g, or t
  misc_feature (28)..(29): n is a, c, g, or t
  misc_feature (35)..(36): n is a, c, g, or t
  misc_feature (38)..(38): n is a, c, g, or t
  misc_feature (40)..(40): n is a, c, g, or t
  misc_feature (43)..(45): n is a, c, g, or t
  misc_feature (49)..(49): n is a, c, g, or t
  misc_feature (51)..(51): n is a, c, g, or t
  misc_feature (53)..(58): n is a, c, g, or t
  misc_feature (62)..(62): n is a, c, g, or t
  misc_feature (65)..(65): n is a, c, g, or t
  misc_feature (67)..(67): n is a, c, g, or t
  misc_feature (71)..(71): n is a, c, g, or t
  misc_feature (73)..(73): n is a, c, g, or t
  misc_feature (75)..(77): n is a, c, g, or t
  misc_feature (79)..(79): n is a, c, g, or t
  misc_feature (82)..(82): n is a, c, g, or t
  misc_feature (85)..(85): n is a, c, g, or t
  misc_feature (87)..(87): n is a, c, g, or t
  misc_feature (90)..(90): n is a, c, g, or t
  misc_feature (93)..(93): n is a, c, g, or t
  misc_feature (95)..(95): n is a, c, g, or t
  misc_feature (99)..(100): n is a, c, g, or t
  misc_feature (108)..(110): n is a, c, g, or t
  misc_feature (112)..(118): n is a, c, g, or t
  misc_feature (120)..(120): n is a, c, g, or t
  misc_feature (122)..(123): n is a, c, g, or t
  misc_feature (125)..(126): n is a, c, g, or t
  misc_feature (128)..(128): n is a, c, g, or t
  misc_feature (130)..(130): n is a, c, g, or t
  misc_feature (132)..(132): n is a, c, g, or t
  misc_feature (135)..(135): n is a, c, g, or t
  misc_feature (137)..(137): n is a, c, g, or t
  misc_feature (139)..(141): n is a, c, g, or t
  misc_feature (144)..(144): n is a, c, g, or t
  misc_feature (154)..(154): n is a, c, g, or t
  misc_feature (157)..(159): n is a, c, g, or t
  misc_feature (163)..(165): n is a, c, g, or t
  misc_feature (167)..(167): n is a, c, g, or t
  misc_feature (169)..(169): n is a, c, g, or t
  misc_feature (171)..(172): n is a, c, g, or t
  misc_feature (174)..(174): n is a, c, g, or t
  misc_feature (180)..(181): n is a, c, g, or t
  misc_feature (183)..(183): n is a, c, g, or t
  misc_feature (189)..(190): n is a, c, g, or t
  misc_feature (192)..(192): n is a, c, g, or t
  misc_feature (195)..(197): n is a, c, g, or t
  misc_feature (200)..(201): n is a, c, g, or t
  misc_feature (205)..(205): n is a, c, g, or t
  misc_feature (208)..(210): n is a, c, g, or t
  misc_feature (212)..(214): n is a, c, g, or t
  misc_feature (216)..(216): n is a, c, g, or t
  misc_feature (218)..(218): n is a, c, g, or t
  misc_feature (220)..(224): n is a, c, g, or t
  misc_feature (226)..(227): n is a, c, g, or t
  misc_feature (229)..(229): n is a, c, g, or t
  misc_feature (231)..(233): n is a, c, g, or t
  misc_feature (238)..(239): n is a, c, g, or t
  misc_feature (241)..(243): n is a, c, g, or t
  misc_feature (249)..(249): n is a, c, g, or t
  misc_feature (254)..(254): n is a, c, g, or t
  misc_feature (267)..(267): n is a, c, g, or t
  misc_feature (275)..(275): n is a, c, g, or t
  misc_feature (277)..(277): n is a, c, g, or t
  misc_feature (281)..(281): n is a, c, g, or t
  misc_feature (283)..(284): n is a, c, g, or t
  misc_feature (290)..(290): n is a, c, g, or t
  misc_feature (292)..(293): n is a, c, g, or t
  misc_feature (308)..(308): n is a, c, g, or t
  misc_feature (312)..(312): n is a, c, g, or t
  misc_feature (319)..(319): n is a, c, g, or t
  misc_feature (321)..(321): n is a, c, g, or t
  misc_feature (325)..(325): n is a, c, g, or t
  misc_feature (332)..(332): n is a, c, g, or t
  misc_feature (348)..(348): n is a, c, g, or t
  misc_feature (355)..(355): n is a, c, g, or t
  misc_feature (360)..(360): n is a, c, g, or t
  misc_feature (366)..(366): n is a, c, g, or t
  misc_feature (370)..(370): n is a, c, g, or t
  misc_feature (377)..(377): n is a, c, g, or t
  misc_feature (389)..(389): n is a, c, g, or t
  misc_feature (402)..(402): n is a, c, g, or t
  misc_feature (405)..(405): n is a, c, g, or t
  misc_feature (407)..(407): n is a, c, g, or t
  misc_feature (410)..(410): n is a, c, g, or t
  misc_feature (418)..(418): n is a, c, g, or t
  misc_feature (428)..(429): n is a, c, g, or t
  misc_feature (431)..(432): n is a, c, g, or t
  misc_feature (437)..(439): n is a, c, g, or t
  misc_feature (447)..(447): n is a, c, g, or t
  misc_feature (453)..(453): n is a, c, g, or t
  misc_feature (456)..(456): n is a, c, g, or t
  misc_feature (459)..(459): n is a, c, g, or t
  misc_feature (465)..(465): n is a, c, g, or t
  misc_feature (467)..(469): n is a, c, g, or t
  misc_feature (472)..(472): n is a, c, g, or t
  misc_feature (474)..(474): n is a, c, g, or t
  misc_feature (482)..(482): n is a, c, g, or t
  misc_feature (484)..(485): n is a, c, g, or t
  misc_feature (487)..(487): n is a, c, g, or t
  misc_feature (492)..(492): n is a, c, g, or t
  misc_feature (495)..(495): n is a, c, g, or t
  misc_feature (498)..(498): n is a, c, g, or t
  misc_feature (500)..(501): n is a, c, g, or t
  misc_feature (504)..(504): n is a, c, g, or t
  misc_feature (507)..(507): n is a, c, g, or t
  misc_feature (512)..(512): n is a, c, g, or t
  misc_feature (515)..(515): n is a, c, g, or t
  misc_feature (517)..(517): n is a, c, g, or t
  misc_feature (521)..(521): n is a, c, g, or t
  misc_feature (527)..(528): n is a, c, g, or t
  misc_feature (530)..(530): n is a, c, g, or t
  misc_feature (532)..(532): n is a, c, g, or t
  misc_feature (535)..(535): n is a, c, g, or t
  misc_feature (537)..(537): n is a, c, g, or t
  misc_feature (539)..(540): n is a, c, g, or t
  misc_feature (544)..(544): n is a, c, g, or t
  misc_feature (546)..(546): n is a, c, g, or t
  misc_feature (549)..(549): n is a, c, g, or t
  misc_feature (551)..(551): n is a, c, g, or t
  misc_feature (553)..(553): n is a, c, g, or t
  misc_feature (557)..(557): n is a, c, g, or t
  misc_feature (559)..(559): n is a, c, g, or t
  misc_feature (563)..(564): n is a, c, g, or t
  misc_feature (567)..(567): n is a, c, g, or t
  misc_feature (569)..(569): n is a, c, g, or t
  misc_feature (573)..(573): n is a, c, g, or t
  misc_feature (575)..(578): n is a, c, g, or t
  misc_feature (581)..(583): n is a, c, g, or t
  misc_feature (588)..(588): n is a, c, g, or t
  misc_feature (590)..(591): n is a, c, g, or t
  misc_feature (593)..(593): n is a, c, g, or t
  misc_feature (597)..(597): n is a, c, g, or t
  misc_feature (599)..(600): n is a, c, g, or t
  misc_feature (603)..(605): n is a, c, g, or t
  misc_feature (607)..(607): n is a, c, g, or t
  misc_feature (611)..(611): n is a, c, g, or t
  misc_feature (616)..(616): n is a, c, g, or t
  misc_feature (618)..(619): n is a, c, g, or t
  misc_feature (621)..(623): n is a, c, g, or t
  misc_feature (625)..(625): n is a, c, g, or t
  misc_feature (634)..(634): n is a, c, g, or t
  misc_feature (636)..(638): n is a, c, g, or t
  misc_feature (640)..(641): n is a, c, g, or t
  misc_feature (643)..(643): n is a, c, g, or t
  misc_feature (646)..(646): n is a, c, g, or t
  misc_feature (649)..(651): n is a, c, g, or t
  misc_feature (656)..(656): n is a, c, g, or t
  misc_feature (659)..(659): n is a, c, g, or t
  misc_feature (662)..(663): n is a, c, g, or t
  misc_feature (666)..(667): n is a, c, g, or t
  misc_feature (679)..(679): n is a, c, g, or t
  misc_feature (681)..(683): n is a, c, g, or t
  misc_feature (686)..(686): n is a, c, g, or t
  misc_feature (689)..(690): n is a, c, g, or t
  misc_feature (693)..(695): n is a, c, g, or t
  misc_feature (698)..(698): n is a, c, g, or t
  misc_feature (701)..(701): n is a, c, g, or t
  misc_feature (739)..(739): n is a, c, g, or t
  misc_feature (760)..(760): n is a, c, g, or t
  misc_feature (1986)..(1986): n is a, c, g, or t
  misc_feature (2017)..(2017): n is a, c, g, or t
  misc_feature (2397)..(2397): n is a, c, g, or t
  misc_feature (2921)..(2921): n is a, c, g, or t
  misc_feature (3200)..(3200): n is a, c, g, or t
  misc_feature (3512)..(3512): n is a, c, g, or t
  misc_feature (3539)..(3539): n is a, c, g, or t
  misc_feature (3557)..(3557): n is a, c, g, or t
  misc_feature (3674)..(3674): n is a, c, g, or t
  misc_feature (3680)..(3680): n is a, c, g, or t
  misc_feature (3728)..(3728): n is a, c, g, or t
  misc_feature (3734)..(3734): n is a, c, g, or t
gcgggnngcantngncggnncctccggnnccggcnngncnacnnngctncngnnnnnnggcngtntngacngncnnncngcnggngnggngcncntcgnnggccgcgnnntnnnnnnncncnncnngngngngcncngnnngcngcgcaaccangcnnncggnnncntntnncngtttcnncncctgcnncnggnnntcnnggcnctnnngnnngngncnnnnncnntncnnntgcgnngnnngagggncgccngcgcgcgcaccgnggcccgcngnctcntnnagcgcntnnggctcggcgagcggntgcngcaccgncngcancagctcnccggcggggagcggcngcgcgcngcggncgcgcncgcnctggtgncgcagccgcggntcgtgctggccgntgngncgnccggcaanctggacggcnncnncgccnnnggcgtgcnggcgcngangcnggagcncnnncgngngcgcggcncnngnctggnggnggngnntcntgncctgnggntngccncgcgcnngnancgngncnncgancncgngngnggcncnctcnncgngngcgngnnnnaannngcggngnngngcgngnncgnnngngggngcttncnngnnngngcgcgccangnnngnngngcncgnnnccccnagngannggnncacggcgtcccngnnnggnccnncannngcncgngcccgccaccgaagtgtcaggccgccagggtgtcgtgncgggtgcggtagcggctggtnacctgccagcgccacaacaggtcgagcgacagccagccgacgatgccgacgagcagcgcgcaggtgacgcagccggcgatgaacggctgccacaccggcgccaggctgtggcctaaccagtgccagctggggacgaacctgaaatgctgccgcggcacgtgcagcagcgctgcgcccacccggtaggcgaggtagtacacgggtaccgcggtgaagggattgagcagcaaggtggtgccgcagatcaccgcaatgttgaggcgccagatgaccgcaacggtggttgccaggagcaggtgcaccggcaggggtacgaagcagatcgcaagtccggccccgaaggcgggcgtcacgccgcgccgatgcagcgtccacagcagcgggtcggtgagccgggcgccgaacggccgcaggaaccagcgttcgcgcagcgtgtgcgggtcggggaagagtcttttcagcagccggcgtggcatcgagccgcggactctaccagaaggccggcggcgggtatgtgcggcgtgccgcagcagcggcgctgccttgagcggccgcgcccctccggtatgatgccgcctttgcagccttaagctgccaggggtcgcgtaggatgtgggaaattgtgcgggccggcggcccgctgatgtggccgatcattctgtgctcgatcaccggggcggccatcgttctggagcgcctgtggaccctgcaggacaagcgcgtgctgccgcaggagctgccggagcgcgtgtggcagctgatcgaagcgaaccaggtcaatgacaaggtgatcgcgacgctcgagcagaactcgcccctcggcagactcctggccacggggctcgccaaccgccaccggtcgcgcgagatgctgatggagcgtctggaggacaccgggcgccacgtggtccacgagctcgagcgctttctcaacacgctcggcacgatcgccggcgtgtccccgctgctgggcctgctcggcaccgtgaccggcatcatccgctccttcaacgtcatccaggcgggcggcatgggcgacccgcgcgcactctccggcggcatcgccgaggcgctgatctgcaccgtcgccggcctgtgcgtcgccattcccgccctcatcttctatcgttacctgcgcggcagggtcgatggcatcgtggtgcagatggagaagcacgcgatccgcatggcggacgcgctggaagcggcgcggctgcgcgaacggncctcaccggcggccgccgcctagcgggcatnccgtgaacctcaagccgcgccgccacgaggagccggagatcaacgtcgtgtcgctgatcgacgtggtgctgctgctggtggtgttcttcatcctgtcgagccggttcagcgacgaggggcgcctgcgcgtgcacctgccgcatgcgagcgcggtgccggccgagaaggtgagcggcgagccgctggtggtgagcgtaacccagcagggcggttatctcgtcaacgggcacgagctcatcaactcgagccccgagacgctgcgcgccgcgctgctcaaggaagccggcaccaaccgcggtatccgggtcacgatgcgcgcggacgcccgcgcgactcaccagtccgtcatcaccgccatggacgtgctcgggcgcctcggnttctccgaggtcaatatcgccaccgtcaaggaagaggcggcgggcaagccttgaacgacgcacaccgcgcaggtgtcggaacgaggagcgcaccgcccctcgcgggcggggcgctgcgggcctaccggcgcctgctcggctacctgcgcccccatcggggacgtttcctgctcgggatcctcggcggggtgttgttttccgccaccatggcgagcttcgcgctgctcgccaagaaattcggcgacggcaccttcacccaccaggacccgcgcaccatcgtgtgggtgccgctcgcgctgatcggcctgttcatcctgcgcggcctgggcgacttcacccagacctacttcatgggctatgtcggccgccgcatcgtgagccagctgcggcgcgaggtgttccggcacatcctgcacctgccgatcggttacttcgatcgcagctcttccgccgcgctgctgtcgcgcctcacctacaacaccgagcagatcggccaggcgaccaccgactcggtgatcatcgtngtgcgcaccgcgctcaccatcatcgcctcggtcggctttctgctgtggctcaacgtgcgcctcacgctcatcgcgctcgtcatgggtccgctggtgggctggctggtgtcggtcatcaaccgccgtttccgccgctacagccgccgcatccaggactcgatgggcgacgtcacgcgcgtcgccaaggagggcttcgaagccccgcgcctgatcaaggtctacaacgccgaggagcatctcggccgccagttcgacgccgtgaacgatcgcaacctgcgntcgaacatgaagctcgtgctgaccaagggagtctcgaatccgaccgtgcagctggtgaccgtcgtgggtctcgcgttcgtgctgtcgatcgcgatagccgacgccgtgcacgcgcgcatgagcatgggcgacctgctgggcttcctcaccgcgctggtgagcatcgcgcagccgctgcgcgaactggtcggggtggccggccccctgcagcaggggatcgccgcggggcagagcctgttcgagctgctcgatgagccgcaagagccgcagggcggcagctggcgtgtggcgcgcgtgcacggggccgtgcanttcgaccacgtgtcgttctcgtacgcnggcgccgcgacgctggcngctgagccccgctctcgcgagcgcgccgcggcgctcactgacgtgtcgctgcaggtcgccgccggggagagtctggcgatcgtggggcgctccggcagcggcaagtcgacgctggtnaatctnctgccgcgcttctacgacgccggcgcgggcagcgtgcgcatcgacggncgcgangtgcgcgattacgcgctgcggaacctgcgcgaccagatcgcggtcgtcagccaggacgtggtgctgttcgatgacaccatccgcaacaacatcgccttcggccgcgagctgccggccgcggccctcgagcgcgcggcggaggccgcacacgtgctcgagttcgcgcgcgcccagcccgacgggctcgataccctggtgggcgaccgcggcgtcttgctctcgggcggccagcgccagcgcatcgccatcgcgcgggcgctgctgaa

SEQ ID NO: 832 - DNA, 4000 bp, Escherichia coli
catcagcgcttgtgcgtggatggtcagtctatctgtttgtatctctctcgtgaaggtgtgagcccgtgaaaaccctgtggaattggcttccaagcgccactgaccgtcgtgtgcgcattgccgcctgggcttctctcatcagccagatcctcatcattggcaccggtggggccgtccgactcaccgcctcaggtttggggtgccccacttggcctcggtgcaccgaagactccttcgttaccacggcggagatgggctttcacggaatcatcgagtttggcaatcggctcctgactttcgtgctcatcatcatcgccatcgtgatgttcgctttcgttctgcgaatgcgcaaagaacggcccgagctctttcgcctgtcgttaggccttggtctaggaattcctggtcaggcggttattggcggtgtcacggtcctaacagacctcaatccttatgttgtgggtctccattacctcctttcggcaattctcgtgggattcgcggcagtgcttctctaccgcgttcgcagcggaccgcgtcggagcggatggggcgtgccgggtgctgtgcgagccttgagcgccactctcctcgctgtactgggactctctgttgtcatggggattctcaccaccggatccggaccgcatgcaggagacgcgggcgcggcgagaaacggcttggactcctggttgcttcaacatttccacgcctggccctcctatattgtcctggggctggtcgtgacactcactgcgcttgcgtggtttgcaggtgtggggtcgcagggcttccgcagggtaataaccggctcgctggtcgtcaccagcgttcaaatagctgtgggcctctaccaggcgaattacggtctacctgttcttgccgtgggaatccacatggtcttggctgcggtacttgtcgcgttcgtcgtgaccgcacttctcgctcagcgcgaaccgcttacagcggaagaagcgggtcaatcccgaccgcgaggaagagtagcgtcaagtagctaatgctggagtgaaacaccttcatgggggcaagttcgccacctcggagggaacgctgatataggcggtgagactcgaagacgaaccaccctcctgctcctagcgcgacgacggagtagagcagtcccatcggagcggcgggaatcagcaacagcgatgccgcgacggtagcccatgcgtacaagatgacctgcagtcccacgacaggtgcctcacggaccacagcaagcatgggcacgtcaacccgcgcgtagtcctctcgatacttcatcgagagaggccagtagtggggcggcgtccacaggaacaccacgaggaacagaatccaagcttctaagctcagtgaaccggtgacagccgcccaaccaatgagtactggaaaacatccggcgattcctccccagatgatgttctgctcactccgcctcttgagccagagtgtatagacgaagacatagaagagaattgcagccagcgagagcccagcggcaagaggagtcgtgaaaacccagagccacgcgacagacagcactcccaggacactggcaaaaacgagagccgatcgtccagaaatatcccccgtcaccagaggtcttgcgctggtgcgacccatgtgaacatcaatgtcgcgatcgatgaacatgttgtaggcattggcgctgcccgcactgagggcgcctccgacaacagtggcgaccactagccagaggctcggtatgccacgttccgccagcaccataacggggatggtggtcaccaagagcagttcgatgacccggggcttcgtgagcgcaacgtaggcgcgaaccacggtccgaagactccgtggacgcacgggagcaccgagagaagaagtcatgacgggaagaatccttagggtaacgcgacagcctcagtctagggagaaaagcctctaaagagctgagtgcgtcacggcccaggtggagaattgcccctgggtatactgggttgtgtagggcctcaatcggtgccccagatagcggaatgtccaaaggatggccctcccacatgggatcagtgtttagcgaagttgacagagaagccgtagatatcgcgagagtgttggccgctgacgctgtggagaaagccggccatggacaccctggcaccgcaataagcctcgcgccagtggcctacctgctctatcaaaaagtgatgaagctcgacccgacggaccctcactggataggccgcgaccggttcatcctgtccgcggggcactcttctttgacgcagtatgttcagctcttcctgggcggcatggggctcgagctcgatgacatcaaggctctccggacctgggggtcactgacgccaggccaccccgaatttggtcacaccgaccatgtggagattacgacaggccccttggggcaaggcattgcttccgccaccggatttgcctacgcgcaacgttttgagcgggggctgtttgaccccgatgcggctcccggagagtccccctttgaccaccacgtgtttgtcattgctggtgacggtgacctgcaagagggggtctccgcggaggcggcgtccttagctggacatcaagagttgggaaatttagtcgttctctacgacgccaaccaaatctctatcgaggatgacgtcgacatcgcgttcagtgaggacgtggctctccgctacgagtcctatgggtggcacgtccagacggtggatttcggcgaagcggatggttacacggaggacgtggacgccttgttgggagccatctcgtccgccaaagctgagacgggtcgaccctcgttgatcgtgatcaagaccatcatcgggtggccctcccccaccaaaaaaaacaccggcaagattcacggctccgcactgggagcggacgaactaaaggcactcaaaacagaactgggggtggatccggacgccacatttgtcgtcccaccccatgttctcgagcacactcgatccttgcgtgagcgggctcacattgtgcggcacgcgtgggacgaaaaattcgactcctggggtagcgccaaccccgacaagaaagcgctgttggatcgtctcctgagcaagtcattgcctgacctggaagggctgcttccgacctttgaaggtgcagagactatggcaacgagagcggcctcgggacaggtcattaatgctcttgccgccgccctgccagaactctggggaggatcggctgaccttgcggattcgaacctcacgacaatcaaaggacggccttcttttgcgccggagcgtcgctccaccaaggaatggtcggcaaacccctacggctctgtcctgcactttggcatccgggaacacgcgatgggggcgatcctgaatgggattgcgctgcatggcccaactcggcccttcggcggtaccttcctgatcttcagcgactacatgcgccctgcagtgcgcctcgctgccctgatgggtgtgcctgtcatctacgtctggacacacgattcgattggtttgggagaggatggccccacccaccagcccgtggaacagttggcaacgctgcgggccattcccgggttggacatcgttcgacctgcggatgcgcatgaaactgcctgggcctggaagacgatgattgagcgcactagcaaccctgcgggtatcgctctcacgcgccaaggcatacccgttcttgcgcgcggagaggacgaagcgaccccgtcaacacttgcccatgcgcgccacaccgcccgtggtggatacgtcttagccgaagcagacggtgagctctccgtgatcctcatcgctacaggctccgaggtggcaattgcgctgaaagcgcgagagtctctccaagcggagggcgttggcactcgcgtcgtctcgatgccctgcgtggagtggtttgacgagcaagaacagggctaccgagagaccgtgttgcctgcttcggtgcgggcgcgcgtatccatcgaagctggaatttctcaatgttggcatcgctttgtcgg

SEQ ID NO: 833 - DNA, 4000 bp, Escherichia coli
  misc_feature (1175)..(1175): n is a, c, g, or t
  misc_feature (1618)..(1618): n is a, c, g, or t
  misc_feature (1659)..(1659): n is a, c, g, or t
  misc_feature (1995)..(1995): n is a, c, g, or t
  misc_feature (2926)..(2926): n is a, c, g, or t
  misc_feature (2962)..(2962): n is a, c, g, or t
  misc_feature (3944)..(3944): n is a, c, g, or t
agttggagcagcttagaattctatatgcaggttacaagattggtgttgttcaatcaaatgacacgccctcggctggagttgatacccccgaagatcttgaaagggtaagaaagtttttttctaattaaatagcagattcacccgtttcactagttctaatcctcactacctcttcaatattacttacaaaaattttcccatcgccaatttttccggtatgtgctgctgtagatattgcttcaatgacttttttaaccattttgtctgaaacaataatgtctaatttaattttgggtaaaaagtcaattacatactctgcacccctatagagttcagtgtggcctttttgtcttccaaaccctttaacttccgtcgctgtaatcccatttataccaatttcagaaagagcctctcttacttcgtctaatttaaatggtttaattactgcctcaatttttttcatctaatttccttcttcatatacattaatgtttaaaggttatggggtatcttctgtctttaccaaacgccctatgcgtaattttcggccctatgggactttgagctcttttaaattcgttattattgattaactttacaacgcgattcacatttttactagaaaaaccttcttttacaatcgacgctatatctagatctttttcaatataaagctcaattatcttatcaagaatttcatatttagggaggctattctgatcaagctggtcatgccttaattcagctgtaggtggtcttttaatgatttcatttggaatgatctttgatattgaatttctataatgtgctaatttataaacccatgtttttgggacgtctttaagaagtgcaaaacctcctaccatatctccataaagggttgtataacctacagcagtttcacttttattacttgttgatattacaagcccactaaatttattagacaaagccattaataaaacacccctgatgcgagcctgtaaattttcttcagttgtatcaaaaggcttatttttaaattcgcttgataatgtttttctaaaaagtttaaaaatagattgaatatctatttctttgtaattgacacctgtatttttaatcattttgcgagattcaataatgcttatttttgcggtaaattctgaaggcatcatgacagcagtaatatctcntttgtcaaatacgtcatttgctagcgctagaaccaaagcagaatctataccaccagatagacctataaatatgcttttaaagttattcttaactacataatctctaagtcctaatttaagcgcctcatataaatgtgcttccttgttataaaaagtattattaatgtttgcttttaaaaaaacatcaataatcgctgtttcttctttaaaaaatgataactgatgagtaagcttcgcttgtttgttaacaacaaaagagccaccatcaaatatgagctcatcttgacctccaattgcattgaggtagatcacagtagattttgtttccttagctagcttagttatgatttttactcgagcatcatatttttctatttcataaggggacgcattaactacaataatgacatcaactaattttttcttaagtaatttgcttgggnaaagactccaagcatcttcgcaaataagaagaccaatcttnaaactcttatgtttaaaaataaattctttttcacccggctcaaaatatctattttcatcaaatacgccataatttggcagaatttttttaaaataggtaccttgaatttttccattaaaaagtaatgatgctgcattgtatattttgccgcctttttttaatgggtgcccaacaattacttttatagaaggtaaggcttgcgcaatcctcgtcagtgattttgaacatgctttaagaaaatcttctcttaagacaagatcttcaggggggtagccgcacaaagagagttcaggagtaataactaattcagccccgttttcagcagcttctgtggcncgcttaataataagaatgctgttattttcaatatcaccaacaaacgaatttatttgtgctagagctattttcatagttttagtaactgccacccgcatttttaataaggtcaacaatttctgtatttttagctttgagcgcatatacaagagctgttaatccgtagcgatcttttgcttttaaattaacttttgattcaataaaaagttgaatcatttccttagatttatttgctacagcatagtgaattataggcgtgccatccgagtcttttcggtcaatattagcgccatttactataagaagttttgaaactgccaaatgattttttttcgtggcccaagtgagtgctgtccaattaaactgatcttcataatcaatttttacaccacgctttataaaaagacttaccgcatctgcattaccctctcttgaagcatacataagaggactgcatttgtatttgtctacgatatttggatcagcaccatggtcaagtagtgtttgaattgtttttatatcaccgtttttggaggcatacattaaaacagtttgaccagcatcgttagtgttattgggatcaatgccgcgtttgattaatagatctacgatattatgaaatcctgatatcgcagctagcccataagcgctccatccatcattgtctcttatttttggatctgctccattatctaaaagtaactgagctgatcgtatataatttttctttgcagcaaacattaatgcagtccagccgttactttcagttgcattcactgatgcgccttttttaattaagagtgccacaatcttatccatatcttttcttgctgcatacataagagctgtgacgccatcttcatctttactgtttggatttccaccgctttccaaaatagcgcttactgtctcaaggtcgccttttgatgcngctgttaaaaggtaatttactgactcttccgcattngctataaaagcaaaaaaagaagtgattagaaaaaagatgataagagtttttttatacaatttttatttttttaataatgcttgcatagtaagccccatgtccgcaggagacttagacatgttcacaccggctttttctagcgctttaattttatctattgcaagaccagagccttgagaaatgatagcgcccgcatgacccattctttttccttcaggggctgtaatgccagcaatataacctgcaataggtttttttatgtgttgtttgatatattcagcagccaattcttcatctgaaccaccaatttcaccaactaatataatgccctgagtatttttatcttcttcaaacatttgtaagcattcaataaaattgagtcctttgatgggatcgccaccaatgccaacacacgtgctttgacctaacccaagcactgttgtttgttgaacagcttcgtaagttaacgtgcctgattttgaaataatgccaatggatccaggcaagtgaatacttccaggcataatcccaatcttacattcgcctggtgttataacgccaggacaattagggccaatcagtttagattggttagcgcgaatagccgccttcacattaatcatatcttgtattggaataccttctgtaatacatacaataatttcaataccttcttcagaggcttcgataattgaatctgcagcgaaagcgggaggaacgtagatgactgatgcattggctccagttgttttaatagcatctctcactgtattaaatacaggtaaattaagatgtaatgtcccacctttgccaggcgtaaccccgccgactaattttgtaccataggtaattgcttgctctgagtgaaaagtaccttgtttgccagtaaagccttggcaaataagcctggtagatttattaatgagaatagacattttattttttgatgagactagttgcgatcgttgccgcttcggtaagngtgtttgcggccttaatatttaaaccgcttgtttgtaaaagttttttacctaaatc

SEQ ID NO: 834 - DNA, 4000 bp, Escherichia coli
  misc_feature (471)..(471): n is a, c, g, or t
  misc_feature (504)..(504): n is a, c, g, or t
  misc_feature (903)..(903): n is a, c, g, or t
  misc_feature (1016)..(1016): n is a, c, g, or t
  misc_feature (1434)..(1434): n is a, c, g, or t
  misc_feature (2290)..(2290): n is a, c, g, or t
  misc_feature (2374)..(2374): n is a, c, g, or t
  misc_feature (2377)..(2377): n is a, c, g, or t
  misc_feature (2380)..(2380): n is a, c, g, or t
  misc_feature (2767)..(2767): n is a, c, g, or t
  misc_feature (2791)..(2791): n is a, c, g, or t
  misc_feature (2809)..(2809): n is a, c, g, or t
  misc_feature (2881)..(2881): n is a, c, g, or t
caaattgttgacttggtagagaacactaaaatgaacaagagcaaaatcgtttgcaccatcgataaaattattccttattttgtttggacaacgttgttattagcgactcttacttttgtttattggtacccaaaagattttgatttggcgttgctcagtgccaccagcgtactaattatcacttgtccttgtgcatttggtttagccacaccaatgagcattgcagtggccagcggtgctgcagcaaaaaagaaaatactgattaaaaatggcgatgcattagaagtgttgagcaaggttaagcacgtggtatttgataaaaccggcacacttactttgggcgaatttaaagtaagtgggttggaatcaaagattgatcgagctgaatttttgagtattatggcgagtattgaaaagcattcagagcaccctttggctaaagccattgttgattacgccggcgctaaaaanaccttagcagttaaaaactttaatgcaataccnggtgaaggcgtggttgcaaaaattggctcaaagcagtatcggttgggcaatttaaactaccttgtgagccatggcgcgagcgaagacagtgacttgtctgataatgcgaacgcactagaaaaacaaggccatacttgtatctggtgcgctgacgagaacaaggtcttaggttttatttcgctcagcgatgaagtgaaatcggatgccaaagcagtggttaacgaactgcatcgaatgggtaaaaccgttaccatgctcagtggcgatagtaagcaggtcgcccaaacagtggctaagcatttgggcattaaaaatgttattgcacaggtattgccaagtgacaaagccaaccacattaaaactttgcaaaaaaatggcttagtgctgatggtgggtganggtattaatgatgcaccggctttggtacaggccgacagtagtattgccattggttctggcgccgatgtgagtgttggtagtgctgatgtggtggttttaaaaaatacactaanccctattattgaggcaattaaattgtcaaaaaatacacaaaataccattaagcaaaatattgctttcgccttattttacaatgccctgatggttccattggcgatgatggcaaaggtgacaccgctgtttgccgccattgtgatgccaataagttcactcattgtgattggcaatgctgctcgattaagggctaaaaagtgaagatattacaagtgaaatagtatataatccctcctctttgagaaatacataaaagttacagacatgaaaacagacattcatcctaattatgacaccgtaaaagtagtgtgttcgtgtggcaattcttttgaaacacgttctaccataggcaaagaaaatttaaatctagacgtgtgttctagttgccaccctttttacacgggcaagcaaaaaatnatggatactgcaggtcgcgttgagaagtttaaatcacgctacgcttcgtttaaaagataaagcattgaaaatccttaaaaagccacgagagtggctttttttatgcctgatgattactcaaatgccgatataattattacattcatttttagataggaaaattatgtcatttgattacattaacgccttattaaaaaaaccagtatcacgcacgcccatttgggtgatgcgacaagcagggcgttatttgcctgagtatcgtgccacacgcaaaaaagcaggtgactttatgagcttgtgtaaaaacccagaacttgcttgtgaagtgactatgcagccaatggatagatttgatctagacgcggccattttatttagtgacattttgaccattcctgatgccatgggtttagggctttattttagcgaaggcgaggggccgaaatttgaacgccctatccaaactttggcagatatcgaagccattccttcagaagttaataacgatttaacttatgtatttgacgcagtttctaccattaagtcagcattgggcgctcgtgcaccactcattggatttagtggcagtccttggactttggccacttatatgattgaaggtggcagtagcaagacattcgctaaaaccaaagccatgttatttaatgaccctaaaatgttgcacttgcttttagataaattagcagacagtgttattgcttatttagaccaacaagtacaaagtggtgtggacagtctaatggtgtttgatacttggggcggtgttctgtctaaatctaattatttggatttttcattaagctatatgcaaaaaattgtaaacggcgtcaaggcnaaacatccaaatacaccgattactttgtttagtaaaaacggcggcaagcatttgagcgaaattgcggatactggttgtgatggngtnggnattgattggacagtggaactcagcgaagttgagcaacaaattggcagtaaagtggccattcaaggtaacttagatcctgctgttatgtatgccacacctgaagttgttcgagtggaggttaaaaaagtattgagccaatttaaaggcgacacaggacatgtgtttaatttaggccatggcattactccagacgttgatccagagaacatgaaagtactggttgatagtgttcacgaatttagtaccaaataatttatgtcacgcttaaaaacggtttttagtcaattaccttctggtaataaagcttttatcccttttattactgcgggagacagcggtattgacaatacttacgagctaatgcaggtcttggttgagaatggcgcngacgtgattgagcttggtgtgccnttttctgatccgatggcngatggcccggtcattgctaagtcacacgaacgagcagtggaaggcggtgtaagtttgcatgacgtactaganttggtaaaaaaattcagacaaaccaacgatacaacggccattgtacttatgggctatctgaatccaattgaagtatttggttatcaagaattttctgatgctgcaagcaatagtggcgtggacggtgtgctggtagtggatatgccacccgaagaggcgcaggacttaaagcggtgtttagataaaaaggacattgactttattttcttagtagcacccaccacaaccgatcaacgcctagattctttggccgatattgcttctggatttgtttacttcgtctcgttaaaaggcgtgactggtgcgggtcatttagacgtagattctgttaatgacaacatagcaagaattcgtaagtatgttaatttgccaatcggtgttggttttggtatcaaggatgctaaaacagccaaagctgtgtcggcatcagccgatgccgttattgttggttcatctttagtatcatttgttgaacaatatgctcatgatagggataaaatgttagcaagcgttggtagattatcggctgaaatatcagccgctataaaataaaggatcgattatgagttggttagaaaaaatattaccctcaattagcagtggggtaaaaaagaacataccagaagggctttggagtaagtgccctaagtgttcctcaacattgtatgaggaagaattaaaaaaattagtctacgtgtgtccaaattgcgaccaccacatgagaatatctgccagagttcgacttgaaagttttttggatgtggatgggcaagaggagatagcgcctaatctagtagccgttgatccgctgaagtttaaagatcaaaagaaatacaaggatcgctattctcaagcacagaaaaatacaggtgaaaaagatgctttagtggttaaaaaaggcacactaaatggcatgccagttgtggtggctgcgtttgattttaaattcatgggcggctcgatgggatctgtggttggtgaaaaatttgtccgtgcagcgcaagaaagcatggcaagcaattcacccttgatttgtttttcagcatctggcggtgcgcgtatgcaagagggcttattttcactcatgcaaatgtctaaaacatcgttgattttaaagtt
